United States Patent Application Publication US 2026/0226133 A1 - sequence listing, part 18

SEQ ID NO: 39366 - DNA, 1893 bp, synthetic construct
  source 1..1893: mol_type = other DNA
atggccttaccagtgaccgccttgctcctgccgctggccttgctgctccacgccgccaggccggacatccagatgacacagagccctagcagcctgtctgccagcgtgggagacagagtgaccatcacctgtagagccagccaggacgtgaacacagccgtggcttggtatcagcagaagcctggcaaggcccctaagctgctgatctacagcgcctacttcctgtacagcggcgtgcccagcagattcagcggaagcagaagcggcaccgacttcaccctgacaatatccagcctccagcctgaggacttcgccacctactactgccagcagtacagcagatacagccccgtgacctttggacagggcaccaaggtggaaatcaagagactcgagagccagcctcacaccaagcccagcgtgttcgtgatgaagaacggcaccaacgtggcctgcctcgtgaaagagttctaccccaaggacatcaggatcaacctggtgtccagcaagaagatcaccgagttcgaccccgccatcgtgatctcccccagcggcaagtacaacgccgtgaagctggggaagtacgaggacagcaacagcgtgacctgctccgtgcagcacgacaacaagaccgtgcacagcaccgactttgaagtgaaaaccgactccaccgaccacgtgaagcccaaagagacagagaacaccaagcagcccagcaagagctgccacaagcccaaggccatcgtgcacaccgagaaagtgaacatgatgagcctgaccgtgctgggcctgcggatgctgttcgccaaaaccgtggccgtgaacttcctgctgaccgccaagctgttcttcctcagggccaagcgatctggatctggagcaacaaacttctcactactcaaacaagcaggtgacgtggaggagaatcccgggcctactagtatggactggatttggcgcatccttttccttgtcggcgctgctaccggcgcgcattccttcgaagaagttcagctggttgaaagtggtggcggcctggttcaacctggcggatctctgagactgagctgtgccgccagcggcttcaatgtgtacgcctctggaatgcactgggtccgacaggcccctggcaaaggacttgagtgggtcgccaaaatctaccccgacagcgactacacctattacgccgacagcgtgaagggcagattcaccatcagcgccgacaccagcaagaacaccgcctacctccagatgaactccctgagagccgaggacaccgccgtgtactactgtagcagagacagcagcttctactacgtgtacgctatggactactggggccagggcacactggtcacagtctcttctacgcgtgacaagcagctggacgccgacgtgtcccccaagcctaccatcttcctgccctctatcgccgagacaaagctccagaaggccggcacctacctgtgcctgctggaaaagttcttcccagatgtgattaagatccactggcaggaaaagaagtccaacaccatcctgggcagccaggaaggcaacaccatgaagaccaacgacacctacatgaagttcagctggctgaccgtgcccgagaagtccctggacaaagaacacagatgcatcgtgcggcacgaaaacaacaagaacggcgtggaccaggaaatcatcttcccacccatcaagaccgatgtgattacaatggaccccaaggacaactgctccaaggacgccaacgataccctgctgctccagctgaccaacaccagcgcctactacatgtacttgttgctgctgctgaagtccgtggtgtacttcgccatcatcacatgctgcctgctgcggagaaccgccttctgctgcaacggcgagaagtct

SEQ ID NO: 39367 - DNA, 1938 bp, synthetic construct
  source 1..1938: mol_type = other DNA
atggccttaccagtgaccgccttgctcctgccgctggccttgctgctccacgccgccaggccgctcgaggacaagcagctggacgccgacgtgtcccccaagcctaccatcttcctgccctctatcgccgagacaaagctccagaaggccggcacctacctgtgcctgctggaaaagttcttcccagatgtgattaagatccactggcaggaaaagaagtccaacaccatcctgggcagccaggaaggcaacaccatgaagaccaacgacacctacatgaagttcagctggctgaccgtgcccgagaagtccctggacaaagaacacagatgcatcgtgcggcacgaaaacaacaagaacggcgtggaccaggaaatcatcttcccacccatcaagaccgatgtgattacaatggaccccaaggacaactgctccaaggacgccaacgataccctgctgctccagctgaccaacaccagcgcctactacatgtacttgttgctgctgctgaagtccgtggtgtacttcgccatcatcacatgctgcctgctgcggagaaccgccttctgctgcaacggcgagaagtctagggccaagcgatctggatctggagcaacaaacttctcactactcaaacaagcaggtgacgtggaggagaatcccgggcctactagcatggccttaccagtgaccgccttgctcctgccgctggccttgctgctccacgccgccaggccggacatccagatgacacagagccctagcagcctgtctgccagcgtgggagacagagtgaccatcacctgtagagccagccaggacgtgaacacagccgtggcttggtatcagcagaagcctggcaaggcccctaagctgctgatctacagcgcctacttcctgtacagcggcgtgcccagcagattcagcggaagcagaagcggcaccgacttcaccctgacaatatccagcctccagcctgaggacttcgccacctactactgccagcagtacagcagatacagccccgtgacctttggacagggcaccaaggtggaaatcaagagaggcggaggcggaagtggaggcggaggatctggcggcggaggctctgaagttcagctggttgaaagtggtggcggcctggttcaacctggcggatctctgagactgagctgtgccgccagcggcttcaatgtgtacgcctctggaatgcactgggtccgacaggcccctggcaaaggacttgagtgggtcgccaaaatctaccccgacagcgactacacctattacgccgacagcgtgaagggcagattcaccatcagcgccgacaccagcaagaacaccgcctacctccagatgaactccctgagagccgaggacaccgccgtgtactactgtagcagagacagcagcttctactacgtgtacgctatggactactggggccagggcacactggtcacagtctcttctacgcgtagccagcctcacaccaagcccagcgtgttcgtgatgaagaacggcaccaacgtggcctgcctcgtgaaagagttctaccccaaggacatcaggatcaacctggtgtccagcaagaagatcaccgagttcgaccccgccatcgtgatctcccccagcggcaagtacaacgccgtgaagctggggaagtacgaggacagcaacagcgtgacctgctccgtgcagcacgacaacaagaccgtgcacagcaccgactttgaagtgaaaaccgactccaccgaccacgtgaagcccaaagagacagagaacaccaagcagcccagcaagagctgccacaagcccaaggccatcgtgcacaccgagaaagtgaacatgatgagcctgaccgtgctgggcctgcggatgctgttcgccaaaaccgtggccgtgaacttcctgctgaccgccaagctgttcttcctc

SEQ ID NO: 39368 - DNA, 2400 bp, synthetic construct
  source 1..2400: mol_type = other DNA
atggccttaccagtgaccgccttgctcctgccgctggccttgctgctccacgccgccaggccggacatccagatgacacagagccctagcagcctgtctgccagcgtgggagacagagtgaccatcacctgtagagccagccaggacgtgaacacagccgtggcttggtatcagcagaagcctggcaaggcccctaagctgctgatctacagcgcctacttcctgtacagcggcgtgcccagcagattcagcggaagcagaagcggcaccgacttcaccctgacaatatccagcctccagcctgaggacttcgccacctactactgccagcagtacagcagatacagccccgtgacctttggacagggcaccaaggtggaaatcaagagaggacagcctaaggccaatcctaccgtgacactgttccctccaagcagcgaagaactccaggccaacaaggccacacttgtgtgcctgatctccgacttctaccctggggctgtgacagtggcttggaaggccgatggatctcctgtgaaagccggcgtggaaaccaccaagccatccaagcagagcaacaacaaatacgccgccagctcctacctgagcctgacacctgagcagtggaagtcccacagatcctacagctgccaagtgacccacgaaggcagcaccgtggaaaagacagtggcccctacagagtgcagcggatcccagagcttcggcctgctggaccccaagctgtgctacctgctggatggcatcctgttcatctacggcgtgatcctgaccgccctgttcctgagagtgaagttcagcagaagcgccgacgcccctgcctaccagcagggacagaaccaactgtacaacgagctgaacctgggcagacgggaagagtacgacgtgctggacaagcggagaggcagggaccctgagatgggcggaaagccccagcggagaaagaacccccaggaaggactgtataacgaactccagaaagacaagatggccgaagcctacagcgagatcggcatgaagggcgagcggagaagaggcaagggccacgatggcctgtaccagggcctgagcaccgccaccaaggacacctatgacgccctgcacatgcaggccctgcctccaagaagggccaagcgatctggatctggagcaacaaacttctcactactcaaacaagcaggtgacgtggaggagaatcccgggcctactagtatggactggatttggcgcatccttttccttgtcggcgctgctaccggcgcgcattccttcgaagaagttcagctggttgaaagtggtggcggcctggttcaacctggcggatctctgagactgagctgtgccgccagcggcttcaatgtgtacgcctctggaatgcactgggtccgacaggcccctggcaaaggacttgagtgggtcgccaaaatctaccccgacagcgactacacctattacgccgacagcgtgaagggcagattcaccatcagcgccgacaccagcaagaacaccgcctacctccagatgaactccctgagagccgaggacaccgccgtgtactactgtagcagagacagcagcttctactacgtgtacgctatggactactggggccagggcacactggtcacagtctcttctgcctctacaaagggaccctccgtgtttcctctggctcccagcagcaagtctacaagcggaggaacagccgctctgggctgcctggtcaaggattactttcccgagcctgtgaccgtgtcctggaatagcggagcactgacaagcggcgtgcacacctttccagccgtgctgcaaagcagcggcctgtactctctgagcagcgtggtcacagtgcctagctctagcctgggcacccagacctacatctgcaatgtgaaccacaagcctagcaacaccaaggtggacaagagagtggaacccaagagctgtggtacccagagttttgggttgttggaccctaaattgtgctatctgttggacggaatcctgttcatttacggagtgatcctgaccgcattgttcctgcgggttaagttttccagatccgcagacgcacccgcttaccaacaagggcagaaccaactctacaatgaacttaatttggggcggagggaagagtacgacgttctggacaaaaggaggggacgagatcccgagatgggcggaaagcctcagcgaaggaagaatccgcaagaggggctttataacgaactccagaaagataaaatggcagaagcctatagtgagattgggatgaagggagaaaggaggaggggtaaaggtcacgatgggttgtaccaaggattgagcacagccactaaagatacctatgatgcgctccacatgcaggccctgccgccaaga

SEQ ID NO: 39369 - DNA, 2457 bp, synthetic construct
  source 1..2457: mol_type = other DNA
atggccttaccagtgaccgccttgctcctgccgctggccttgctgctccacgccgccaggccggacatccagatgacacagagccctagcagcctgtctgccagcgtgggagacagagtgaccatcacctgtagagccagccaggacgtgaacacagccgtggcttggtatcagcagaagcctggcaaggcccctaagctgctgatctacagcgcctacttcctgtacagcggcgtgcccagcagattcagcggaagcagaagcggcaccgacttcaccctgacaatatccagcctccagcctgaggacttcgccacctactactgccagcagtacagcagatacagccccgtgacctttggacagggcaccaaggtggaaatcaagagactcgaggacctgaagaacgtgttcccacctgaggtggccgtgttcgagcctagcgaggccgagatcagccacacccagaaagccaccctcgtgtgcctggctaccggcttctaccccgaccatgtggaactgtcttggtgggtcaacggcaaagaggtgcacagcggcgtgtctaccgacccccagccactgaaagaacagcccgccctgaacgacagccggtactgcctgagcagcagactgagagtgtccgccaccttctggcagaacccccggaaccacttcagatgccaggtgcagttctacggcctgagcgagaacgacgagtggacccaggacagagccaagcccgtgacccagatcgtgtctgccgaagcctggggcagagccgattgcggatcccagagcttcggcctgctggaccccaagctgtgctacctgctggatggcatcctgttcatctacggcgtgatcctgaccgccctgttcctgagagtgaagttcagcagaagcgccgacgcccctgcctaccagcagggacagaaccaactgtacaacgagctgaacctgggcagacgggaagagtacgacgtgctggacaagcggagaggcagggaccctgagatgggcggaaagccccagcggagaaagaacccccaggaaggactgtataacgaactccagaaagacaagatggccgaagcctacagcgagatcggcatgaagggcgagcggagaagaggcaagggccacgatggcctgtaccagggcctgagcaccgccaccaaggacacctatgacgccctgcacatgcaggccctgcctccaagaagggccaagcgatctggatctggagcaacaaacttctcactactcaaacaagcaggtgacgtggaggagaatcccgggcctactagtatggactggatttggcgcatccttttccttgtcggcgctgctaccggcgcgcattccttcgaagaagttcagctggttgaaagtggtggcggcctggttcaacctggcggatctctgagactgagctgtgccgccagcggcttcaatgtgtacgcctctggaatgcactgggtccgacaggcccctggcaaaggacttgagtgggtcgccaaaatctaccccgacagcgactacacctattacgccgacagcgtgaagggcagattcaccatcagcgccgacaccagcaagaacaccgcctacctccagatgaactccctgagagccgaggacaccgccgtgtactactgtagcagagacagcagcttctactacgtgtacgctatggactactggggccagggcacactggtcacagtctcttctacgcgtatccagaaccctgatcctgccgtgtaccagctgcgggatagcaagagcagcgacaagagcgtgtgtctgttcaccgacttcgacagccagaccaacgtgtcccagagcaaggactccgacgtgtacatcaccgataagaccgtgctggacatgcggagcatggacttcaagagcaactccgccgtggcctggtccaacaagtccgatttcgcctgcgccaacgccttcaacaacagcattatccccgaggacacattcttcccaagccccgagagcagctgcggtacccagagttttgggttgttggaccctaaattgtgctatctgttggacggaatcctgttcatttacggagtgatcctgaccgcattgttcctgcgggttaagttttccagatccgcagacgcacccgcttaccaacaagggcagaaccaactctacaatgaacttaatttggggcggagggaagagtacgacgttctggacaaaaggaggggacgagatcccgagatgggcggaaagcctcagcgaaggaagaatccgcaagaggggctttataacgaactccagaaagataaaatggcagaagcctatagtgagattgggatgaagggagaaaggaggaggggtaaaggtcacgatgggttgtaccaaggattgagcacagccactaaagatacctatgatgcgctccacatgcaggccctgccgccaaga

SEQ ID NO: 39370 - DNA, 2583 bp, synthetic construct
  source 1..2583: mol_type = other DNA
atggccttaccagtgaccgccttgctcctgccgctggccttgctgctccacgccgccaggccggacatccagatgacacagagccctagcagcctgtctgccagcgtgggagacagagtgaccatcacctgtagagccagccaggacgtgaacacagccgtggcttggtatcagcagaagcctggcaaggcccctaagctgctgatctacagcgcctacttcctgtacagcggcgtgcccagcagattcagcggaagcagaagcggcaccgacttcaccctgacaatatccagcctccagcctgaggacttcgccacctactactgccagcagtacagcagatacagccccgtgacctttggacagggcaccaaggtggaaatcaagagactcgaggaggacctgaagaacgtgttcccacctgaggtggccgtgttcgagcctagcgaggccgagatcagccacacccagaaagccaccctcgtgtgcctggctaccggcttctaccccgaccatgtggaactgtcttggtgggtcaacggcaaagaggtgcacagcggcgtgtctaccgacccccagccactgaaagaacagcccgccctgaacgacagccggtactgcctgagcagcagactgagagtgtccgccaccttctggcagaacccccggaaccacttcagatgccaggtgcagttctacggcctgagcgagaacgacgagtggacccaggacagagccaagcccgtgacccagatcgtgtctgccgaagcctggggcagagccgattgcggatcccagagcttcggcctgctggaccccaagctgtgctacctgctggatggcatcctgttcatctacggcgtgatcctgaccgccctgttcctgagagtgaagttcagcagaagcgccgacgcccctgcctaccagcagggacagaaccaactgtacaacgagctgaacctgggcagacgggaagagtacgacgtgctggacaagcggagaggcagggaccctgagatgggcggaaagccccagcggagaaagaacccccaggaaggactgtataacgaactccagaaagacaagatggccgaagcctacagcgagatcggcatgaagggcgagcggagaagaggcaagggccacgatggcctgtaccagggcctgagcaccgccaccaaggacacctatgacgccctgcacatgcaggccctgcctccaagaagggccaagcgatctggatctggagcaacaaacttctcactactcaaacaagcaggtgacgtggaggagaatcccgggcctactagtatggactggatttggcgcatccttttccttgtcggcgctgctaccggcgcgcattccttcgaagaagttcagctggttgaaagtggtggcggcctggttcaacctggcggatctctgagactgagctgtgccgccagcggcttcaatgtgtacgcctctggaatgcactgggtccgacaggcccctggcaaaggacttgagtgggtcgccaaaatctaccccgacagcgactacacctattacgccgacagcgtgaagggcagattcaccatcagcgccgacaccagcaagaacaccgcctacctccagatgaactccctgagagccgaggacaccgccgtgtactactgtagcagagacagcagcttctactacgtgtacgctatggactactggggccagggcacactggtcacagtctcttctacgcgtatccagaaccctgatcctgccgtgtaccagctgcgggatagcaagagcagcgacaagagcgtgtgtctgttcaccgacttcgacagccagaccaacgtgtcccagagcaaggactccgacgtgtacatcaccgataagaccgtgctggacatgcggagcatggacttcaagagcaactccgccgtggcctggtccaacaagtccgatttcgcctgcgccaacgccttcaacaacagcattatccccgaggacacattcttcccaagccccgagagcagctgcggtacccagagttttgggttgttggaccctaaattgtgctatctgttggacggaatcctgttcatttacggagtgatcctgaccgcattgttcctgaggagcaagcggtcacggctgctccacagcgattacatgaatatgacaccacgaagaccgggtcctactcgcaaacactaccaaccctacgcacctccccgcgactttgcagcgtaccgatctcgggttaagttttccagatccgcagacgcacccgcttaccaacaagggcagaaccaactctacaatgaacttaatttggggcggagggaagagtacgacgttctggacaaaaggaggggacgagatcccgagatgggcggaaagcctcagcgaaggaagaatccgcaagaggggctttataacgaactccagaaagataaaatggcagaagcctatagtgagattgggatgaagggagaaaggaggaggggtaaaggtcacgatgggttgtaccaaggattgagcacagccactaaagatacctatgatgcgctccacatgcaggccctgccgccaaga

SEQ ID NO: 39371 - DNA, 2712 bp, synthetic construct
  source 1..2712: mol_type = other DNA
atggccttaccagtgaccgccttgctcctgccgctggccttgctgctccacgccgccaggccggacatccagatgacacagagccctagcagcctgtctgccagcgtgggagacagagtgaccatcacctgtagagccagccaggacgtgaacacagccgtggcttggtatcagcagaagcctggcaaggcccctaagctgctgatctacagcgcctacttcctgtacagcggcgtgcccagcagattcagcggaagcagaagcggcaccgacttcaccctgacaatatccagcctccagcctgaggacttcgccacctactactgccagcagtacagcagatacagccccgtgacctttggacagggcaccaaggtggaaatcaagagactcgaggaggacctgaagaacgtgttcccacctgaggtggccgtgttcgagcctagcgaggccgagatcagccacacccagaaagccaccctcgtgtgcctggctaccggcttctaccccgaccatgtggaactgtcttggtgggtcaacggcaaagaggtgcacagcggcgtgtctaccgacccccagccactgaaagaacagcccgccctgaacgacagccggtactgcctgagcagcagactgagagtgtccgccaccttctggcagaacccccggaaccacttcagatgccaggtgcagttctacggcctgagcgagaacgacgagtggacccaggacagagccaagcccgtgacccagatcgtgtctgccgaagcctggggcagagccgattgcggatcccagagcttcggcctgctggaccccaagctgtgctacctgctggatggcatcctgttcatctacggcgtgatcctgaccgccctgttcctgaaacggggcagaaagaaactcctgtatatattcaaacaaccatttatgagaccagtacaaactactcaagaggaagatggctgtagctgccgatttccagaagaagaagaaggaggatgtgaactgagagtgaagttcagcagaagcgccgacgcccctgcctaccagcagggacagaaccaactgtacaacgagctgaacctgggcagacgggaagagtacgacgtgctggacaagcggagaggcagggaccctgagatgggcggaaagccccagcggagaaagaacccccaggaaggactgtataacgaactccagaaagacaagatggccgaagcctacagcgagatcggcatgaagggcgagcggagaagaggcaagggccacgatggcctgtaccagggcctgagcaccgccaccaaggacacctatgacgccctgcacatgcaggccctgcctccaagaagggccaagcgatctggatctggagcaacaaacttctcactactcaaacaagcaggtgacgtggaggagaatcccgggcctactagtatggactggatttggcgcatccttttccttgtcggcgctgctaccggcgcgcattccttcgaagaagttcagctggttgaaagtggtggcggcctggttcaacctggcggatctctgagactgagctgtgccgccagcggcttcaatgtgtacgcctctggaatgcactgggtccgacaggcccctggcaaaggacttgagtgggtcgccaaaatctaccccgacagcgactacacctattacgccgacagcgtgaagggcagattcaccatcagcgccgacaccagcaagaacaccgcctacctccagatgaactccctgagagccgaggacaccgccgtgtactactgtagcagagacagcagcttctactacgtgtacgctatggactactggggccagggcacactggtcacagtctcttctacgcgtatccagaaccctgatcctgccgtgtaccagctgcgggatagcaagagcagcgacaagagcgtgtgtctgttcaccgacttcgacagccagaccaacgtgtcccagagcaaggactccgacgtgtacatcaccgataagaccgtgctggacatgcggagcatggacttcaagagcaactccgccgtggcctggtccaacaagtccgatttcgcctgcgccaacgccttcaacaacagcattatccccgaggacacattcttcccaagccccgagagcagctgcggtacccagagttttgggttgttggaccctaaattgtgctatctgttggacggaatcctgttcatttacggagtgatcctgaccgcattgttcctgaagagaggccggaagaagctgctgtacatcttcaagcagcctttcatgcggcccgtgcagaccacccaggaagaggacggctgctcctgccggttccccgaggaagaagaaggcggctgcgagctgcgggttaagttttccagatccgcagacgcacccgcttaccaacaagggcagaaccaactctacaatgaacttaatttggggcggagggaagagtacgacgttctggacaaaaggaggggacgagatcccgagatgggcggaaagcctcagcgaaggaagaatccgcaagaggggctttataacgaactccagaaagataaaatggcagaagcctatagtgagattgggatgaagggagaaaggaggaggggtaaaggtcacgatgggttgtaccaaggattgagcacagccactaaagatacctatgatgcgctccacatgcaggccctgccgccaaga

SEQ ID NO: 39372 - DNA, 1773 bp, synthetic construct
  source 1..1773: mol_type = other DNA
atggccttaccagtgaccgccttgctcctgccgctggccttgctgctccacgccgccaggccggacatccagatgacacagagccctagcagcctgtctgccagcgtgggagacagagtgaccatcacctgtagagccagccaggacgtgaacacagccgtggcttggtatcagcagaagcctggcaaggcccctaagctgctgatctacagcgcctacttcctgtacagcggcgtgcccagcagattcagcggaagcagaagcggcaccgacttcaccctgacaatatccagcctccagcctgaggacttcgccacctactactgccagcagtacagcagatacagccccgtgacctttggacagggcaccaaggtggaaatcaagagactcgagcagagcttcggcctgctggaccccaagctgtgctacctgctggatggcatcctgttcatctacggcgtgatcctgaccgccctgttcctgagagtgaagttcagcagaagcgccgacgcccctgcctaccagcagggacagaaccaactgtacaacgagctgaacctgggcagacgggaagagtacgacgtgctggacaagcggagaggcagggaccctgagatgggcggaaagccccagcggagaaagaacccccaggaaggactgtataacgaactccagaaagacaagatggccgaagcctacagcgagatcggcatgaagggcgagcggagaagaggcaagggccacgatggcctgtaccagggcctgagcaccgccaccaaggacacctatgacgccctgcacatgcaggccctgcctccaagaagggccaagcgatctggatctggagcaacaaacttctcactactcaaacaagcaggtgacgtggaggagaatcccgggcctactagtatggactggatttggcgcatccttttccttgtcggcgctgctaccggcgcgcattccttcgaagaagttcagctggttgaaagtggtggcggcctggttcaacctggcggatctctgagactgagctgtgccgccagcggcttcaatgtgtacgcctctggaatgcactgggtccgacaggcccctggcaaaggacttgagtgggtcgccaaaatctaccccgacagcgactacacctattacgccgacagcgtgaagggcagattcaccatcagcgccgacaccagcaagaacaccgcctacctccagatgaactccctgagagccgaggacaccgccgtgtactactgtagcagagacagcagcttctactacgtgtacgctatggactactggggccagggcacactggtcacagtctcttctacgcgtcagagttttgggttgttggaccctaaattgtgctatctgttggacggaatcctgttcatttacggagtgatcctgaccgcattgttcctgcgggttaagttttccagatccgcagacgcacccgcttaccaacaagggcagaaccaactctacaatgaacttaatttggggcggagggaagagtacgacgttctggacaaaaggaggggacgagatcccgagatgggcggaaagcctcagcgaaggaagaatccgcaagaggggctttataacgaactccagaaagataaaatggcagaagcctatagtgagattgggatgaagggagaaaggaggaggggtaaaggtcacgatgggttgtaccaaggattgagcacagccactaaagatacctatgatgcgctccacatgcaggccctgccgccaaga

SEQ ID NO: 39373 - DNA, 1947 bp, synthetic construct
  source 1..1947: mol_type = other DNA
atggccttaccagtgaccgccttgctcctgccgctggccttgctgctccacgccgccaggccggacatccagatgacacagagccctagcagcctgtctgccagcgtgggagacagagtgaccatcacctgtagagccagccaggacgtgaacacagccgtggcttggtatcagcagaagcctggcaaggcccctaagctgctgatctacagcgcctacttcctgtacagcggcgtgcccagcagattcagcggaagcagaagcggcaccgacttcaccctgacaatatccagcctccagcctgaggacttcgccacctactactgccagcagtacagcagatacagccccgtgacctttggacagggcaccaaggtggaaatcaagagactcgagggacagcctaaggccaatcctaccgtgacactgttccctccaagcagcgaagaactccaggccaacaaggccacacttgtgtgcctgatctccgacttctaccctggggctgtgacagtggcttggaaggccgatggatctcctgtgaaagccggcgtggaaaccaccaagccatccaagcagagcaacaacaaatacgccgccagctcctacctgagcctgacacctgagcagtggaagtcccacagatcctacagctgccaagtgacccacgaaggcagcaccgtggaaaagacagtggcccctacagagtgcagccccatcaagaccgatgtgattacaatggaccccaaggacaactgctccaaggacgccaacgataccctgctgctccagctgaccaacaccagcgcctactacatgtacttgttgctgctgctgaagtccgtggtgtacttcgccatcatcacatgctgcctgctgcggagaaccgccttctgctgcaacggcgagaagtctagggccaagcgatctggatctggagcaacaaacttctcactactcaaacaagcaggtgacgtggaggagaatcccgggcctactagtatggactggatttggcgcatccttttccttgtcggcgctgctaccggcgcgcattccttcgaagaagttcagctggttgaaagtggtggcggcctggttcaacctggcggatctctgagactgagctgtgccgccagcggcttcaatgtgtacgcctctggaatgcactgggtccgacaggcccctggcaaaggacttgagtgggtcgccaaaatctaccccgacagcgactacacctattacgccgacagcgtgaagggcagattcaccatcagcgccgacaccagcaagaacaccgcctacctccagatgaactccctgagagccgaggacaccgccgtgtactactgtagcagagacagcagcttctactacgtgtacgctatggactactggggccagggcacactggtcacagtctcttctacgcgtgcctctacaaagggaccctccgtgtttcctctggctcccagcagcaagtctacaagcggaggaacagccgctctgggctgcctggtcaaggattactttcccgagcctgtgaccgtgtcctggaatagcggagcactgacaagcggcgtgcacacctttccagccgtgctgcaaagcagcggcctgtactctctgagcagcgtggtcacagtgcctagctctagcctgggcacccagacctacatctgcaatgtgaaccacaagcctagcaacaccaaggtggacaagagagtggaacccaagagctgtgaagtgaaaaccgactccaccgaccacgtgaagcccaaagagacagagaacaccaagcagcccagcaagagctgccacaagcccaaggccatcgtgcacaccgagaaagtgaacatgatgagcctgaccgtgctgggcctgcggatgctgttcgccaaaaccgtggccgtgaacttcctgctgaccgccaagctgttcttcctc

SEQ ID NO: 39374 - DNA, 1881 bp, synthetic construct
  source 1..1881: mol_type = other DNA
atggccttaccagtgaccgccttgctcctgccgctggccttgctgctccacgccgccaggccggacatccagatgacacagagccctagcagcctgtctgccagcgtgggagacagagtgaccatcacctgtagagccagccaggacgtgaacacagccgtggcttggtatcagcagaagcctggcaaggcccctaagctgctgatctacagcgcctacttcctgtacagcggcgtgcccagcagattcagcggaagcagaagcggcaccgacttcaccctgacaatatccagcctccagcctgaggacttcgccacctactactgccagcagtacagcagatacagccccgtgacctttggacagggcaccaaggtggaaatcaagagactcgagggacagcctaaggccaatcctaccgtgacactgttccctccaagcagcgaagaactccaggccaacaaggccacacttgtgtgcctgatctccgacttctaccctggggctgtgacagtggcttggaaggccgatggatctcctgtgaaagccggcgtggaaaccaccaagccatccaagcagagcaacaacaaatacgccgccagctcctacctgagcctgacacctgagcagtggaagtcccacagatcctacagctgccaagtgacccacgaaggcagcaccgtggaaaagacagtggcccctacagagtgcagcggcagagccgattgcggcatcaccagcgccagctaccaccagggcgtgctgagcgccaccatcctgtacgagatcctgctgggcaaggccaccctgtacgccgtgctggtgtctgccctggtgctgatggctatggtcaagcggaaggacagccggggaagggccaagcgatctggatctggagcaacaaacttctcactactcaaacaagcaggtgacgtggaggagaatcccgggcctactagtatggactggatttggcgcatccttttccttgtcggcgctgctaccggcgcgcattccttcgaagaagttcagctggttgaaagtggtggcggcctggttcaacctggcggatctctgagactgagctgtgccgccagcggcttcaatgtgtacgcctctggaatgcactgggtccgacaggcccctggcaaaggacttgagtgggtcgccaaaatctaccccgacagcgactacacctattacgccgacagcgtgaagggcagattcaccatcagcgccgacaccagcaagaacaccgcctacctccagatgaactccctgagagccgaggacaccgccgtgtactactgtagcagagacagcagcttctactacgtgtacgctatggactactggggccagggcacactggtcacagtctcttctacgcgtgcctctacaaagggaccctccgtgtttcctctggctcccagcagcaagtctacaagcggaggaacagccgctctgggctgcctggtcaaggattactttcccgagcctgtgaccgtgtcctggaatagcggagcactgacaagcggcgtgcacacctttccagccgtgctgcaaagcagcggcctgtactctctgagcagcgtggtcacagtgcctagctctagcctgggcacccagacctacatctgcaatgtgaaccacaagcctagcaacaccaaggtggacaagagagtggaacccaagagctgtatccccgaggacacattcttcccaagcagcgacgtgccctgcgacgtgaagctggtggaaaagagcttcgagacagacaccaacctgaacttccagaacctgagcgtgatcggcttcagaatcctgctgctgaaagtggccggctttaacctgctgatgaccctgcggctgtggtccagc

SEQ ID NO: 39375 - DNA, 1881 bp, synthetic construct
  source 1..1881: mol_type = other DNA
atggccttaccagtgaccgccttgctcctgccgctggccttgctgctccacgccgccaggccggacatccagatgacacagagccctagcagcctgtctgccagcgtgggagacagagtgaccatcacctgtagagccagccaggacgtgaacacagccgtggcttggtatcagcagaagcctggcaaggcccctaagctgctgatctacagcgcctacttcctgtacagcggcgtgcccagcagattcagcggaagcagaagcggcaccgacttcaccctgacaatatccagcctccagcctgaggacttcgccacctactactgccagcagtacagcagatacagccccgtgacctttggacagggcaccaaggtggaaatcaagagactcgagggacagcctaaggccaatcctaccgtgacactgttccctccaagcagcgaagaactccaggccaacaaggccacacttgtgtgcctgatctccgacttctaccctggggctgtgacagtggcttggaaggccgatggatctcctgtgaaagccggcgtggaaaccaccaagccatccaagcagagcaacaacaaatacgccgccagctcctacctgagcctgacacctgagcagtggaagtcccacagatcctacagctgccaagtgacccacgaaggcagcaccgtggaaaagacagtggcccctacagagtgcagcggcagagccgattgcggctttaccagcgagagctaccagcagggcgtgctgagcgccaccatcctgtacgagatcctgctgggcaaggccaccctgtacgccgtgctggtgtctgccctggtgctgatggctatggtcaagcggaaggacagccggggaagggccaagcgatctggatctggagcaacaaacttctcactactcaaacaagcaggtgacgtggaggagaatcccgggcctactagtatggactggatttggcgcatccttttccttgtcggcgctgctaccggcgcgcattccttcgaagaagttcagctggttgaaagtggtggcggcctggttcaacctggcggatctctgagactgagctgtgccgccagcggcttcaatgtgtacgcctctggaatgcactgggtccgacaggcccctggcaaaggacttgagtgggtcgccaaaatctaccccgacagcgactacacctattacgccgacagcgtgaagggcagattcaccatcagcgccgacaccagcaagaacaccgcctacctccagatgaactccctgagagccgaggacaccgccgtgtactactgtagcagagacagcagcttctactacgtgtacgctatggactactggggccagggcacactggtcacagtctcttctacgcgtgcctctacaaagggaccctccgtgtttcctctggctcccagcagcaagtctacaagcggaggaacagccgctctgggctgcctggtcaaggattactttcccgagcctgtgaccgtgtcctggaatagcggagcactgacaagcggcgtgcacacctttccagccgtgctgcaaagcagcggcctgtactctctgagcagcgtggtcacagtgcctagctctagcctgggcacccagacctacatctgcaatgtgaaccacaagcctagcaacaccaaggtggacaagagagtggaacccaagagctgtatccccgaggacacattcttcccaagccccgagagcagctgcgacgtgaagctggtggaaaagagcttcgagacagacaccaacctgaacttccagaacctgagcgtgatcggcttcagaatcctgctgctgaaagtggccggctttaacctgctgatgaccctgcggctgtggtccagc

SEQ ID NO: 39376 - DNA, 1359 bp, synthetic construct
  source 1..1359: mol_type = other DNA
atggccttaccagtgaccgccttgctcctgccgctggccttgctgctccacgccgccaggccggacatccagatgacacagagccctagcagcctgtctgccagcgtgggagacagagtgaccatcacctgtagagccagccaggacgtgaacacagccgtggcttggtatcagcagaagcctggcaaggcccctaagctgctgatctacagcgcctacttcctgtacagcggcgtgcccagcagattcagcggaagcagaagcggcaccgacttcaccctgacaatatccagcctccagcctgaggacttcgccacctactactgccagcagtacagcagatacagccccgtgacctttggacagggcaccaaggtggaaatcaagagaggcggaggcggaagtggaggcggaggatctggcggcggaggctctgaagttcagctggttgaaagtggtggcggcctggttcaacctggcggatctctgagactgagctgtgccgccagcggcttcaatgtgtacgcctctggaatgcactgggtccgacaggcccctggcaaaggacttgagtgggtcgccaaaatctaccccgacagcgactacacctattacgccgacagcgtgaagggcagattcaccatcagcgccgacaccagcaagaacaccgcctacctccagatgaactccctgagagccgaggacaccgccgtgtactactgtagcagagacagcagcttctactacgtgtacgctatggactactggggccagggcacactggtcacagtctcttctacgcgtgacggtaacgaggagatgggaggaatcactcaaaccccttacaaagtctcaatttcaggaacaactgttatccttacatgtccccagtatcctggcagcgagatcctttggcagcataacgacaagaatatagggggagatgaagacgataagaatatcggatctgacgaggatcacttgagcctgaaagagttctccgagcttgaacaaagcggatattatgtgtgctatccgcgcgggtcaaagccggaagacgctaacttttacctttatctccgagccagagtgtgcgaaaattgcatggaaatggacgttatgtccgttgctacaatagttatcgtagatatatgcatcacgggtggactgcttctgctggtttattattggtccaagaatagaaaggccaaagctaaacccgtgaccagaggcgctggcgcaggcggaaggcaaaggggacaaaacaaagaacggccaccaccagtgccaaatccagattatgagcctattcggaaaggacagagggacctgtactctggcctgaatcagagaagaatc

SEQ ID NO: 39377 - DNA, 1254 bp, synthetic construct
  source 1..1254: mol_type = other DNA
atggccttaccagtgaccgccttgctcctgccgctggccttgctgctccacgccgccaggccggacatccagatgacacagagccctagcagcctgtctgccagcgtgggagacagagtgaccatcacctgtagagccagccaggacgtgaacacagccgtggcttggtatcagcagaagcctggcaaggcccctaagctgctgatctacagcgcctacttcctgtacagcggcgtgcccagcagattcagcggaagcagaagcggcaccgacttcaccctgacaatatccagcctccagcctgaggacttcgccacctactactgccagcagtacagcagatacagccccgtgacctttggacagggcaccaaggtggaaatcaagagaggcggaggcggaagtggaggcggaggatctggcggcggaggctctgaagttcagctggttgaaagtggtggcggcctggttcaacctggcggatctctgagactgagctgtgccgccagcggcttcaatgtgtacgcctctggaatgcactgggtccgacaggcccctggcaaaggacttgagtgggtcgccaaaatctaccccgacagcgactacacctattacgccgacagcgtgaagggcagattcaccatcagcgccgacaccagcaagaacaccgcctacctccagatgaactccctgagagccgaggacaccgccgtgtactactgtagcagagacagcagcttctactacgtgtacgctatggactactggggccagggcacactggtcacagtctcttctacgcgtttcaagatccccatcgaggaactggaagatcgggtgttcgtgaactgcaacacctctatcacctgggtggaaggcaccgtgggaacactgctgagcgacatcaccagactggacctcggcaagcggattctggaccctcggggcatctacagatgcaacggcaccgacatctacaaggacaaagaaagcaccgtgcaggtccactacagaatgtgccagtcctgcgtggaactggaccctgctacagtggccggcatcatcgtgaccgatgtgatcgctactctgctgctggctctgggagtgttctgcttcgccggacacgaaacaggcagactgtctggcgctgccgatacacaggccctgctgagaaacgaccaagtgtatcagcccctgcgcgacagagatgatgcccagtattctcacctcggcggcaactgggctagaaacaag

SEQ ID NO: 39378 - DNA, 1284 bp, synthetic construct
  source 1..1284: mol_type = other DNA
atggccttaccagtgaccgccttgctcctgccgctggccttgctgctccacgccgccaggccggacatccagatgacacagagccctagcagcctgtctgccagcgtgggagacagagtgaccatcacctgtagagccagccaggacgtgaacacagccgtggcttggtatcagcagaagcctggcaaggcccctaagctgctgatctacagcgcctacttcctgtacagcggcgtgcccagcagattcagcggaagcagaagcggcaccgacttcaccctgacaatatccagcctccagcctgaggacttcgccacctactactgccagcagtacagcagatacagccccgtgacctttggacagggcaccaaggtggaaatcaagagaggcggaggcggaagtggaggcggaggatctggcggcggaggctctgaagttcagctggttgaaagtggtggcggcctggttcaacctggcggatctctgagactgagctgtgccgccagcggcttcaatgtgtacgcctctggaatgcactgggtccgacaggcccctggcaaaggacttgagtgggtcgccaaaatctaccccgacagcgactacacctattacgccgacagcgtgaagggcagattcaccatcagcgccgacaccagcaagaacaccgcctacctccagatgaactccctgagagccgaggacaccgccgtgtactactgtagcagagacagcagcttctactacgtgtacgctatggactactggggccagggcacactggtcacagtctcttctacgcgtcagagcatcaagggcaaccacctggtcaaggtgtacgactaccaagaggacggcagcgtgctgctgacatgtgatgccgaggccaagaacatcacctggtttaaggacggcaagatgatcggcttcctgaccgaggacaagaagaagtggaacctgggcagcaacgctaaggaccccagaggcatgtatcagtgcaagggcagccagaacaagagcaagcccctccaggtgtactaccggatgtgccagaactgcatcgagctgaacgccgctaccatcagcggctttctgttcgccgagatcgtgtccatcttcgtgctggccgtgggcgtgtactttatcgctggacaggatggcgtgcggcagagcagagcttccgataagcaaaccctgctgcctaacgaccagctgtaccagcctctgaaggacagagaggacgaccagtacagccacctccagggcaatcagctgagaagaaac

SEQ ID NO: 39379 - DNA, 1233 bp, synthetic construct
  source 1..1233: mol_type = other DNA
atggccttaccagtgaccgccttgctcctgccgctggccttgctgctccacgccgccaggccggacatccagatgacacagagccctagcagcctgtctgccagcgtgggagacagagtgaccatcacctgtagagccagccaggacgtgaacacagccgtggcttggtatcagcagaagcctggcaaggcccctaagctgctgatctacagcgcctacttcctgtacagcggcgtgcccagcagattcagcggaagcagaagcggcaccgacttcaccctgacaatatccagcctccagcctgaggacttcgccacctactactgccagcagtacagcagatacagccccgtgacctttggacagggcaccaaggtggaaatcaagagaggcggaggcggaagtggaggcggaggatctggcggcggaggctctgaagttcagctggttgaaagtggtggcggcctggttcaacctggcggatctctgagactgagctgtgccgccagcggcttcaatgtgtacgcctctggaatgcactgggtccgacaggcccctggcaaaggacttgagtgggtcgccaaaatctaccccgacagcgactacacctattacgccgacagcgtgaagggcagattcaccatcagcgccgacaccagcaagaacaccgcctacctccagatgaactccctgagagccgaggacaccgccgtgtactactgtagcagagacagcagcttctactacgtgtacgctatggactactggggccagggcacactggtcacagtctcttctacgcgtcagagttttgggttgttggaccctaaattgtgctatctgttggacggaatcctgttcatttacggagtgatcctgaccgcattgttcctgcgggttaagttttccagatccgcagacgcacccgcttaccaacaagggcagaaccaactctacaatgaacttaatttggggcggagggaagagtacgacgttctggacaaaaggaggggacgagatcccgagatgggcggaaagcctcagcgaaggaagaatccgcaagaggggctttataacgaactccagaaagataaaatggcagaagcctatagtgagattgggatgaagggagaaaggaggaggggtaaaggtcacgatgggttgtaccaaggattgagcacagccactaaagatacctatgatgcgctccacatgcaggccctgccgccaaga

SEQ ID NO: 39380 - DNA, 1518 bp, synthetic construct
  source 1..1518: mol_type = other DNA
atggccttaccagtgaccgccttgctcctgccgctggccttgctgctccacgccgccaggccggacatccagatgacacagagccctagcagcctgtctgccagcgtgggagacagagtgaccatcacctgtagagccagccaggacgtgaacacagccgtggcttggtatcagcagaagcctggcaaggcccctaagctgctgatctacagcgcctacttcctgtacagcggcgtgcccagcagattcagcggaagcagaagcggcaccgacttcaccctgacaatatccagcctccagcctgaggacttcgccacctactactgccagcagtacagcagatacagccccgtgacctttggacagggcaccaaggtggaaatcaagagaggcggaggcggaagtggaggcggaggatctggcggcggaggctctgaagttcagctggttgaaagtggtggcggcctggttcaacctggcggatctctgagactgagctgtgccgccagcggcttcaatgtgtacgcctctggaatgcactgggtccgacaggcccctggcaaaggacttgagtgggtcgccaaaatctaccccgacagcgactacacctattacgccgacagcgtgaagggcagattcaccatcagcgccgacaccagcaagaacaccgcctacctccagatgaactccctgagagccgaggacaccgccgtgtactactgtagcagagacagcagcttctactacgtgtacgctatggactactggggccagggcacactggtcacagtctcttctacgcgtggaatgaggactgaggatcttcccaaagctgtcgtctttctcgaaccccaatggtatcgggtgctcgaaaaagactctgtgacactgaaatgccaaggggcctactctcccgaggacaactccacacagtggtttcataatgagtccctcatcagctctcaggccagctcttatttcattgatgccgctacagtggacgactccggcgagtatcggtgtcagaccaatctgtctacactgtctgaccccgtgcagcttgaggtccacattggatggttgctcttgcaagccccacgctgggttttcaaagaggaagatccaatccatctgcggtgccacagctggaaaaacaccgctctccacaaagtcacatacctgcaaaatggcaaaggacgcaaatacttccatcacaattccgatttttacattccgaaggctaccctgaaagacagcggcagctatttctgccggggactcgtcggctccaagaatgtgtcctccgaaaccgtgaatatcacgattacccaaggactggctgtgcctacaatctctagcttctttccgcctggataccaagtctccttctgtcttgtgatggtcctcctgtttgctgtggacacaggactgtacttttccgtgaaaacgaacatccgcagctccacacgcgattggaaagatcacaagtttaaatggcgcaaagatccccaggacaag

SEQ ID NO: 39381 - DNA, 1443 bp, synthetic construct
  source 1..1443: mol_type = other DNA
atggccttaccagtgaccgccttgctcctgccgctggccttgctgctccacgccgccaggccggacatccagatgacacagagccctagcagcctgtctgccagcgtgggagacagagtgaccatcacctgtagagccagccaggacgtgaacacagccgtggcttggtatcagcagaagcctggcaaggcccctaagctgctgatctacagcgcctacttcctgtacagcggcgtgcccagcagattcagcggaagcagaagcggcaccgacttcaccctgacaatatccagcctccagcctgaggacttcgccacctactactgccagcagtacagcagatacagccccgtgacctttggacagggcaccaaggtggaaatcaagagaggcggaggcggaagtggaggcggaggatctggcggcggaggctctgaagttcagctggttgaaagtggtggcggcctggttcaacctggcggatctctgagactgagctgtgccgccagcggcttcaatgtgtacgcctctggaatgcactgggtccgacaggcccctggcaaaggacttgagtgggtcgccaaaatctaccccgacagcgactacacctattacgccgacagcgtgaagggcagattcaccatcagcgccgacaccagcaagaacaccgcctacctccagatgaactccctgagagccgaggacaccgccgtgtactactgtagcagagacagcagcttctactacgtgtacgctatggactactggggccagggcacactggtcacagtctcttctacgcgtggaatgaggactgaggatcttcccaaagctgtcgtctttctcgaaccccaatggtatcgggtgctcgaaaaagactctgtgacactgaaatgccaaggggcctactctcccgaggacaactccacacagtggtttcataatgagtccctcatcagctctcaggccagctcttatttcattgatgccgctacagtggacgactccggcgagtatcggtgtcagaccaatctgtctacactgtctgaccccgtgcagcttgaggtccacattggatggttgctcttgcaagccccacgctgggttttcaaagaggaagatccaatccatctgcggtgccacagctggaaaaacaccgctctccacaaagtcacatacctgcaaaatggcaaaggacgcaaatacttccatcacaattccgatttttacattccgaaggctaccctgaaagacagcggcagctatttctgccggggactcgtcggctccaagaatgtgtcctccgaaaccgtgaatatcacgattacccaaggactggctgtgcctacaatctctagcttctttccgcctggataccaagtctccttctgtcttgtgatggtcctcctgtttgctgtggacacaggactgtacttttccgtg

SEQ ID NO: 39382 - DNA, 1446 bp, synthetic construct
  source 1..1446: mol_type = other DNA
atggccttaccagtgaccgccttgctcctgccgctggccttgctgctccacgccgccaggccggacatccagatgacacagagccctagcagcctgtctgccagcgtgggagacagagtgaccatcacctgtagagccagccaggacgtgaacacagccgtggcttggtatcagcagaagcctggcaaggcccctaagctgctgatctacagcgcctacttcctgtacagcggcgtgcccagcagattcagcggaagcagaagcggcaccgacttcaccctgacaatatccagcctccagcctgaggacttcgccacctactactgccagcagtacagcagatacagccccgtgacctttggacagggcaccaaggtggaaatcaagagaggcggaggcggaagtggaggcggaggatctggcggcggaggctctgaagttcagctggttgaaagtggtggcggcctggttcaacctggcggatctctgagactgagctgtgccgccagcggcttcaatgtgtacgcctctggaatgcactgggtccgacaggcccctggcaaaggacttgagtgggtcgccaaaatctaccccgacagcgactacacctattacgccgacagcgtgaagggcagattcaccatcagcgccgacaccagcaagaacaccgcctacctccagatgaactccctgagagccgaggacaccgccgtgtactactgtagcagagacagcagcttctactacgtgtacgctatggactactggggccagggcacactggtcacagtctcttctacgcgtggaatgaggactgaggatcttcccaaagctgtcgtctttctcgaaccccaatggtatcgggtgctcgaaaaagactctgtgacactgaaatgccaaggggcctactctcccgaggacaactccacacagtggtttcataatgagtccctcatcagctctcaggccagctcttatttcattgatgccgctacagtggacgactccggcgagtatcggtgtcagaccaatctgtctacactgtctgaccccgtgcagcttgaggtccacattggatggttgctcttgcaagccccacgctgggttttcaaagaggaagatccaatccatctgcggtgccacagctggaaaaacaccgctctccacaaagtcacatacctgcaaaatggcaaaggacgcaaatacttccatcacaattccgatttttacattccgaaggctaccctgaaagacagcggcagctatttctgccggggactcgtcggctccaagaatgtgtcctccgaaaccgtgaatatcacgattacccaaggactggctgtgcctacaatctctagcttctttccgcctggataccaagtctccttctgtcttgtgatggtcctcctgtttgctgtggacacaggactgtacttttccgtgaaa

SEQ ID NO: 39383 - DNA, 2178 bp, synthetic construct
  source 1..2178: mol_type = other DNA
atggccttaccagtgaccgccttgctcctgccgctggccttgctgctccacgccgccaggccggacatccagatgacacagagccctagcagcctgtctgccagcgtgggagacagagtgaccatcacctgtagagccagccaggacgtgaacacagccgtggcttggtatcagcagaagcctggcaaggcccctaagctgctgatctacagcgcctacttcctgtacagcggcgtgcccagcagattcagcggaagcagaagcggcaccgacttcaccctgacaatatccagcctccagcctgaggacttcgccacctactactgccagcagtacagcagatacagccccgtgacctttggacagggcaccaaggtggaaatcaagagactcgagggacagcctaaggccaatcctaccgtgacactgttccctccaagcagcgaagaactccaggccaacaaggccacacttgtgtgcctgatctccgacttctaccctggggctgtgacagtggcttggaaggccgatggatctcctgtgaaagccggcgtggaaaccaccaagccatccaagcagagcaacaacaaatacgccgccagctcctacctgagcctgacacctgagcagtggaagtcccacagatcctacagctgccaagtgacccacgaaggcagcaccgtggaaaagacagtggcccctacagagtgcagcggatcccagagcttcggcctgctggaccccaagctgtgctacctgctggatggcatcctgttcatctacggcgtgatcctgaccgccctgttcctgagagtgaagttcagcagaagcgccgacgcccctgcctaccagcagggacagaaccaactgtacaacgagctgaacctgggcagacgggaagagtacgacgtgctggacaagcggagaggcagggaccctgagatgggcggaaagccccagcggagaaagaacccccaggaaggactgtataacgaactccagaaagacaagatggccgaagcctacagcgagatcggcatgaagggcgagcggagaagaggcaagggccacgatggcctgtaccagggcctgagcaccgccaccaaggacacctatgacgccctgcacatgcaggccctgcctccaagaagggccaagcgatctggatctggagcaacaaacttctcactactcaaacaagcaggtgacgtggaggagaatcccgggcctactagtatggactggatttggcgcatccttttccttgtcggcgctgctaccggcgcgcattccttcgaagaagttcagctggttgaaagtggtggcggcctggttcaacctggcggatctctgagactgagctgtgccgccagcggcttcaatgtgtacgcctctggaatgcactgggtccgacaggcccctggcaaaggacttgagtgggtcgccaaaatctaccccgacagcgactacacctattacgccgacagcgtgaagggcagattcaccatcagcgccgacaccagcaagaacaccgcctacctccagatgaactccctgagagccgaggacaccgccgtgtactactgtagcagagacagcagcttctactacgtgtacgctatggactactggggccagggcacactggtcacagtctcttctacgcgtgcctctacaaagggaccctccgtgtttcctctggctcccagcagcaagtctacaagcggaggaacagccgctctgggctgcctggtcaaggattactttcccgagcctgtgaccgtgtcctggaatagcggagcactgacaagcggcgtgcacacctttccagccgtgctgcaaagcagcggcctgtactctctgagcagcgtggtcacagtgcctagctctagcctgggcacccagacctacatctgcaatgtgaaccacaagcctagcaacaccaaggtggacaagagagtggaacccaagagctgtggtaccatcactcaaggtttggcagtgtcaaccatctcatcattctttccacctggctaccaagtgtccttctgcctggtcatggtgctgctgttcgccgtggataccggcctgtacttcagcgtcaagaccaacatccggtccagcaccagagactggaaggaccacaagttcaagtggcggaaggaccctcaggacaag

SEQ ID NO: 39384 - DNA, 2223 bp, synthetic construct
  source 1..2223: mol_type = other DNA
atggccttaccagtgaccgccttgctcctgccgctggccttgctgctccacgccgccaggccggacatccagatgacacagagccctagcagcctgtctgccagcgtgggagacagagtgaccatcacctgtagagccagccaggacgtgaacacagccgtggcttggtatcagcagaagcctggcaaggcccctaagctgctgatctacagcgcctacttcctgtacagcggcgtgcccagcagattcagcggaagcagaagcggcaccgacttcaccctgacaatatccagcctccagcctgaggacttcgccacctactactgccagcagtacagcagatacagccccgtgacctttggacagggcaccaaggtggaaatcaagagactcgaggacctgaagaacgtgttcccacctgaggtggccgtgttcgagcctagcgaggccgagatcagccacacccagaaagccaccctcgtgtgcctggctaccggcttctaccccgaccatgtggaactgtcttggtgggtcaacggcaaagaggtgcacagcggcgtgtctaccgacccccagccactgaaagaacagcccgccctgaacgacagccggtactgcctgagcagcagactgagagtgtccgccaccttctggcagaacccccggaaccacttcagatgccaggtgcagttctacggcctgagcgagaacgacgagtggacccaggacagagccaagcccgtgacccagatcgtgtctgccgaagcctggggcagagccgattgcggatcccagagcttcggcctgctggaccccaagctgtgctacctgctggatggcatcctgttcatctacggcgtgatcctgaccgccctgttcctgagagtgaagttcagcagaagcgccgacgcccctgcctaccagcagggacagaaccaactgtacaacgagctgaacctgggcagacgggaagagtacgacgtgctggacaagcggagaggcagggaccctgagatgggcggaaagccccagcggagaaagaacccccaggaaggactgtataacgaactccagaaagacaagatggccgaagcctacagcgagatcggcatgaagggcgagcggagaagaggcaagggccacgatggcctgtaccagggcctgagcaccgccaccaaggacacctatgacgccctgcacatgcaggccctgcctccaagaagggccaagcgatctggatctggagcaacaaacttctcactactcaaacaagcaggtgacgtggaggagaatcccgggcctactagtatggactggatttggcgcatccttttccttgtcggcgctgctaccggcgcgcattccttcgaagaagttcagctggttgaaagtggtggcggcctggttcaacctggcggatctctgagactgagctgtgccgccagcggcttcaatgtgtacgcctctggaatgcactgggtccgacaggcccctggcaaaggacttgagtgggtcgccaaaatctaccccgacagcgactacacctattacgccgacagcgtgaagggcagattcaccatcagcgccgacaccagcaagaacaccgcctacctccagatgaactccctgagagccgaggacaccgccgtgtactactgtagcagagacagcagcttctactacgtgtacgctatggactactggggccagggcacactggtcacagtctcttctacgcgtatccagaaccctgatcctgccgtgtaccagctgcgggatagcaagagcagcgacaagagcgtgtgtctgttcaccgacttcgacagccagaccaacgtgtcccagagcaaggactccgacgtgtacatcaccgataagaccgtgctggacatgcggagcatggacttcaagagcaactccgccgtggcctggtccaacaagtccgatttcgcctgcgccaacgccttcaacaacagcattatccccgaggacacattcttcccaagccccgagagcagctgcggtaccatcactcaaggtttggcagtgtcaaccatctcatcattctttccacctggctaccaagtgtccttctgcctggtcatggtgctgctgttcgccgtggataccggcctgtacttcagcgtcaagaccaacatccggtccagcaccagagactggaaggaccacaagttcaagtggcggaaggaccctcaggacaag

SEQ ID NO: 39385 - DNA, 2148 bp, synthetic construct
  source 1..2148: mol_type = other DNA
atggccttaccagtgaccgccttgctcctgccgctggccttgctgctccacgccgccaggccggacatccagatgacacagagccctagcagcctgtctgccagcgtgggagacagagtgaccatcacctgtagagccagccaggacgtgaacacagccgtggcttggtatcagcagaagcctggcaaggcccctaagctgctgatctacagcgcctacttcctgtacagcggcgtgcccagcagattcagcggaagcagaagcggcaccgacttcaccctgacaatatccagcctccagcctgaggacttcgccacctactactgccagcagtacagcagatacagccccgtgacctttggacagggcaccaaggtggaaatcaagagactcgaggacctgaagaacgtgttcccacctgaggtggccgtgttcgagcctagcgaggccgagatcagccacacccagaaagccaccctcgtgtgcctggctaccggcttctaccccgaccatgtggaactgtcttggtgggtcaacggcaaagaggtgcacagcggcgtgtctaccgacccccagccactgaaagaacagcccgccctgaacgacagccggtactgcctgagcagcagactgagagtgtccgccaccttctggcagaacccccggaaccacttcagatgccaggtgcagttctacggcctgagcgagaacgacgagtggacccaggacagagccaagcccgtgacccagatcgtgtctgccgaagcctggggcagagccgattgcggatcccagagcttcggcctgctggaccccaagctgtgctacctgctggatggcatcctgttcatctacggcgtgatcctgaccgccctgttcctgagagtgaagttcagcagaagcgccgacgcccctgcctaccagcagggacagaaccaactgtacaacgagctgaacctgggcagacgggaagagtacgacgtgctggacaagcggagaggcagggaccctgagatgggcggaaagccccagcggagaaagaacccccaggaaggactgtataacgaactccagaaagacaagatggccgaagcctacagcgagatcggcatgaagggcgagcggagaagaggcaagggccacgatggcctgtaccagggcctgagcaccgccaccaaggacacctatgacgccctgcacatgcaggccctgcctccaagaagggccaagcgatctggatctggagcaacaaacttctcactactcaaacaagcaggtgacgtggaggagaatcccgggcctactagtatggactggatttggcgcatccttttccttgtcggcgctgctaccggcgcgcattccttcgaagaagttcagctggttgaaagtggtggcggcctggttcaacctggcggatctctgagactgagctgtgccgccagcggcttcaatgtgtacgcctctggaatgcactgggtccgacaggcccctggcaaaggacttgagtgggtcgccaaaatctaccccgacagcgactacacctattacgccgacagcgtgaagggcagattcaccatcagcgccgacaccagcaagaacaccgcctacctccagatgaactccctgagagccgaggacaccgccgtgtactactgtagcagagacagcagcttctactacgtgtacgctatggactactggggccagggcacactggtcacagtctcttctacgcgtatccagaaccctgatcctgccgtgtaccagctgcgggatagcaagagcagcgacaagagcgtgtgtctgttcaccgacttcgacagccagaccaacgtgtcccagagcaaggactccgacgtgtacatcaccgataagaccgtgctggacatgcggagcatggacttcaagagcaactccgccgtggcctggtccaacaagtccgatttcgcctgcgccaacgccttcaacaacagcattatccccgaggacacattcttcccaagccccgagagcagctgcggtaccatcactcaaggtttggcagtgtcaaccatctcatcattctttccacctggctaccaagtgtccttctgcctggtcatggtgctgctgttcgccgtggataccggcctgtacttcagcgtc

SEQ ID NO: 39386 - DNA, 2151 bp, synthetic construct
  source 1..2151: mol_type = other DNA
atggccttaccagtgaccgccttgctcctgccgctggccttgctgctccacgccgccaggccggacatccagatgacacagagccctagcagcctgtctgccagcgtgggagacagagtgaccatcacctgtagagccagccaggacgtgaacacagccgtggcttggtatcagcagaagcctggcaaggcccctaagctgctgatctacagcgcctacttcctgtacagcggcgtgcccagcagattcagcggaagcagaagcggcaccgacttcaccctgacaatatccagcctccagcctgaggacttcgccacctactactgccagcagtacagcagatacagccccgtgacctttggacagggcaccaaggtggaaatcaagagactcgaggacctgaagaacgtgttcccacctgaggtggccgtgttcgagcctagcgaggccgagatcagccacacccagaaagccaccctcgtgtgcctggctaccggcttctaccccgaccatgtggaactgtcttggtgggtcaacggcaaagaggtgcacagcggcgtgtctaccgacccccagccactgaaagaacagcccgccctgaacgacagccggtactgcctgagcagcagactgagagtgtccgccaccttctggcagaacccccggaaccacttcagatgccaggtgcagttctacggcctgagcgagaacgacgagtggacccaggacagagccaagcccgtgacccagatcgtgtctgccgaagcctggggcagagccgattgcggatcccagagcttcggcctgctggaccccaagctgtgctacctgctggatggcatcctgttcatctacggcgtgatcctgaccgccctgttcctgagagtgaagttcagcagaagcgccgacgcccctgcctaccagcagggacagaaccaactgtacaacgagctgaacctgggcagacgggaagagtacgacgtgctggacaagcggagaggcagggaccctgagatgggcggaaagccccagcggagaaagaacccccaggaaggactgtataacgaactccagaaagacaagatggccgaagcctacagcgagatcggcatgaagggcgagcggagaagaggcaagggccacgatggcctgtaccagggcctgagcaccgccaccaaggacacctatgacgccctgcacatgcaggccctgcctccaagaagggccaagcgatctggatctggagcaacaaacttctcactactcaaacaagcaggtgacgtggaggagaatcccgggcctactagtatggactggatttggcgcatccttttccttgtcggcgctgctaccggcgcgcattccttcgaagaagttcagctggttgaaagtggtggcggcctggttcaacctggcggatctctgagactgagctgtgccgccagcggcttcaatgtgtacgcctctggaatgcactgggtccgacaggcccctggcaaaggacttgagtgggtcgccaaaatctaccccgacagcgactacacctattacgccgacagcgtgaagggcagattcaccatcagcgccgacaccagcaagaacaccgcctacctccagatgaactccctgagagccgaggacaccgccgtgtactactgtagcagagacagcagcttctactacgtgtacgctatggactactggggccagggcacactggtcacagtctcttctacgcgtatccagaaccctgatcctgccgtgtaccagctgcgggatagcaagagcagcgacaagagcgtgtgtctgttcaccgacttcgacagccagaccaacgtgtcccagagcaaggactccgacgtgtacatcaccgataagaccgtgctggacatgcggagcatggacttcaagagcaactccgccgtggcctggtccaacaagtccgatttcgcctgcgccaacgccttcaacaacagcattatccccgaggacacattcttcccaagccccgagagcagctgcggtaccatcactcaaggtttggcagtgtcaaccatctcatcattctttccacctggctaccaagtgtccttctgcctggtcatggtgctgctgttcgccgtggataccggcctgtacttcagcgtcaag

SEQ ID NO: 39387 - DNA, 2154 bp, synthetic construct
  source 1..2154: mol_type = other DNA
atggccttaccagtgaccgccttgctcctgccgctggccttgctgctccacgccgccaggccggacatccagatgacacagagccctagcagcctgtctgccagcgtgggagacagagtgaccatcacctgtagagccagccaggacgtgaacacagccgtggcttggtatcagcagaagcctggcaaggcccctaagctgctgatctacagcgcctacttcctgtacagcggcgtgcccagcagattcagcggaagcagaagcggcaccgacttcaccctgacaatatccagcctccagcctgaggacttcgccacctactactgccagcagtacagcagatacagccccgtgacctttggacagggcaccaaggtggaaatcaagagactcgaggacctgaagaacgtgttcccacctgaggtggccgtgttcgagcctagcgaggccgagatcagccacacccagaaagccaccctcgtgtgcctggctaccggcttctaccccgaccatgtggaactgtcttggtgggtcaacggcaaagaggtgcacagcggcgtgtctaccgacccccagccactgaaagaacagcccgccctgaacgacagccggtactgcctgagcagcagactgagagtgtccgccaccttctggcagaacccccggaaccacttcagatgccaggtgcagttctacggcctgagcgagaacgacgagtggacccaggacagagccaagcccgtgacccagatcgtgtctgccgaagcctggggcagagccgattgcggatcccagagcttcggcctgctggaccccaagctgtgctacctgctggatggcatcctgttcatctacggcgtgatcctgaccgccctgttcctgagagtgaagttcagcagaagcgccgacgcccctgcctaccagcagggacagaaccaactgtacaacgagctgaacctgggcagacgggaagagtacgacgtgctggacaagcggagaggcagggaccctgagatgggcggaaagccccagcggagaaagaacccccaggaaggactgtataacgaactccagaaagacaagatggccgaagcctacagcgagatcggcatgaagggcgagcggagaagaggcaagggccacgatggcctgtaccagggcctgagcaccgccaccaaggacacctatgacgccctgcacatgcaggccctgcctccaagaagggccaagcgatctggatctggagcaacaaacttctcactactcaaacaagcaggtgacgtggaggagaatcccgggcctactagtatggactggatttggcgcatccttttccttgtcggcgctgctaccggcgcgcattccttcgaagaagttcagctggttgaaagtggtggcggcctggttcaacctggcggatctctgagactgagctgtgccgccagcggcttcaatgtgtacgcctctggaatgcactgggtccgacaggcccctggcaaaggacttgagtgggtcgccaaaatctaccccgacagcgactacacctattacgccgacagcgtgaagggcagattcaccatcagcgccgacaccagcaagaacaccgcctacctccagatgaactccctgagagccgaggacaccgccgtgtactactgtagcagagacagcagcttctactacgtgtacgctatggactactggggccagggcacactggtcacagtctcttctacgcgtatccagaaccctgatcctgccgtgtaccagctgcgggatagcaagagcagcgacaagagcgtgtgtctgttcaccgacttcgacagccagaccaacgtgtcccagagcaaggactccgacgtgtacatcaccgataagaccgtgctggacatgcggagcatggacttcaagagcaactccgccgtggcctggtccaacaagtccgatttcgcctgcgccaacgccttcaacaacagcattatccccgaggacacattcttcccaagccccgagagcagctgcggtaccatcactcaaggtttggcagtgtcaaccatctcatcattctttccacctggctaccaagtgtccttctgcctggtcatggtgctgctgttcgccgtggataccggcctgtacttcagcgtcaagacc

SEQ ID NO: 39388 - DNA, 1965 bp, synthetic construct
  source 1..1965: mol_type = other DNA
atggccttaccagtgaccgccttgctcctgccgctggccttgctgctccacgccgccaggccggacatccagatgacacagagccctagcagcctgtctgccagcgtgggagacagagtgaccatcacctgtagagccagccaggacgtgaacacagccgtggcttggtatcagcagaagcctggcaaggcccctaagctgctgatctacagcgcctacttcctgtacagcggcgtgcccagcagattcagcggaagcagaagcggcaccgacttcaccctgacaatatccagcctccagcctgaggacttcgccacctactactgccagcagtacagcagatacagccccgtgacctttggacagggcaccaaggtggaaatcaagagactcgagggacagcctaaggccaatcctaccgtgacactgttccctccaagcagcgaagaactccaggccaacaaggccacacttgtgtgcctgatctccgacttctaccctggggctgtgacagtggcttggaaggccgatggatctcctgtgaaagccggcgtggaaaccaccaagccatccaagcagagcaacaacaaatacgccgccagctcctacctgagcctgacacctgagcagtggaagtcccacagatcctacagctgccaagtgacccacgaaggcagcaccgtggaaaagacagtggcccctacagagtgcagcggatccctgggagagcctcagctgtgctatatcctggacgccatcctgtttctgtacggcatcgtgctgaccctgctgtactgccggctgaagatccaagtgcggaaggccgccatcaccagctacgagaaatccgacggcgtgtacaccggcctgagcaccagaaatcaagagacatacgagacactgaagcacgaaaagcctccacaaagggccaagcgatctggatctggagcaacaaacttctcactactcaaacaagcaggtgacgtggaggagaatcccgggcctactagtatggactggatttggcgcatccttttccttgtcggcgctgctaccggcgcgcattccttcgaagaagttcagctggttgaaagtggtggcggcctggttcaacctggcggatctctgagactgagctgtgccgccagcggcttcaatgtgtacgcctctggaatgcactgggtccgacaggcccctggcaaaggacttgagtgggtcgccaaaatctaccccgacagcgactacacctattacgccgacagcgtgaagggcagattcaccatcagcgccgacaccagcaagaacaccgcctacctccagatgaactccctgagagccgaggacaccgccgtgtactactgtagcagagacagcagcttctactacgtgtacgctatggactactggggccagggcacactggtcacagtctcttctacgcgtgcctctacaaagggaccctccgtgtttcctctggctcccagcagcaagtctacaagcggaggaacagccgctctgggctgcctggtcaaggattactttcccgagcctgtgaccgtgtcctggaatagcggagcactgacaagcggcgtgcacacctttccagccgtgctgcaaagcagcggcctgtactctctgagcagcgtggtcacagtgcctagctctagcctgggcacccagacctacatctgcaatgtgaaccacaagcctagcaacaccaaggtggacaagagagtggaacccaagagctgtggtaccctcggagaaccacagctctgttacattctggatgctatcctgttcctctatgggatcgtcctgacactcctgtattgcagactcaaaattcaagttcgcaaagccgccattacctcttacgagaagagtgatggggtgtacacaggactgtctacccggaatcaagaaacctacgaaaccctcaaacatgagaagccacctcagtaa

SEQ ID NO: 39389 - DNA, 1872 bp, synthetic construct
  source 1..1872: mol_type = other DNA
atggccttaccagtgaccgccttgctcctgccgctggccttgctgctccacgccgccaggccggacatccagatgacacagagccctagcagcctgtctgccagcgtgggagacagagtgaccatcacctgtagagccagccaggacgtgaacacagccgtggcttggtatcagcagaagcctggcaaggcccctaagctgctgatctacagcgcctacttcctgtacagcggcgtgcccagcagattcagcggaagcagaagcggcaccgacttcaccctgacaatatccagcctccagcctgaggacttcgccacctactactgccagcagtacagcagatacagccccgtgacctttggacagggcaccaaggtggaaatcaagagactcgaggacctgaagaacgtgttcccacctgaggtggccgtgttcgagcctagcgaggccgagatcagccacacccagaaagccaccctcgtgtgcctggctaccggcttctaccccgaccatgtggaactgtcttggtgggtcaacggcaaagaggtgcacagcggcgtgtgtaccgacccccagccactgaaagaacagcccgccctgaacgacagccggtactgcctgagcagcagactgagagtgtccgccaccttctggcagaacccccggaaccacttcagatgccaggtgcagttctacggcctgagcgagaacgacgagtggacccaggacagagccaagcccgtgacccagatcgtgtctgccgaagcctggggcagagccgattgcggctttaccagcgagagctaccagcagggcgtgctgagcgcctactacatgtacttgttgctgctgctgaagtccgtggtgtacttcgccatcatcacatgctgcctgctgcggagaaccgccttctgctgcaacggcgagaagtctagggccaagcgatctggatctggagcaacaaacttctcactactcaaacaagcaggtgacgtggaggagaatcccgggcctactagtatggactggatttggcgcatccttttccttgtcggcgctgctaccggcgcgcattccttcgaagaagttcagctggttgaaagtggtggcggcctggttcaacctggcggatctctgagactgagctgtgccgccagcggcttcaatgtgtacgcctctggaatgcactgggtccgacaggcccctggcaaaggacttgagtgggtcgccaaaatctaccccgacagcgactacacctattacgccgacagcgtgaagggcagattcaccatcagcgccgacaccagcaagaacaccgcctacctccagatgaactccctgagagccgaggacaccgccgtgtactactgtagcagagacagcagcttctactacgtgtacgctatggactactggggccagggcacactggtcacagtctcttctacgcgtatccagaaccctgatcctgccgtgtaccagctgcgggatagcaagagcagcgacaagagcgtgtgtctgttcaccgacttcgacagccagaccaacgtgtcccagagcaaggactccgacgtgtacatcaccgataagtgcgtgctggacatgcggagcatggacttcaagagcaactccgccgtggcctggtccaacaagtccgatttcgcctgcgccaacgccttcaacaacagcattatccccgaggacacattcttcccaagccccgagagcagctgcgacgtgaagctggtggaaaagagcttcgagacagacaccaacctgaacttccagaacctgagcgtgatcggcttcagaatcctgctgctgaaagtggccggctttaacctgctgatgaccctgcggctgtggtccagc

SEQ ID NO: 39390 - DNA, 1893 bp, synthetic construct
  source 1..1893: mol_type = other DNA
atggccttaccagtgaccgccttgctcctgccgctggccttgctgctccacgccgccaggccggacatccagatgacacagagccctagcagcctgtctgccagcgtgggagacagagtgaccatcacctgtagagccagccaggacgtgaacacagccgtggcttggtatcagcagaagcctggcaaggcccctaagctgctgatctacagcgcctacttcctgtacagcggcgtgcccagcagattcagcggaagcagaagcggcaccgacttcaccctgacaatatccagcctccagcctgaggacttcgccacctactactgccagcagtacagcagatacagccccgtgacctttggacagggcaccaaggtggaaatcaagagactcgaggacaagcagctggacgccgacgtgtcccccaagcctaccatcttcctgccctctatcgccgagacaaagctccagaaggccggcacctacctgtgcctgctggaaaagttcttcccagatgtgattaagatccactggcaggaaaagaagtccaacaccatcctgggcagccaggaaggcaacaccatgaagaccaacgacacctacatgaagttcagctggctgaccgtgcccgagaagtccctggacaaagaacacagatgcatcgtgcggcacgaaaacaacaagaacggcgtggaccaggaaatcatcttcccacccatcaagaccgatgtgattacaatggaccccaaggacaactgctccaaggacgccaacgataccctgctgctccagctgaccaacaccagcgcctactacatgtacgagatcctgctgggcaaggccaccctgtacgccgtgctggtgtctgccctggtgctgatggctatggtcaagcggaaggacagccggggaagggccaagcgatctggatctggagcaacaaacttctcactactcaaacaagcaggtgacgtggaggagaatcccgggcctactagtatggactggatttggcgcatccttttccttgtcggcgctgctaccggcgcgcattccttcgaagaagttcagctggttgaaagtggtggcggcctggttcaacctggcggatctctgagactgagctgtgccgccagcggcttcaatgtgtacgcctctggaatgcactgggtccgacaggcccctggcaaaggacttgagtgggtcgccaaaatctaccccgacagcgactacacctattacgccgacagcgtgaagggcagattcaccatcagcgccgacaccagcaagaacaccgcctacctccagatgaactccctgagagccgaggacaccgccgtgtactactgtagcagagacagcagcttctactacgtgtacgctatggactactggggccagggcacactggtcacagtctcttctacgcgtagccagcctcacaccaagcccagcgtgttcgtgatgaagaacggcaccaacgtggcctgcctcgtgaaagagttctaccccaaggacatcaggatcaacctggtgtccagcaagaagatcaccgagttcgaccccgccatcgtgatctcccccagcggcaagtacaacgccgtgaagctggggaagtatgaggacagcaacagcgtgacctgctccgtgcagcacgacaacaagaccgtgcacagcaccgactttgaagtgaaaaccgactccaccgaccacgtgaagcccaaagagacagagaacaccaagcagcccagcaagagctgccacaagcccaaggccatcgtgcacaccgagaaagtgaacatgatgagcctgaccgtgatcggcttcagaatcctgctgctgaaagtggccggctttaacctgctgatgaccctgcggctgtggtccagctaa

SEQ ID NO: 39391 - DNA, 1893 bp, synthetic construct
  source 1..1893: mol_type = other DNA
atggccttaccagtgaccgccttgctcctgccgctggccttgctgctccacgccgccaggccggacatccagatgacacagagccctagcagcctgtctgccagcgtgggagacagagtgaccatcacctgtagagccagccaggacgtgaacacagccgtggcttggtatcagcagaagcctggcaaggcccctaagctgctgatctacagcgcctacttcctgtacagcggcgtgcccagcagattcagcggaagcagaagcggcaccgacttcaccctgacaatatccagcctccagcctgaggacttcgccacctactactgccagcagtacagcagatacagccccgtgacctttggacagggcaccaaggtggaaatcaagagactcgaggacaagcagctggacgccgacgtgtcccccaagcctaccatcttcctgccctctatcgccgagacaaagctccagaaggccggcacctacctgtgcctgctggaaaagttcttcccagatgtgattaagatccactggcaggaaaagaagtccaacaccatcctgggcagccaggaaggcaacaccatgaagaccaacgacacctacatgaagttcagctggctgaccgtgcccgagaagtccctggacaaagaacacagatgcatcgtgcggcacgaaaacaacaagaacggcgtggaccaggaaatcatcttcccacccatcaagaccgatgtgattacaatggaccccaaggacaactgctccaaggacgccaacgataccctgctgctccagctgaccaacaccagcgccaccatcctgtacgagatcctgctgggcaaggccaccctgtacgccgtgctggtgtctgccctggtgctgatggctatggtcaagcggaaggacagccggggaagggccaagcgatctggatctggagcaacaaacttctcactactcaaacaagcaggtgacgtggaggagaatcccgggcctactagtatggactggatttggcgcatccttttccttgtcggcgctgctaccggcgcgcattccttcgaagaagttcagctggttgaaagtggtggcggcctggttcaacctggcggatctctgagactgagctgtgccgccagcggcttcaatgtgtacgcctctggaatgcactgggtccgacaggcccctggcaaaggacttgagtgggtcgccaaaatctaccccgacagcgactacacctattacgccgacagcgtgaagggcagattcaccatcagcgccgacaccagcaagaacaccgcctacctccagatgaactccctgagagccgaggacaccgccgtgtactactgtagcagagacagcagcttctactacgtgtacgctatggactactggggccagggcacactggtcacagtctcttctacgcgtagccagcctcacaccaagcccagcgtgttcgtgatgaagaacggcaccaacgtggcctgcctcgtgaaagagttctaccccaaggacatcaggatcaacctggtgtccagcaagaagatcaccgagttcgaccccgccatcgtgatctcccccagcggcaagtacaacgccgtgaagctggggaagtatgaggacagcaacagcgtgacctgctccgtgcagcacgacaacaagaccgtgcacagcaccgactttgaagtgaaaaccgactccaccgaccacgtgaagcccaaagagacagagaacaccaagcagcccagcaagagctgccacaagcccaaggccatcgtgcacaccgagaaagtgaacatgatgagcctgaccgtgatcggcttcagaatcctgctgctgaaagtggccggctttaacctgctgatgaccctgcggctgtggtccagctaa

SEQ ID NO: 39392 - DNA, 1893 bp, synthetic construct
  source 1..1893: mol_type = other DNA
atggccttaccagtgaccgccttgctcctgccgctggccttgctgctccacgccgccaggccggacatccagatgacacagagccctagcagcctgtctgccagcgtgggagacagagtgaccatcacctgtagagccagccaggacgtgaacacagccgtggcttggtatcagcagaagcctggcaaggcccctaagctgctgatctacagcgcctacttcctgtacagcggcgtgcccagcagattcagcggaagcagaagcggcaccgacttcaccctgacaatatccagcctccagcctgaggacttcgccacctactactgccagcagtacagcagatacagccccgtgacctttggacagggcaccaaggtggaaatcaagagactcgaggacaagcagctggacgccgacgtgtcccccaagcctaccatcttcctgccctctatcgccgagacaaagctccagaaggccggcacctacctgtgcctgctggaaaagttcttcccagatgtgattaagatccactggcaggaaaagaagtccaacaccatcctgggcagccaggaaggcaacaccatgaagaccaacgacacctacatgaagttcagctggctgaccgtgcccgagaagtccctggacaaagaacacagatgcatcgtgcggcacgaaaacaacaagaacggcgtggaccaggaaatcatcttcccacccatcaagaccgatgtgattacaatggaccccaaggacaactgctccaaggacgccaacgataccctgctgctccagctgaccaacaccagcgcctactacatgtacgagatcctgctgggcaaggccaccctgtacgccgtgctggtgtctgccctggtgctgatggctatggtcaagcggaaggacagccggggaagggccaagcgatctggatctggagcaacaaacttctcactactcaaacaagcaggtgacgtggaggagaatcccgggcctactagtatggactggatttggcgcatccttttccttgtcggcgctgctaccggcgcgcattccttcgaagaagttcagctggttgaaagtggtggcggcctggttcaacctggcggatctctgagactgagctgtgccgccagcggcttcaatgtgtacgcctctggaatgcactgggtccgacaggcccctggcaaaggacttgagtgggtcgccaaaatctaccccgacagcgactacacctattacgccgacagcgtgaagggcagattcaccatcagcgccgacaccagcaagaacaccgcctacctccagatgaactccctgagagccgaggacaccgccgtgtactactgtagcagagacagcagcttctactacgtgtacgctatggactactggggccagggcacactggtcacagtctcttctacgcgtagccagcctcacaccaagcccagcgtgttcgtgatgaagaacggcaccaacgtggcctgcctcgtgaaagagttctaccccaaggacatcaggatcaacctggtgtccagcaagaagatcaccgagttcgaccccgccatcgtgatctcccccagcggcaagtacaacgccgtgaagctggggaagtacgaggacagcaacagcgtgacctgctccgtgcagcacgacaacaagaccgtgcacagcaccgactttgaagtgaaaaccgactccaccgaccacgtgaagcccaaagagacagagaacaccaagcagcccagcaagagctgccacaagcccaaggccatcgtgcacaccgagaaagtgaacatgatgagcctgaccgtgctgggcttcagaatcctgctgctgaaagtggccggctttaacctgctgatgaccctgcggctgtggtccagctaa

SEQ ID NO: 39393 - DNA, 1893 bp, synthetic construct
  source 1..1893: mol_type = other DNA
atggccttaccagtgaccgccttgctcctgccgctggccttgctgctccacgccgccaggccggacatccagatgacacagagccctagcagcctgtctgccagcgtgggagacagagtgaccatcacctgtagagccagccaggacgtgaacacagccgtggcttggtatcagcagaagcctggcaaggcccctaagctgctgatctacagcgcctacttcctgtacagcggcgtgcccagcagattcagcggaagcagaagcggcaccgacttcaccctgacaatatccagcctccagcctgaggacttcgccacctactactgccagcagtacagcagatacagccccgtgacctttggacagggcaccaaggtggaaatcaagagactcgaggacaagcagctggacgccgacgtgtcccccaagcctaccatcttcctgccctctatcgccgagacaaagctccagaaggccggcacctacctgtgcctgctggaaaagttcttcccagatgtgattaagatccactggcaggaaaagaagtccaacaccatcctgggcagccaggaaggcaacaccatgaagaccaacgacacctacatgaagttcagctggctgaccgtgcccgagaagtccctggacaaagaacacagatgcatcgtgcggcacgaaaacaacaagaacggcgtggaccaggaaatcatcttcccacccatcaagaccgatgtgattacaatggaccccaaggacaactgctccaaggacgccaacgataccctgctgctccagctgaccaacaccagcgccaccatcctgtacgagatcctgctgggcaaggccaccctgtacgccgtgctggtgtctgccctggtgctgatggctatggtcaagcggaaggacagccggggaagggccaagcgatctggatctggagcaacaaacttctcactactcaaacaagcaggtgacgtggaggagaatcccgggcctactagtatggactggatttggcgcatccttttccttgtcggcgctgctaccggcgcgcattccttcgaagaagttcagctggttgaaagtggtggcggcctggttcaacctggcggatctctgagactgagctgtgccgccagcggcttcaatgtgtacgcctctggaatgcactgggtccgacaggcccctggcaaaggacttgagtgggtcgccaaaatctaccccgacagcgactacacctattacgccgacagcgtgaagggcagattcaccatcagcgccgacaccagcaagaacaccgcctacctccagatgaactccctgagagccgaggacaccgccgtgtactactgtagcagagacagcagcttctactacgtgtacgctatggactactggggccagggcacactggtcacagtctcttctacgcgtagccagcctcacaccaagcccagcgtgttcgtgatgaagaacggcaccaacgtggcctgcctcgtgaaagagttctaccccaaggacatcaggatcaacctggtgtccagcaagaagatcaccgagttcgaccccgccatcgtgatctcccccagcggcaagtacaacgccgtgaagctggggaagtacgaggacagcaacagcgtgacctgctccgtgcagcacgacaacaagaccgtgcacagcaccgactttgaagtgaaaaccgactccaccgaccacgtgaagcccaaagagacagagaacaccaagcagcccagcaagagctgccacaagcccaaggccatcgtgcacaccgagaaagtgaacatgatgagcctgaccgtgctgggcttcagaatcctgctgctgaaagtggccggctttaacctgctgatgaccctgcggctgtggtccagctaa

SEQ ID NO: 39394 - DNA, 1875 bp, synthetic construct
  source 1..1875: mol_type = other DNA
atggccttaccagtgaccgccttgctcctgccgctggccttgctgctccacgccgccaggccggacatccagatgacacagagccctagcagcctgtctgccagcgtgggagacagagtgaccatcacctgtagagccagccaggacgtgaacacagccgtggcttggtatcagcagaagcctggcaaggcccctaagctgctgatctacagcgcctacttcctgtacagcggcgtgcccagcagattcagcggaagcagaagcggcaccgacttcaccctgacaatatccagcctccagcctgaggacttcgccacctactactgccagcagtacagcagatacagccccgtgacctttggacagggcaccaaggtggaaatcaagagactcgaggacctgaagaacgtgttcccacctgaggtggccgtgttcgagcctagcgaggccgagatcagccacacccagaaagccaccctcgtgtgcctggctaccggcttctaccccgaccatgtggaactgtcttggtgggtcaacggcaaagaggtgcacagcggcgtgtgtaccgacccccagccactgaaagaacagcccgccctgaacgacagccggtactgcctgagcagcagactgagagtgtccgccaccttctggcagaacccccggaaccacttcagatgccaggtgcagttctacggcctgagcgagaacgacgagtggacccaggacagagccaagcccgtgacccagatcgtgtctgccgaagcctggggcagagccgattgcggctttaccagcgagagctaccagcagggcgtgctgagcgccaccatcctgtacttgttgctgctgctgaagtccgtggtgtacttcgccatcatcacatgctgcctgctgcggagaaccgccttctgctgcaacggcgagaagtctagggccaagcgatctggatctggagcaacaaacttctcactactcaaacaagcaggtgacgtggaggagaatcccgggcctactagtatggactggatttggcgcatccttttccttgtcggcgctgctaccggcgcgcattccttcgaagaagttcagctggttgaaagtggtggcggcctggttcaacctggcggatctctgagactgagctgtgccgccagcggcttcaatgtgtacgcctctggaatgcactgggtccgacaggcccctggcaaaggacttgagtgggtcgccaaaatctaccccgacagcgactacacctattacgccgacagcgtgaagggcagattcaccatcagcgccgacaccagcaagaacaccgcctacctccagatgaactccctgagagccgaggacaccgccgtgtactactgtagcagagacagcagcttctactacgtgtacgctatggactactggggccagggcacactggtcacagtctcttctacgcgtatccagaaccctgatcctgccgtgtaccagctgcgggatagcaagagcagcgacaagagcgtgtgtctgttcaccgacttcgacagccagaccaacgtgtcccagagcaaggactccgacgtgtacatcaccgataagtgcgtgctggacatgcggagcatggacttcaagagcaactccgccgtggcctggtccaacaagtccgatttcgcctgcgccaacgccttcaacaacagcattatccccgaggacacattcttcccaagccccgagagcagctgcgacgtgaagctggtggaaaagagcttcgagacagacaccaacctgaacttccagaacctgagcgtgatcggcctgcggatgctgttcgccaaaaccgtggccgtgaacttcctgctgaccgccaagctgttcttcctctaa

SEQ ID NO: 39395 - DNA, 1962 bp, synthetic construct
  source 1..1962: mol_type = other DNA
atggccttaccagtgaccgccttgctcctgccgctggccttgctgctccacgccgccaggccggacatccagatgacacagagccctagcagcctgtctgccagcgtgggagacagagtgaccatcacctgtagagccagccaggacgtgaacacagccgtggcttggtatcagcagaagcctggcaaggcccctaagctgctgatctacagcgcctacttcctgtacagcggcgtgcccagcagattcagcggaagcagaagcggcaccgacttcaccctgacaatatccagcctccagcctgaggacttcgccacctactactgccagcagtacagcagatacagccccgtgacctttggacagggcaccaaggtggaaatcaagagactcgaggacctgaagaacgtgttcccacctgaggtggccgtgttcgagcctagcgaggccgagatcagccacacccagaaagccaccctcgtgtgcctggctaccggcttctaccccgaccatgtggaactgtcttggtgggtcaacggcaaagaggtgcacagcggcgtgtctaccgacccccagccactgaaagaacagcccgccctgaacgacagccggtactgcctgagcagcagactgagagtgtccgccaccttctggcagaacccccggaaccacttcagatgccaggtgcagttctacggcctgagcgagaacgacgagtggacccaggacagagccaagcccgtgacccagatcgtgtctgccgaagcctggggcagagccgattgcggatcctccaaggacgccaacgataccctgctgctccagctgaccaacaccagcgcctactacatgtacttgttgctgctgctgaagtccgtggtgtacttcgccatcatcacatgctgcctgctgcggagaaccgccttctgctgcaacggcgagaagtctagggccaagcgatctggatctggagcaacaaacttctcactactcaaacaagcaggtgacgtggaggagaatcccgggcctactagtatggactggatttggcgcatccttttccttgtcggcgctgctaccggcgcgcattccttcgaagaagttcagctggttgaaagtggtggcggcctggttcaacctggcggatctctgagactgagctgtgccgccagcggcttcaatgtgtacgcctctggaatgcactgggtccgacaggcccctggcaaaggacttgagtgggtcgccaaaatctaccccgacagcgactacacctattacgccgacagcgtgaagggcagattcaccatcagcgccgacaccagcaagaacaccgcctacctccagatgaactccctgagagccgaggacaccgccgtgtactactgtagcagagacagcagcttctactacgtgtacgctatggactactggggccagggcacactggtcacagtctcttctacgcgtatccagaaccctgatcctgccgtgtaccagctgcgggatagcaagagcagcgacaagagcgtgtgtctgttcaccgacttcgacagccagaccaacgtgtcccagagcaaggactccgacgtgtacatcaccgataagaccgtgctggacatgcggagcatggacttcaagagcaactccgccgtggcctggtccaacaagtccgatttcgcctgcgccaacgccttcaacaacagcattatccccgaggacacattcttcccaagccccgagagcagctgcggtaccgaagtgaaaaccgactccaccgaccacgtgaagcccaaagagacagagaacaccaagcagcccagcaagagctgccacaagcccaaggccatcgtgcacaccgagaaagtgaacatgatgagcctgaccgtgctgggcctgcggatgctgttcgccaaaaccgtggccgtgaacttcctgctgaccgccaagctgttcttcctctaa

SEQ ID NO: 39396 - DNA, 1872 bp, synthetic construct
  source 1..1872: mol_type = other DNA
atggccttaccagtgaccgccttgctcctgccgctggccttgctgctccacgccgccaggccggacatccagatgacacagagccctagcagcctgtctgccagcgtgggagacagagtgaccatcacctgtagagccagccaggacgtgaacacagccgtggcttggtatcagcagaagcctggcaaggcccctaagctgctgatctacagcgcctacttcctgtacagcggcgtgcccagcagattcagcggaagcagaagcggcaccgacttcaccctgacaatatccagcctccagcctgaggacttcgccacctactactgccagcagtacagcagatacagccccgtgacctttggacagggcaccaaggtggaaatcaagagactcgaggacctgaagaacgtgttcccacctgaggtggccgtgttcgagcctagcgaggccgagatcagccacacccagaaagccaccctcgtgtgcctggctaccggcttctaccccgaccatgtggaactgtcttggtgggtcaacggcaaagaggtgcacagcggcgtgtgtaccgacccccagccactgaaagaacagcccgccctgaacgacagccggtactgcctgagcagcagactgagagtgtccgccaccttctggcagaacccccggaaccacttcagatgccaggtgcagttctacggcctgagcgagaacgacgagtggacccaggacagagccaagcccgtgacccagatcgtgtctgccgaagcctggggcagagccgattgcgacgtgaagctggtggaaaagagcttcgagacagacaccaacctgaacttccagaacctgagcgtgatcggcttcagaatcctgctgctgaaagtggccggctttaacctgctgatgaccctgcggctgtggtccagcagggccaagcgatctggatctggagcaacaaacttctcactactcaaacaagcaggtgacgtggaggagaatcccgggcctactagtatggactggatttggcgcatccttttccttgtcggcgctgctaccggcgcgcattccttcgaagaagttcagctggttgaaagtggtggcggcctggttcaacctggcggatctctgagactgagctgtgccgccagcggcttcaatgtgtacgcctctggaatgcactgggtccgacaggcccctggcaaaggacttgagtgggtcgccaaaatctaccccgacagcgactacacctattacgccgacagcgtgaagggcagattcaccatcagcgccgacaccagcaagaacaccgcctacctccagatgaactccctgagagccgaggacaccgccgtgtactactgtagcagagacagcagcttctactacgtgtacgctatggactactggggccagggcacactggtcacagtctcttctacgcgtatccagaaccctgatcctgccgtgtaccagctgcgggatagcaagagcagcgacaagagcgtgtgtctgttcaccgacttcgacagccagaccaacgtgtcccagagcaaggactccgacgtgtacatcaccgataagtgcgtgctggacatgcggagcatggacttcaagagcaactccgccgtggcctggtccaacaagtccgatttcgcctgcgccaacgccttcaacaacagcattatccccgaggacacattcttcccaagccccgagagcagctgcggctttaccagcgagagctaccagcagggcgtgctgagcgccaccatcctgtacgagatcctgctgggcaaggccaccctgtacgccgtgctggtgtctgccctggtgctgatggctatggtcaagcggaaggacagccggggataa

SEQ ID NO: 39397 - DNA, 1872 bp, synthetic construct
  source 1..1872: mol_type = other DNA
atggccttaccagtgaccgccttgctcctgccgctggccttgctgctccacgccgccaggccggacatccagatgacacagagccctagcagcctgtctgccagcgtgggagacagagtgaccatcacctgtagagccagccaggacgtgaacacagccgtggcttggtatcagcagaagcctggcaaggcccctaagctgctgatctacagcgcctacttcctgtacagcggcgtgcccagcagattcagcggaagcagaagcggcaccgacttcaccctgacaatatccagcctccagcctgaggacttcgccacctactactgccagcagtacagcagatacagccccgtgacctttggacagggcaccaaggtggaaatcaagagactcgaggacctgaagaacgtgttcccacctgaggtggccgtgttcgagcctagcgaggccgagatcagccacacccagaaagccaccctcgtgtgcctggctaccggcttctaccccgaccatgtggaactgtcttggtgggtcaacggcaaagaggtgcacagcggcgtgtgtaccgacccccagccactgaaagaacagcccgccctgaacgacagccggtactgcctgagcagcagactgagagtgtccgccaccttctggcagaacccccggaaccacttcagatgccaggtgcagttctacggcctgagcgagaacgacgagtggacccaggacagagccaagcccgtgacccagatcgtgtctgccgaagcctggggcagagccgattgcggctttaccagcgagagctaccagcagggcgtgctgagcgccaccaacctgagcgtgatcggcttcagaatcctgctgctgaaagtggccggctttaacctgctgatgaccctgcggctgtggtccagcagggccaagcgatctggatctggagcaacaaacttctcactactcaaacaagcaggtgacgtggaggagaatcccgggcctactagtatggactggatttggcgcatccttttccttgtcggcgctgctaccggcgcgcattccttcgaagaagttcagctggttgaaagtggtggcggcctggttcaacctggcggatctctgagactgagctgtgccgccagcggcttcaatgtgtacgcctctggaatgcactgggtccgacaggcccctggcaaaggacttgagtgggtcgccaaaatctaccccgacagcgactacacctattacgccgacagcgtgaagggcagattcaccatcagcgccgacaccagcaagaacaccgcctacctccagatgaactccctgagagccgaggacaccgccgtgtactactgtagcagagacagcagcttctactacgtgtacgctatggactactggggccagggcacactggtcacagtctcttctacgcgtatccagaaccctgatcctgccgtgtaccagctgcgggatagcaagagcagcgacaagagcgtgtgtctgttcaccgacttcgacagccagaccaacgtgtcccagagcaaggactccgacgtgtacatcaccgataagtgcgtgctggacatgcggagcatggacttcaagagcaactccgccgtggcctggtccaacaagtccgatttcgcctgcgccaacgccttcaacaacagcattatccccgaggacacattcttcccaagccccgagagcagctgcgacgtgaagctggtggaaaagagcttcgagacagacaccaacctgaacttccagatcctgtacgagatcctgctgggcaaggccaccctgtacgccgtgctggtgtctgccctggtgctgatggctatggtcaagcggaaggacagccggggataa

SEQ ID NO: 39398 - DNA, 1872 bp, synthetic construct; identical to SEQ ID NO: 39396
  source 1..1872: mol_type = other DNA

SEQ ID NO: 39399 - DNA, 1872 bp, synthetic construct; identical to SEQ ID NO: 39397
  source 1..1872: mol_type = other DNA

SEQ ID NO: 39400 - DNA, 1869 bp, synthetic construct
  source 1..1869: mol_type = other DNA
atggccttaccagtgaccgccttgctcctgccgctggccttgctgctccacgccgccaggccggacatccagatgacacagagccctagcagcctgtctgccagcgtgggagacagagtgaccatcacctgtagagccagccaggacgtgaacacagccgtggcttggtatcagcagaagcctggcaaggcccctaagctgctgatctacagcgcctacttcctgtacagcggcgtgcccagcagattcagcggaagcagaagcggcaccgacttcaccctgacaatatccagcctccagcctgaggacttcgccacctactactgccagcagtacagcagatacagccccgtgacctttggacagggcaccaaggtggaaatcaagagactcgaggacctgaagaacgtgttcccacctgaggtggccgtgttcgagcctagcgaggccgagatcagccacacccagaaagccaccctcgtgtgcctggctaccggcttctaccccgaccatgtggaactgtcttggtgggtcaacggcaaagaggtgcacagcggcgtgtgtaccgacccccagccactgaaagaacagcccgccctgaacgacagccggtactgcctgagcagcagactgagagtgtccgccaccttctggcagaacccccggaaccacttcagatgccaggtgcagttctacggcctgagcgagaacgacgagtggacccaggacagagccaagcccgtgacccagatcgtgtctgccgaagcctggggcagagccgattgcgacgtgaagctggtggaaaagagcttcgagacagacaccaacctgaacttccagaacctgagcgtgatcggcttcagaatcctgctgctgaaagtggccggctttaacctgctgatgaccctgcggctgtggtccagcagggccaagcgatctggatctggagcaacaaacttctcactactcaaacaagcaggtgacgtggaggagaatcccgggcctactagtatggactggatttggcgcatccttttccttgtcggcgctgctaccggcgcgcattccttcgaagaagttcagctggttgaaagtggtggcggcctggttcaacctggcggatctctgagactgagctgtgccgccagcggcttcaatgtgtacgcctctggaatgcactgggtccgacaggcccctggcaaaggacttgagtgggtcgccaaaatctaccccgacagcgactacacctattacgccgacagcgtgaagggcagattcaccatcagcgccgacaccagcaagaacaccgcctacctccagatgaactccctgagagccgaggacaccgccgtgtactactgtagcagagacagcagcttctactacgtgtacgctatggactactggggccagggcacactggtcacagtctcttctacgcgtatccagaaccctgatcctgccgtgtaccagctgcgggatagcaagagcagcgacaagagcgtgtgtctgttcaccgacttcgacagccagaccaacgtgtcccagagcaaggactccgacgtgtacatcaccgataagtgcgtgctggacatgcggagcatggacttcaagagcaactccgccgtggcctggtccaacaagtccgatttcgcctgcgccaacgccttcaacaacagcattatccccgaggacacattcttcccaagccccgagagcagctgcggctttaccagcgagagctaccagcagggcgtgctgagcgccaccatcctgtacgagatcctgctgggcaaggccaccctgtacgccgtgctggtgtctgccctggtgctgatggctatggtcaagcggaaggacagccgggga

SEQ ID NO: 39401 - DNA, 1881 bp, synthetic construct
  source 1..1881: mol_type = other DNA
atggccttaccagtgaccgccttgctcctgccgctggccttgctgctccacgccgccaggccggacatccagatgacacagagccctagcagcctgtctgccagcgtgggagacagagtgaccatcacctgtagagccagccaggacgtgaacacagccgtggcttggtatcagcagaagcctggcaaggcccctaagctgctgatctacagcgcctacttcctgtacagcggcgtgcccagcagattcagcggaagcagaagcggcaccgacttcaccctgacaatatccagcctccagcctgaggacttcgccacctactactgccagcagtacagcagatacagccccgtgacctttggacagggcaccaaggtggaaatcaagagactcgaggccgacgtgtcccccaagcctaccatcttcctgccctctatcgccgagacaaagctccagaaggccggcacctacctgtgcctgctggaaaagttcttcccagatgtgattaagatccactggcaggaaaagaagtccaacaccatcctgggcagccaggaaggcaacaccatgaagaccaacgacacctacatgaagttcagctggctgaccgtgcccgagaagtccctggacaaagaacacagatgcatcgtgcggcacgaaaacaacaagaacggcgtggaccaggaaatcatcttcccacccatcaagaccgatgtgattacaatggaccccaaggacaactgctccaaggacgccaacgataccctgctgctccagctgaccaacaccagcgcctactacatgtacttgttgctgctgctgaagtccgtggtgtacttcgccatcatcacatgctgcctgctgcggagaaccgccttctgctgcaacggcgagaagtctagggccaagcgatctggatctggagcaacaaacttctcactactcaaacaagcaggtgacgtggaggagaatcccgggcctactagtatggactggatttggcgcatccttttccttgtcggcgctgctaccggcgcgcattccttcgaagaagttcagctggttgaaagtggtggcggcctggttcaacctggcggatctctgagactgagctgtgccgccagcggcttcaatgtgtacgcctctggaatgcactgggtccgacaggcccctggcaaaggacttgagtgggtcgccaaaatctaccccgacagcgactacacctattacgccgacagcgtgaagggcagattcaccatcagcgccgacaccagcaagaacaccgcctacctccagatgaactccctgagagccgaggacaccgccgtgtactactgtagcagagacagcagcttctactacgtgtacgctatggactactggggccagggcacactggtcacagtctcttctacgcgtagccagcctcacaccaagcccagcgtgttcgtgatgaagaacggcaccaacgtggcctgcctcgtgaaagagttctaccccaaggacatcaggatcaacctggtgtccagcaagaagatcaccgagttcgaccccgccatcgtgatctcccccagcggcaagtacaacgccgtgaagctggggaagtatgaggacagcaacagcgtgacctgctccgtgcagcacgacaacaagaccgtgcacagcaccgactttgaagtgaaaaccgactccaccgaccacgtgaagcccaaagagacagagaacaccaagcagcccagcaagagctgccacaagcccaaggccatcgtgcacaccgagaaagtgaacatgatgagcctgaccgtgatcggcttcagaatcctgctgctgaaagtggccggctttaacctgctgatgaccctgcggctgtggtccagctaa

SEQ ID NO: 39402 - DNA, 1881 bp, synthetic construct
  source 1..1881: mol_type = other DNA
atggccttaccagtgaccgccttgctcctgccgctggccttgctgctccacgccgccaggccggacatccagatgacacagagccctagcagcctgtctgccagcgtgggagacagagtgaccatcacctgtagagccagccaggacgtgaacacagccgtggcttggtatcagcagaagcctggcaaggcccctaagctgctgatctacagcgcctacttcctgtacagcggcgtgcccagcagattcagcggaagcagaagcggcaccgacttcaccctgacaatatccagcctccagcctgaggacttcgccacctactactgccagcagtacagcagatacagccccgtgacctttggacagggcaccaaggtggaaatcaagagactcgaggccgacgtgtcccccaagcctaccatcttcctgccctctatcgccgagacaaagctccagaaggccggcacctacctgtgcctgctggaaaagttcttcccagatgtgattaagatccactggcaggaaaagaagtccaacaccatcctgggcagccaggaaggcaacaccatgaagaccaacgacacctacatgaagttcagctggctgaccgtgcccgagaagtccctggacaaagaacacagatgcatcgtgcggcacgaaaacaacaagaacggcgtggaccaggaaatcatcttcccacccatcaagaccgatgtgattacaatggaccccaaggacaactgctccaaggacgccaacgataccctgctgctccagctgaccaacaccagcgcctactacatgtacttgttgctgctgctgaagtccgtggtgtacttcgccatcatcacatgctgcctgctgcggagaaccgccttctgctgcaacggcgagaagtctagggccaagcgatctggatctggagcaacaaacttctcactactcaaacaagcaggtgacgtggaggagaatcccgggcctactagtatggactggatttggcgcatccttttccttgtcggcgctgctaccggcgcgcattccttcgaagaagttcagctggttgaaagtggtggcggcctggttcaacctggcggatctctgagactgagctgtgccgccagcggcttcaatgtgtacgcctctggaatgcactgggtccgacaggcccctggcaaaggacttgagtgggtcgccaaaatctaccccgacagcgactacacctattacgccgacagcgtgaagggcagattcaccatcagcgccgacaccagcaagaacaccgcctacctccagatgaactccctgagagccgaggacaccgccgtgtactactgtagcagagacagcagcttctactacgtgtacgctatggactactggggccagggcacactggtcacagtctcttctacgcgtagccagcctcacaccaagcccagcgtgttcgtgatgaagaacggcaccaacgtggcctgcctcgtgaaagagttctaccccaaggacatcaggatcaacctggtgtccagcaagaagatcaccgagttcgaccccgccatcgtgatctcccccagcggcaagtacaacgccgtgaagctggggaagtacgaggacagcaacagcgtgacctgctccgtgcagcacgacaacaagaccgtgcacagcaccgactttgaagtgaaaaccgactccaccgaccacgtgaagcccaaagagacagagaacaccaagcagcccagcaagagctgccacaagcccaaggccatcgtgcacaccgagaaagtgaacatgatgagcctgaccgtgctgggcttcagaatcctgctgctgaaagtggccggctttaacctgctgatgaccctgcggctgtggtccagctaa

SEQ ID NO: 39403 - DNA, 1869 bp, synthetic construct; identical to SEQ ID NO: 39400
  source 1..1869: mol_type = other DNA

SEQ ID NO: 39404 - DNA, 1881 bp, synthetic construct
  source 1..1881: mol_type = other DNA
atggccttaccagtgaccgccttgctcctgccgctggccttgctgctccacgccgccaggccggacatccagatgacacagagccctagcagcctgtctgccagcgtgggagacagagtgaccatcacctgtagagccagccaggacgtgaacacagccgtggcttggtatcagcagaagcctggcaaggcccctaagctgctgatctacagcgcctacttcctgtacagcggcgtgcccagcagattcagcggaagcagaagcggcaccgacttcaccctgacaatatccagcctccagcctgaggacttcgccacctactactgccagcagtacagcagatacagccccgtgacctttggacagggcaccaaggtggaaatcaagagactcgagatccagaaccctgatcctgccgtgtaccagctgcgggatagcaagagcagcgacaagagcgtgtgtctgttcaccgacttcgacagccagaccaacgtgtcccagagcaaggactccgacgtgtacatcaccgataagtgcgtgctggacatgcggagcatggacttcaagagcaactccgccgtggcctggtccaacaagtccgatttcgcctgcgccaacgccttcaacaacagcattatccccgaggacacattcttcccaagccccgagagcagctgcggctttaccagcgagagctaccagcagggcgtgctgagcgccaccatcctgtacgagatcctgctgggcaaggccaccctgtacgccgtgctggtgtctgccctggtgctgatggctatggtcaagcggaaggacagccggggacgcgccaagagaagcggatctggcgtgaagcagaccctgaatttcgacctgctgaagctggctggcgacgtggaatccaacccaggccctactagtatggactggatttggcgcatccttttccttgtcggcgctgctaccggcgcgcattccttcgaagaagttcagctggttgaaagtggtggcggcctggttcaacctggcggatctctgagactgagctgtgccgccagcggcttcaatgtgtacgcctctggaatgcactgggtccgacaggcccctggcaaaggacttgagtgggtcgccaaaatctaccccgacagcgactacacctattacgccgacagcgtgaagggcagattcaccatcagcgccgacaccagcaagaacaccgcctacctccagatgaactccctgagagccgaggacaccgccgtgtactactgtagcagagacagcagcttctactacgtgtacgctatggactactggggccagggcacactggtcacagtctcttctacgcgtgaggacctgaagaacgtgttcccacctgaggtggccgtgttcgagcctagcgaggccgagatcagccacacccagaaagccaccctcgtgtgcctggctaccggcttctaccccgaccatgtggaactgtcttggtgggtcaacggcaaagaggtgcacagcggcgtgtgtaccgacccccagccactgaaagaacagcccgccctgaacgacagccggtactgcctgagcagcagactgagagtgtccgccaccttctggcagaacccccggaaccacttcagatgccaggtgcagttctacggcctgagcgagaacgacgagtggacccaggacagagccaagcccgtgacccagatcgtgtctgccgaagcctggggcagagccgattgcgacgtgaagctggtggaaaagagcttcgagacagacaccaacctgaacttccagaacctgagcgtgatcggcttcagaatcctgctgctgaaagtggccggctttaacctgctgatgaccctgcggctgtggtccagc

SEQ ID NO: 39405 - DNA, 2274 bp, synthetic construct
  source 1..2274: mol_type = other DNA
atggccttaccagtgaccgccttgctcctgccgctggccttgctgctccacgccgccaggccggaagtgcagctggttgaatctggcggaggactggttcagcctggcggatctctgagactgtcttgtgccgccagcggcttcagcttcagcgacttttggatgagctgggtccgacaggcccctggcaaaggacttgaatgggtcgccacaatcagccaggccggcagcgagaaggactacgtggactctgtgaagggcagattcaccatcagccgggacaacgccaagaagtccctgtacctccagatgaacagcctgagagccgaggacaccgccgtgtactattgtgcctctggcgtgtacagcttcgactacagaggccagggcaccctggtcacagtctcttctggtaccggcggaggcggatctggcggcggaggtagcggtggcggaggatctgaattcgacatccagatgacacagagccctagcagcctgtctgccagcgtgggagacagagtgaccatcacctgtagagccagccaggacgtgaacacagccgtggcttggtatcagcagaagcctggcaaggcccctaagctgctgatctacagcgcctacttcctgtacagcggcgtgcccagcagattcagcggaagcagaagcggcaccgacttcaccctgacaatatccagcctccagcctgaggacttcgccacctactactgccagcagtacagcagatacagccccgtgacctttggacagggcaccaaggtggaaatcaagagactcgaggacctgaagaacgtgttcccacctgaggtggccgtgttcgagcctagcgaggccgagatcagccacacccagaaagccaccctcgtgtgcctggctaccggcttctaccccgaccatgtggaactgtcttggtgggtcaacggcaaagaggtgcacagcggcgtgtgtaccgacccccagccactgaaagaacagcccgccctgaacgacagccggtactgcctgagcagcagactgagagtgtccgccaccttctggcagaacccccggaaccacttcagatgccaggtgcagttctacggcctgagcgagaacgacgagtggacccaggacagagccaagcccgtgacccagatcgtgtctgccgaagcctggggcagagccgattgcgacgtgaagctggtggaaaagagcttcgagacagacaccaacctgaacttccagaacctgagcgtgatcggcttcagaatcctgctgctgaaagtggccggctttaacctgctgatgaccctgcggctgtggtccagcagggccaagcgatctggatctggagcaacaaacttctcactactcaaacaagcaggtgacgtggaggagaatcccgggcctactagtatggactggatttggcgcatccttttccttgtcggcgctgctaccggcgcgcattccttcgaagaagttcagctggttgaaagtggtggcggcctggttcaacctggcggatctctgagactgagctgtgccgccagcggcttcaatgtgtacgcctctggaatgcactgggtccgacaggcccctggcaaaggacttgagtgggtcgccaaaatctaccccgacagcgactacacctattacgccgacagcgtgaagggcagattcaccatcagcgccgacaccagcaagaacaccgcctacctccagatgaactccctgagagccgaggacaccgccgtgtactactgtagcagagacagcagcttctactacgtgtacgctatggactactggggccagggcacactggtcacagtctcttctacgcgtatccagaaccctgatcctgccgtgtaccagctgcgggatagcaagagcagcgacaagagcgtgtgtctgttcaccgacttcgacagccagaccaacgtgtcccagagcaaggactccgacgtgtacatcaccgataagtgcgtgctggacatgcggagcatggacttcaagagcaactccgccgtggcctggtccaacaagtccgatttcgcctgcgccaacgccttcaacaacagcattatccccgaggacacattcttcccaagccccgagagcagctgcggctttaccagcgagagctaccagcagggcgtgctgagcgccaccatcctgtacgagatcctgctgggcaaggccaccctgtacgccgtgctggtgtctgccctggtgctgatggctatggtcaagcggaaggacagccgggga

SEQ ID NO: 39406 - DNA, 2286 bp, synthetic construct
  source 1..2286: mol_type = other DNA
atggccttaccagtgaccgccttgctcctgccgctggccttgctgctccacgccgccaggccggaagtgcagctggttgaatctggcggaggactggttcagcctggcggatctctgagactgtcttgtgccgccagcggcttcagcttcagcgacttttggatgagctgggtccgacaggcccctggcaaaggacttgaatgggtcgccacaatcagccaggccggcagcgagaaggactacgtggactctgtgaagggcagattcaccatcagccgggacaacgccaagaagtccctgtacctccagatgaacagcctgagagccgaggacaccgccgtgtactattgtgcctctggcgtgtacagcttcgactacagaggccagggcaccctggtcacagtctcttctggtaccggcggaggcggatctggcggcggaggtagcggtggcggaggatctgaattcgacatccagatgacacagagccctagcagcctgtctgccagcgtgggagacagagtgaccatcacctgtagagccagccaggacgtgaacacagccgtggcttggtatcagcagaagcctggcaaggcccctaagctgctgatctacagcgcctacttcctgtacagcggcgtgcccagcagattcagcggaagcagaagcggcaccgacttcaccctgacaatatccagcctccagcctgaggacttcgccacctactactgccagcagtacagcagatacagccccgtgacctttggacagggcaccaaggtggaaatcaagagactcgagatccagaaccctgatcctgccgtgtaccagctgcgggatagcaagagcagcgacaagagcgtgtgtctgttcaccgacttcgacagccagaccaacgtgtcccagagcaaggactccgacgtgtacatcaccgataagtgcgtgctggacatgcggagcatggacttcaagagcaactccgccgtggcctggtccaacaagtccgatttcgcctgcgccaacgccttcaacaacagcattatccccgaggacacattcttcccaagccccgagagcagctgcggctttaccagcgagagctaccagcagggcgtgctgagcgccaccatcctgtacgagatcctgctgggcaaggccaccctgtacgccgtgctggtgtctgccctggtgctgatggctatggtcaagcggaaggacagccggggacgcgccaagagaagcggatctggcgtgaagcagaccctgaatttcgacctgctgaagctggctggcgacgtggaatccaacccaggccctactagtatggactggatttggcgcatccttttccttgtcggcgctgctaccggcgcgcattccttcgaagaagttcagctggttgaaagtggtggcggcctggttcaacctggcggatctctgagactgagctgtgccgccagcggcttcaatgtgtacgcctctggaatgcactgggtccgacaggcccctggcaaaggacttgagtgggtcgccaaaatctaccccgacagcgactacacctattacgccgacagcgtgaagggcagattcaccatcagcgccgacaccagcaagaacaccgcctacctccagatgaactccctgagagccgaggacaccgccgtgtactactgtagcagagacagcagcttctactacgtgtacgctatggactactggggccagggcacactggtcacagtctcttctacgcgtgaggacctgaagaacgtgttcccacctgaggtggccgtgttcgagcctagcgaggccgagatcagccacacccagaaagccaccctcgtgtgcctggctaccggcttctaccccgaccatgtggaactgtcttggtgggtcaacggcaaagaggtgcacagcggcgtgtgtaccgacccccagccactgaaagaacagcccgccctgaacgacagccggtactgcctgagcagcagactgagagtgtccgccaccttctggcagaacccccggaaccacttcagatgccaggtgcagttctacggcctgagcgagaacgacgagtggacccaggacagagccaagcccgtgacccagatcgtgtctgccgaagcctggggcagagccgattgcgacgtgaagctggtggaaaagagcttcgagacagacaccaacctgaacttccagaacctgagcgtgatcggcttcagaatcctgctgctgaaagtggccggctttaacctgctgatgaccctgcggctgtggtccagc

SEQ ID NO: 39407 - DNA, 2685 bp, synthetic construct
  source 1..2685: mol_type = other DNA
atggccttaccagtgaccgccttgctcctgccgctggccttgctgctccacgccgccaggccggaagtgcagctggttgaatctggcggaggactggttcagcctggcggatctctgagactgtcttgtgccgccagcggcttcagcttcagcgacttttggatgagctgggtccgacaggcccctggcaaaggacttgaatgggtcgccacaatcagccaggccggcagcgagaaggactacgtggactctgtgaagggcagattcaccatcagccgggacaacgccaagaagtccctgtacctccagatgaacagcctgagagccgaggacaccgccgtgtactattgtgcctctggcgtgtacagcttcgactacagaggccagggcaccctggtcacagtctcttctggtaccggcggaggcggatctggcggcggaggtagcggtggcggaggatctgaattcgacatccagatgacacagagccctagcagcctgtctgccagcgtgggagacagagtgaccatcacctgtagagccagccaggacgtgaacacagccgtggcttggtatcagcagaagcctggcaaggcccctaagctgctgatctacagcgcctacttcctgtacagcggcgtgcccagcagattcagcggaagcagaagcggcaccgacttcaccctgacaatatccagcctccagcctgaggacttcgccacctactactgccagcagtacagcagatacagccccgtgacctttggacagggcaccaaggtggaaatcaagagactcgaggacctgaagaacgtgttcccacctgaggtggccgtgttcgagcctagcgaggccgagatcagccacacccagaaagccaccctcgtgtgcctggctaccggcttctaccccgaccatgtggaactgtcttggtgggtcaacggcaaagaggtgcacagcggcgtgtgtaccgacccccagccactgaaagaacagcccgccctgaacgacagccggtactgcctgagcagcagactgagagtgtccgccaccttctggcagaacccccggaaccacttcagatgccaggtgcagttctacggcctgagcgagaacgacgagtggacccaggacagagccaagcccgtgacccagatcgtgtctgccgaagcctggggcagagccgattgcgacgtgaagctggtggaaaagagcttcgagacagacaccaacctgaacttccagaacctgagcgtgatcggcttcagaatcctgctgctgaaagtggccggctttaacctgctgatgaccctgcggctgtggtccagcagggccaagcgatctggatctggagcaacaaacttctcactactcaaacaagcaggtgacgtggaggagaatcccgggcctactagtatggactggatttggcgcatccttttccttgtcggcgctgctaccggcgcgcattccgggccccagctccagctgcaagagtctggacctggcctggtcaagcctagcgagacactgagcctgacctgtaccgtgtccggcgatagcatcagcagcggcgattactactggggctggatcagacagcctcctggcaaaggactggaatggatcggccacatctactacagcggcgtgacctactacaaccccagcctgaagtccagagtgaccatcagcgtggacaccagccggaaccagttctccctgaagctgtctagcgtgacagccgccgataccgccgtgtactactgcaccagagaggacagcagcaactggcggagtagaggccagggaacactggtcacagttagctctggatccggcggaggcggaagtggaggcggaggatctggcggcggaggctctttcgaagaagttcagctggttgaaagtggtggcggcctggttcaacctggcggatctctgagactgagctgtgccgccagcggcttcaatgtgtacgcctctggaatgcactgggtccgacaggcccctggcaaaggacttgagtgggtcgccaaaatctaccccgacagcgactacacctattacgccgacagcgtgaagggcagattcaccatcagcgccgacaccagcaagaacaccgcctacctccagatgaactccctgagagccgaggacaccgccgtgtactactgtagcagagacagcagcttctactacgtgtacgctatggactactggggccagggcacactggtcacagtctcttctacgcgtatccagaaccctgatcctgccgtgtaccagctgcgggatagcaagagcagcgacaagagcgtgtgtctgttcaccgacttcgacagccagaccaacgtgtcccagagcaaggactccgacgtgtacatcaccgataagtgcgtgctggacatgcggagcatggacttcaagagcaactccgccgtggcctggtccaacaagtccgatttcgcctgcgccaacgccttcaacaacagcattatccccgaggacacattcttcccaagccccgagagcagctgcggctttaccagcgagagctaccagcagggcgtgctgagcgccaccatcctgtacgagatcctgctgggcaaggccaccctgtacgccgtgctggtgtctgccctggtgctgatggctatggtcaagcggaaggacagccgggga

SEQ ID NO: 39408 - DNA, 2697 bp, synthetic construct
  source 1..2697: mol_type = other DNA
atggccttaccagtgaccgccttgctcctgccgctggccttgctgctccacgccgccaggccggaagtgcagctggttgaatctggcggaggactggttcagcctggcggatctctgagactgtcttgtgccgccagcggcttcagcttcagcgacttttggatgagctgggtccgacaggcccctggcaaaggacttgaatgggtcgccacaatcagccaggccggcagcgagaaggactacgtggactctgtgaagggcagattcaccatcagccgggacaacgccaagaagtccctgtacctccagatgaacagcctgagagccgaggacaccgccgtgtactattgtgcctctggcgtgtacagcttcgactacagaggccagggcaccctggtcacagtctcttctggtaccggcggaggcggatctggcggcggaggtagcggtggcggaggatctgaattcgacatccagatgacacagagccctagcagcctgtctgccagcgtgggagacagagtgaccatcacctgtagagccagccaggacgtgaacacagccgtggcttggtatcagcagaagcctggcaaggcccctaagctgctgatctacagcgcctacttcctgtacagcggcgtgcccagcagattcagcggaagcagaagcggcaccgacttcaccctgacaatatccagcctccagcctgaggacttcgccacctactactgccagcagtacagcagatacagccccgtgacctttggacagggcaccaaggtggaaatcaagagactcgagatccagaaccctgatcctgccgtgtaccagctgcgggatagcaagagcagcgacaagagcgtgtgtctgttcaccgacttcgacagccagaccaacgtgtcccagagcaaggactccgacgtgtacatcaccgataagtgcgtgctggacatgcggagcatggacttcaagagcaactccgccgtggcctggtccaacaagtccgatttcgcctgcgccaacgccttcaacaacagcattatccccgaggacacattcttcccaagccccgagagcagctgcggctttaccagcgagagctaccagcagggcgtgctgagcgccaccatcctgtacgagatcctgctgggcaaggccaccctgtacgccgtgctggtgtctgccctggtgctgatggctatggtcaagcggaaggacagccggggacgcgccaagagaagcggatctggcgtgaagcagaccctgaatttcgacctgctgaagctggctggcgacgtggaatccaacccaggccctactagtatggactggatttggcgcatccttttccttgtcggcgctgctaccggcgcgcattccgggccccagctccagctgcaagagtctggacctggcctggtcaagcctagcgagacactgagcctgacctgtaccgtgtccggcgatagcatcagcagcggcgattactactggggctggatcagacagcctcctggcaaaggactggaatggatcggccacatctactacagcggcgtgacctactacaaccccagcctgaagtccagagtgaccatcagcgtggacaccagccggaaccagttctccctgaagctgtctagcgtgacagccgccgataccgccgtgtactactgcaccagagaggacagcagcaactggcggagtagaggccagggaacactggtcacagttagctctggatccggcggaggcggaagtggaggcggaggatctggcggcggaggctctttcgaagaagttcagctggttgaaagtggtggcggcctggttcaacctggcggatctctgagactgagctgtgccgccagcggcttcaatgtgtacgcctctggaatgcactgggtccgacaggcccctggcaaaggacttgagtgggtcgccaaaatctaccccgacagcgactacacctattacgccgacagcgtgaagggcagattcaccatcagcgccgacaccagcaagaacaccgcctacctccagatgaactccctgagagccgaggacaccgccgtgtactactgtagcagagacagcagcttctactacgtgtacgctatggactactggggccagggcacactggtcacagtctcttctacgcgtgaggacctgaagaacgtgttcccacctgaggtggccgtgttcgagcctagcgaggccgagatcagccacacccagaaagccaccctcgtgtgcctggctaccggcttctaccccgaccatgtggaactgtcttggtgggtcaacggcaaagaggtgcacagcggcgtgtgtaccgacccccagccactgaaagaacagcccgccctgaacgacagccggtactgcctgagcagcagactgagagtgtccgccaccttctggcagaacccccggaaccacttcagatgccaggtgcagttctacggcctgagcgagaacgacgagtggacccaggacagagccaagcccgtgacccagatcgtgtctgccgaagcctggggcagagccgattgcgacgtgaagctggtggaaaagagcttcgagacagacaccaacctgaacttccagaacctgagcgtgatcggcttcagaatcctgctgctgaaagtggccggctttaacctgctgatgaccctgcggctgtggtccagc

SEQ ID NO: 39409 - DNA, 2079 bp, synthetic construct
  source 1..2079: mol_type = other DNA
atggccttaccagtgaccgccttgctcctgccgctggccttgctgctccacgccgccaggccggacatccagatgacacagagccctagcagcctgtctgccagcgtgggagacagagtgaccatcacctgtagagccagccaggacgtgaacacagccgtggcttggtatcagcagaagcctggcaaggcccctaagctgctgatctacagcgcctacttcctgtacagcggcgtgcccagcagattcagcggaagcagaagcggcaccgacttcaccctgacaatatccagcctccagcctgaggacttcgccacctactactgccagcagtacagcagatacagccccgtgacctttggacagggcaccaaggtggaaatcaagagactcgaggacctgaagaacgtgttcccacctgaggtggccgtgttcgagcctagcgaggccgagatcagccacacccagaaagccaccctcgtgtgcctggctaccggcttctaccccgaccatgtggaactgtcttggtgggtcaacggcaaagaggtgcacagcggcgtgtgtaccgacccccagccactgaaagaacagcccgccctgaacgacagccggtactgcctgagcagcagactgagagtgtccgccaccttctggcagaacccccggaaccacttcagatgccaggtgcagttctacggcctgagcgagaacgacgagtggacccaggacagagccaagcccgtgacccagatcgtgtctgccgaagcctggggcagagccgattgcgacgtgaagctggtggaaaagagcttcgagacagacaccaacctgaacttccagaacctgagcgtgatcggcttcagaatcctgctgctgaaagtggccggctttaacctgctgatgaccctgcggctgtggtccagcagggccaagcgatctggatctggagcaacaaacttctcactactcaaacaagcaggtgacgtggaggagaatcccgggcctactagtatggactggatttggcgcatccttttccttgtcggcgctgctaccggcgcccattccgggcccatggaccccgacctggaaatcagagccgccttcctgcggcagagaaacacagccctgagaacagaggtggccgagctggaacaagaggtgcagcggctggaaaacgaggtgtcccagtacgagacaagatacggccctctcggaggcggaaaaggatccggcggcggaggatctggcggaggcggatctgggggcggaggctctttcgaagaagttcagctggttgaaagtggtggcggcctggttcaacctggcggatctctgagactgagctgtgccgccagcggcttcaatgtgtacgcctctggaatgcactgggtccgacaggcccctggcaaaggacttgagtgggtcgccaaaatctaccccgacagcgactacacctattacgccgacagcgtgaagggcagattcaccatcagcgccgacaccagcaagaacaccgcctacctccagatgaactccctgagagccgaggacaccgccgtgtactactgtagcagagacagcagcttctactacgtgtacgctatggactactggggccagggcacactggtcacagtctcttctacgcgtatccagaaccctgatcctgccgtgtaccagctgcgggatagcaagagcagcgacaagagcgtgtgtctgttcaccgacttcgacagccagaccaacgtgtcccagagcaaggactccgacgtgtacatcaccgataagtgcgtgctggacatgcggagcatggacttcaagagcaactccgccgtggcctggtccaacaagtccgatttcgcctgcgccaacgccttcaacaacagcattatccccgaggacacattcttcccaagccccgagagcagctgcggctttaccagcgagagctaccagcagggcgtgctgagcgccaccatcctgtacgagatcctgctgggcaaggccaccctgtacgccgtgctggtgtctgccctggtgctgatggctatggtcaagcggaaggacagccgggga

SEQ ID NO: 39410 - DNA, 2091 bp, synthetic construct
  source 1..2091: mol_type = other DNA
atggccttaccagtgaccgccttgctcctgccgctggccttgctgctccacgccgccaggccggacatccagatgacacagagccctagcagcctgtctgccagcgtgggagacagagtgaccatcacctgtagagccagccaggacgtgaacacagccgtggcttggtatcagcagaagcctggcaaggcccctaagctgctgatctacagcgcctacttcctgtacagcggcgtgcccagcagattcagcggaagcagaagcggcaccgacttcaccctgacaatatccagcctccagcctgaggacttcgccacctactactgccagcagtacagcagatacagccccgtgacctttggacagggcaccaaggtggaaatcaagagactcgagatccagaaccctgatcctgccgtgtaccagctgcgggatagcaagagcagcgacaagagcgtgtgtctgttcaccgacttcgacagccagaccaacgtgtcccagagcaaggactccgacgtgtacatcaccgataagtgcgtgctggacatgcggagcatggacttcaagagcaactccgccgtggcctggtccaacaagtccgatttcgcctgcgccaacgccttcaacaacagcattatccccgaggacacattcttcccaagccccgagagcagctgcggctttaccagcgagagctaccagcagggcgtgctgagcgccaccatcctgtacgagatcctgctgggcaaggccaccctgtacgccgtgctggtgtctgccctggtgctgatggctatggtcaagcggaaggacagccggggacgcgccaagagaagcggatctggcgtgaagcagaccctgaatttcgacctgctgaagctggctggcgacgtggaatccaacccaggccctactagtatggactggatttggcgcatccttttccttgtcggcgctgctaccggcgcccattccgggcccatggaccccgacctggaaatcagagccgccttcctgcggcagagaaacacagccctgagaacagaggtggccgagctggaacaagaggtgcagcggctggaaaacgaggtgtcccagtacgagacaagatacggccctctcggaggcggaaaaggatccggcggcggaggatctggcggaggcggatctgggggcggaggctctttcgaagaagttcagctggttgaaagtggtggcggcctggttcaacctggcggatctctgagactgagctgtgccgccagcggcttcaatgtgtacgcctctggaatgcactgggtccgacaggcccctggcaaaggacttgagtgggtcgccaaaatctaccccgacagcgactacacctattacgccgacagcgtgaagggcagattcaccatcagcgccgacaccagcaagaacaccgcctacctccagatgaactccctgagagccgaggacaccgccgtgtactactgtagcagagacagcagcttctactacgtgtacgctatggactactggggccagggcacactggtcacagtctcttctacgcgtgaggacctgaagaacgtgttcccacctgaggtggccgtgttcgagcctagcgaggccgagatcagccacacccagaaagccaccctcgtgtgcctggctaccggcttctaccccgaccatgtggaactgtcttggtgggtcaacggcaaagaggtgcacagcggcgtgtgtaccgacccccagccactgaaagaacagcccgccctgaacgacagccggtactgcctgagcagcagactgagagtgtccgccaccttctggcagaacccccggaaccacttcagatgccaggtgcagttctacggcctgagcgagaacgacgagtggacccaggacagagccaagcccgtgacccagatcgtgtctgccgaagcctggggcagagccgattgcgacgtgaagctggtggaaaagagcttcgagacagacaccaacctgaacttccagaacctgagcgtgatcggcttcagaatcctgctgctgaaagtggccggctttaacctgctgatgaccctgcggctgtggtccagc

SEQ ID NO: 39411 - DNA, 2010 bp, synthetic construct
  source 1..2010: mol_type = other DNA
atggccttaccagtgaccgccttgctcctgccgctggccttgctgctccacgccgccaggccggacatccagatgacacagagccctagcagcctgtctgccagcgtgggagacagagtgaccatcacctgtagagccagccaggacgtgaacacagccgtggcttggtatcagcagaagcctggcaaggcccctaagctgctgatctacagcgcctacttcctgtacagcggcgtgcccagcagattcagcggaagcagaagcggcaccgacttcaccctgacaatatccagcctccagcctgaggacttcgccacctactactgccagcagtacagcagatacagccccgtgacctttggacagggcaccaaggtggaaatcaagagactcgaggacctgaagaacgtgttcccacctgaggtggccgtgttcgagcctagcgaggccgagatcagccacacccagaaagccaccctcgtgtgcctggctaccggcttctaccccgaccatgtggaactgtcttggtgggtcaacggcaaagaggtgcacagcggcgtgtgtaccgacccccagccactgaaagaacagcccgccctgaacgacagccggtactgcctgagcagcagactgagagtgtccgccaccttctggcagaacccccggaaccacttcagatgccaggtgcagttctacggcctgagcgagaacgacgagtggacccaggacagagccaagcccgtgacccagatcgtgtctgccgaagcctggggcagagccgattgcgacgtgaagctggtggaaaagagcttcgagacagacaccaacctgaacttccagaacctgagcgtgatcggcttcagaatcctgctgctgaaagtggccggctttaacctgctgatgaccctgcggctgtggtccagcagggccaagcgatctggatctggagcaacaaacttctcactactcaaacaagcaggtgacgtggaggagaatcccgggcctactagtatggactggatttggcgcatccttttccttgtcggcgctgctaccggcgcccattccgggcccgaagttgctgccctcgagaaggaggtagcagctttggaaaaagaagtcgcagcccttgagaaagaagttgcggctctggagaagggatccggcggcggaggatctggcggaggcggatctgggggcggaggctctttcgaagaagttcagctggttgaaagtggtggcggcctggttcaacctggcggatctctgagactgagctgtgccgccagcggcttcaatgtgtacgcctctggaatgcactgggtccgacaggcccctggcaaaggacttgagtgggtcgccaaaatctaccccgacagcgactacacctattacgccgacagcgtgaagggcagattcaccatcagcgccgacaccagcaagaacaccgcctacctccagatgaactccctgagagccgaggacaccgccgtgtactactgtagcagagacagcagcttctactacgtgtacgctatggactactggggccagggcacactggtcacagtctcttctacgcgtatccagaaccctgatcctgccgtgtaccagctgcgggatagcaagagcagcgacaagagcgtgtgtctgttcaccgacttcgacagccagaccaacgtgtcccagagcaaggactccgacgtgtacatcaccgataagtgcgtgctggacatgcggagcatggacttcaagagcaactccgccgtggcctggtccaacaagtccgatttcgcctgcgccaacgccttcaacaacagcattatccccgaggacacattcttcccaagccccgagagcagctgcggctttaccagcgagagctaccagcagggcgtgctgagcgccaccatcctgtacgagatcctgctgggcaaggccaccctgtacgccgtgctggtgtctgccctggtgctgatggctatggtcaagcggaaggacagccgggga

SEQ ID NO: 39412 - DNA, 2022 bp, synthetic construct
  source 1..2022: mol_type = other DNA
atggccttaccagtgaccgccttgctcctgccgctggccttgctgctccacgccgccaggccggacatccagatgacacagagccctagcagcctgtctgccagcgtgggagacagagtgaccatcacctgtagagccagccaggacgtgaacacagccgtggcttggtatcagcagaagcctggcaaggcccctaagctgctgatctacagcgcctacttcctgtacagcggcgtgcccagcagattcagcggaagcagaagcggcaccgacttcaccctgacaatatccagcctccagcctgaggacttcgccacctactactgccagcagtacagcagatacagccccgtgacctttggacagggcaccaaggtggaaatcaagagactcgagatccagaaccctgatcctgccgtgtaccagctgcgggatagcaagagcagcgacaagagcgtgtgtctgttcaccgacttcgacagccagaccaacgtgtcccagagcaaggactccgacgtgtacatcaccgataagtgcgtgctggacatgcggagcatggacttcaagagcaactccgccgtggcctggtccaacaagtccgatttcgcctgcgccaacgccttcaacaacagcattatccccgaggacacattcttcccaagccccgagagcagctgcggctttaccagcgagagctaccagcagggcgtgctgagcgccaccatcctgtacgagatcctgctgggcaaggccaccctgtacgccgtgctggtgtctgccctggtgctgatggctatggtcaagcggaaggacagccggggacgcgccaagagaagcggatctggcgtgaagcagaccctgaatttcgacctgctgaagctggctggcgacgtggaatccaacccaggccctactagtatggactggatttggcgcatccttttccttgtcggcgctgctaccggcgcccattccgggcccgaagttgctgccctcgagaaggaggtagcagctttggaaaaagaagtcgcagcccttgagaaagaagttgcggctctggagaagggatccggcggcggaggatctggcggaggcggatctgggggcggaggctctttcgaagaagttcagctggttgaaagtggtggcggcctggttcaacctggcggatctctgagactgagctgtgccgccagcggcttcaatgtgtacgcctctggaatgcactgggtccgacaggcccctggcaaaggacttgagtgggtcgccaaaatctaccccgacagcgactacacctattacgccgacagcgtgaagggcagattcaccatcagcgccgacaccagcaagaacaccgcctacctccagatgaactccctgagagccgaggacaccgccgtgtactactgtagcagagacagcagcttctactacgtgtacgctatggactactggggccagggcacactggtcacagtctcttctacgcgtgaggacctgaagaacgtgttcccacctgaggtggccgtgttcgagcctagcgaggccgagatcagccacacccagaaagccaccctcgtgtgcctggctaccggcttctaccccgaccatgtggaactgtcttggtgggtcaacggcaaagaggtgcacagcggcgtgtgtaccgacccccagccactgaaagaacagcccgccctgaacgacagccggtactgcctgagcagcagactgagagtgtccgccaccttctggcagaacccccggaaccacttcagatgccaggtgcagttctacggcctgagcgagaacgacgagtggacccaggacagagccaagcccgtgacccagatcgtgtctgccgaagcctggggcagagccgattgcgacgtgaagctggtggaaaagagcttcgagacagacaccaacctgaacttccagaacctgagcgtgatcggcttcagaatcctgctgctgaaagtggccggctttaacctgctgatgaccctgcggctgtggtccagc

SEQ ID NO: 39413 - DNA, 2280 bp, synthetic construct
  source 1..2280: mol_type = other DNA
atggccttaccagtgaccgccttgctcctgccgctggccttgctgctccacgccgccaggccggacatccagatgacacagagccctagcagcctgtctgccagcgtgggagacagagtgaccatcacctgtagagccagccaggacgtgaacacagccgtggcttggtatcagcagaagcctggcaaggcccctaagctgctgatctacagcgcctacttcctgtacagcggcgtgcccagcagattcagcggaagcagaagcggcaccgacttcaccctgacaatatccagcctccagcctgaggacttcgccacctactactgccagcagtacagcagatacagccccgtgacctttggacagggcaccaaggtggaaatcaagagactcgaggacctgaagaacgtgttcccacctgaggtggccgtgttcgagcctagcgaggccgagatcagccacacccagaaagccaccctcgtgtgcctggctaccggcttctaccccgaccatgtggaactgtcttggtgggtcaacggcaaagaggtgcacagcggcgtgtgtaccgacccccagccactgaaagaacagcccgccctgaacgacagccggtactgcctgagcagcagactgagagtgtccgccaccttctggcagaacccccggaaccacttcagatgccaggtgcagttctacggcctgagcgagaacgacgagtggacccaggacagagccaagcccgtgacccagatcgtgtctgccgaagcctggggcagagccgattgcgacgtgaagctggtggaaaagagcttcgagacagacaccaacctgaacttccagaacctgagcgtgatcggcttcagaatcctgctgctgaaagtggccggctttaacctgctgatgaccctgcggctgtggtccagcagggccaagcgatctggatctggagcaacaaacttctcactactcaaacaagcaggtgacgtggaggagaatcccgggcctactagtatggactggatttggcgcatccttttccttgtcggcgctgctaccggcgcccattccgggccccaggttcagctgcaagagtctggcggaggacttgctcaagctggcggaagcctgagactgtcttgtgccgcctctggcagaaccttcagcatgggctggtttagacaggcccctggcaaagagagagagttcgtcgccgccatcacatacagcggcggcagcccttactacgcctcttctgtcagaggccggttcaccatcagccgggacaacgccaagaacaccgtgtacctccagatgaacagcctgaagccagaggacaccgccgtgtactactgtgccgccaatccaacctacggcagcgactggaatgccgagaattggggccagggcacccaagtgacagtgtctagtggatccggcggcggaggatctggcggaggcggatctgggggcggaggctctttcgaagaagttcagctggttgaaagtggtggcggcctggttcaacctggcggatctctgagactgagctgtgccgccagcggcttcaatgtgtacgcctctggaatgcactgggtccgacaggcccctggcaaaggacttgagtgggtcgccaaaatctaccccgacagcgactacacctattacgccgacagcgtgaagggcagattcaccatcagcgccgacaccagcaagaacaccgcctacctccagatgaactccctgagagccgaggacaccgccgtgtactactgtagcagagacagcagcttctactacgtgtacgctatggactactggggccagggcacactggtcacagtctcttctacgcgtatccagaaccctgatcctgccgtgtaccagctgcgggatagcaagagcagcgacaagagcgtgtgtctgttcaccgacttcgacagccagaccaacgtgtcccagagcaaggactccgacgtgtacatcaccgataagtgcgtgctggacatgcggagcatggacttcaagagcaactccgccgtggcctggtccaacaagtccgatttcgcctgcgccaacgccttcaacaacagcattatccccgaggacacattcttcccaagccccgagagcagctgcggctttaccagcgagagctaccagcagggcgtgctgagcgccaccatcctgtacgagatcctgctgggcaaggccaccctgtacgccgtgctggtgtctgccctggtgctgatggctatggtcaagcggaaggacagccgggga

SEQ ID NO: 39414 - DNA, 2292 bp, synthetic construct
  source 1..2292: mol_type = other DNA
atggccttaccagtgaccgccttgctcctgccgctggccttgctgctccacgccgccaggccggacatccagatgacacagagccctagcagcctgtctgccagcgtgggagacagagtgaccatcacctgtagagccagccaggacgtgaacacagccgtggcttggtatcagcagaagcctggcaaggcccctaagctgctgatctacagcgcctacttcctgtacagcggcgtgcccagcagattcagcggaagcagaagcggcaccgacttcaccctgacaatatccagcctccagcctgaggacttcgccacctactactgccagcagtacagcagatacagccccgtgacctttggacagggcaccaaggtggaaatcaagagactcgagatccagaaccctgatcctgccgtgtaccagctgcgggatagcaagagcagcgacaagagcgtgtgtctgttcaccgacttcgacagccagaccaacgtgtcccagagcaaggactccgacgtgtacatcaccgataagtgcgtgctggacatgcggagcatggacttcaagagcaactccgccgtggcctggtccaacaagtccgatttcgcctgcgccaacgccttcaacaacagcattatccccgaggacacattcttcccaagccccgagagcagctgcggctttaccagcgagagctaccagcagggcgtgctgagcgccaccatcctgtacgagatcctgctgggcaaggccaccctgtacgccgtgctggtgtctgccctggtgctgatggctatggtcaagcggaaggacagccggggacgcgccaagagaagcggatctggcgtgaagcagaccctgaatttcgacctgctgaagctggctggcgacgtggaatccaacccaggccctactagtatggactggatttggcgcatccttttccttgtcggcgctgctaccggcgcccattccgggccccaggttcagctgcaagagtctggcggaggacttgctcaagctggcggaagcctgagactgtcttgtgccgcctctggcagaaccttcagcatgggctggtttagacaggcccctggcaaagagagagagttcgtcgccgccatcacatacagcggcggcagcccttactacgcctcttctgtcagaggccggttcaccatcagccgggacaacgccaagaacaccgtgtacctccagatgaacagcctgaagccagaggacaccgccgtgtactactgtgccgccaatccaacctacggcagcgactggaatgccgagaattggggccagggcacccaagtgacagtgtctagtggatccggcggcggaggatctggcggaggcggatctgggggcggaggctctttcgaagaagttcagctggttgaaagtggtggcggcctggttcaacctggcggatctctgagactgagctgtgccgccagcggcttcaatgtgtacgcctctggaatgcactgggtccgacaggcccctggcaaaggacttgagtgggtcgccaaaatctaccccgacagcgactacacctattacgccgacagcgtgaagggcagattcaccatcagcgccgacaccagcaagaacaccgcctacctccagatgaactccctgagagccgaggacaccgccgtgtactactgtagcagagacagcagcttctactacgtgtacgctatggactactggggccagggcacactggtcacagtctcttctacgcgtgaggacctgaagaacgtgttcccacctgaggtggccgtgttcgagcctagcgaggccgagatcagccacacccagaaagccaccctcgtgtgcctggctaccggcttctaccccgaccatgtggaactgtcttggtgggtcaacggcaaagaggtgcacagcggcgtgtgtaccgacccccagccactgaaagaacagcccgccctgaacgacagccggtactgcctgagcagcagactgagagtgtccgccaccttctggcagaacccccggaaccacttcagatgccaggtgcagttctacggcctgagcgagaacgacgagtggacccaggacagagccaagcccgtgacccagatcgtgtctgccgaagcctggggcagagccgattgcgacgtgaagctggtggaaaagagcttcgagacagacaccaacctgaacttccagaacctgagcgtgatcggcttcagaatcctgctgctgaaagtggccggctttaacctgctgatgaccctgcggctgtggtccagc

SEQ ID NO: 39415 - DNA, 2298 bp, synthetic construct
  source 1..2298: mol_type = other DNA
atggccttaccagtgaccgccttgctcctgccgctggccttgctgctccacgccgccaggccggaagtgcaactggtggaatctggaggctctctggtgcagccagggggaagcctgagactgtcttgtgccgcttccggcttcaccttcgacgactacgccatgagctgggtgcgccaggtgccaggcaaaggcctggaatgggtgtccagcatcaactggagcggcacccacaccgattacgccgactccgtgaaaggcagattcacaatcagcagaaacaacgccaacaataccctgtacctgcagatgaactccctgaagtctgaggatacagcagtgtattattgcgccaagaactggcgggacgccggcaccacttggtttgagaaaagcggctctgccggacagggaacccaagtgacagtgtcctccggtaccggcggaggcggatctggcggcggaggtagcggtggcggaggatctgaattcgacatccagatgacacagagccctagcagcctgtctgccagcgtgggagacagagtgaccatcacctgtagagccagccaggacgtgaacacagccgtggcttggtatcagcagaagcctggcaaggcccctaagctgctgatctacagcgcctacttcctgtacagcggcgtgcccagcagattcagcggaagcagaagcggcaccgacttcaccctgacaatatccagcctccagcctgaggacttcgccacctactactgccagcagtacagcagatacagccccgtgacctttggacagggcaccaaggtggaaatcaagagactcgaggacctgaagaacgtgttcccacctgaggtggccgtgttcgagcctagcgaggccgagatcagccacacccagaaagccaccctcgtgtgcctggctaccggcttctaccccgaccatgtggaactgtcttggtgggtcaacggcaaagaggtgcacagcggcgtgtgtaccgacccccagccactgaaagaacagcccgccctgaacgacagccggtactgcctgagcagcagactgagagtgtccgccaccttctggcagaacccccggaaccacttcagatgccaggtgcagttctacggcctgagcgagaacgacgagtggacccaggacagagccaagcccgtgacccagatcgtgtctgccgaagcctggggcagagccgattgcgacgtgaagctggtggaaaagagcttcgagacagacaccaacctgaacttccagaacctgagcgtgatcggcttcagaatcctgctgctgaaagtggccggctttaacctgctgatgaccctgcggctgtggtccagcagggccaagcgatctggatctggagcaacaaacttctcactactcaaacaagcaggtgacgtggaggagaatcccgggcctactagtatggactggatttggcgcatccttttccttgtcggcgctgctaccggcgcgcattccttcgaagaagttcagctggttgaaagtggtggcggcctggttcaacctggcggatctctgagactgagctgtgccgccagcggcttcaatgtgtacgcctctggaatgcactgggtccgacaggcccctggcaaaggacttgagtgggtcgccaaaatctaccccgacagcgactacacctattacgccgacagcgtgaagggcagattcaccatcagcgccgacaccagcaagaacaccgcctacctccagatgaactccctgagagccgaggacaccgccgtgtactactgtagcagagacagcagcttctactacgtgtacgctatggactactggggccagggcacactggtcacagtctcttctacgcgtatccagaaccctgatcctgccgtgtaccagctgcgggatagcaagagcagcgacaagagcgtgtgtctgttcaccgacttcgacagccagaccaacgtgtcccagagcaaggactccgacgtgtacatcaccgataagtgcgtgctggacatgcggagcatggacttcaagagcaactccgccgtggcctggtccaacaagtccgatttcgcctgcgccaacgccttcaacaacagcattatccccgaggacacattcttcccaagccccgagagcagctgcggctttaccagcgagagctaccagcagggcgtgctgagcgccaccatcctgtacgagatcctgctgggcaaggccaccctgtacgccgtgctggtgtctgccctggtgctgatggctatggtcaagcggaaggacagccgggga

SEQ ID NO: 39416 - DNA, 2310 bp, synthetic construct
  source 1..2310: mol_type = other DNA
atggccttaccagtgaccgccttgctcctgccgctggccttgctgctccacgccgccaggccggaagtgcaactggtggaatctggaggctctctggtgcagccagggggaagcctgagactgtcttgtgccgcttccggcttcaccttcgacgactacgccatgagctgggtgcgccaggtgccaggcaaaggcctggaatgggtgtccagcatcaactggagcggcacccacaccgattacgccgactccgtgaaaggcagattcacaatcagcagaaacaacgccaacaataccctgtacctgcagatgaactccctgaagtctgaggatacagcagtgtattattgcgccaagaactggcgggacgccggcaccacttggtttgagaaaagcggctctgccggacagggaacccaagtgacagtgtcctccggtaccggcggaggcggatctggcggcggaggtagcggtggcggaggatctgaattcgacatccagatgacacagagccctagcagcctgtctgccagcgtgggagacagagtgaccatcacctgtagagccagccaggacgtgaacacagccgtggcttggtatcagcagaagcctggcaaggcccctaagctgctgatctacagcgcctacttcctgtacagcggcgtgcccagcagattcagcggaagcagaagcggcaccgacttcaccctgacaatatccagcctccagcctgaggacttcgccacctactactgccagcagtacagcagatacagccccgtgacctttggacagggcaccaaggtggaaatcaagagactcgagatccagaaccctgatcctgccgtgtaccagctgcgggatagcaagagcagcgacaagagcgtgtgtctgttcaccgacttcgacagccagaccaacgtgtcccagagcaaggactccgacgtgtacatcaccgataagtgcgtgctggacatgcggagcatggacttcaagagcaactccgccgtggcctggtccaacaagtccgatttcgcctgcgccaacgccttcaacaacagcattatccccgaggacacattcttcccaagccccgagagcagctgcggctttaccagcgagagctaccagcagggcgtgctgagcgccaccatcctgtacgagatcctgctgggcaaggccaccctgtacgccgtgctggtgtctgccctggtgctgatggctatggtcaagcggaaggacagccggggacgcgccaagagaagcggatctggcgtgaagcagaccctgaatttcgacctgctgaagctggctggcgacgtggaatccaacccaggccctactagtatggactggatttggcgcatccttttccttgtcggcgctgctaccggcgcgcattccttcgaagaagttcagctggttgaaagtggtggcggcctggttcaacctggcggatctctgagactgagctgtgccgccagcggcttcaatgtgtacgcctctggaatgcactgggtccgacaggcccctggcaaaggacttgagtgggtcgccaaaatctaccccgacagcgactacacctattacgccgacagcgtgaagggcagattcaccatcagcgccgacaccagcaagaacaccgcctacctccagatgaactccctgagagccgaggacaccgccgtgtactactgtagcagagacagcagcttctactacgtgtacgctatggactactggggccagggcacactggtcacagtctcttctacgcgtgaggacctgaagaacgtgttcccacctgaggtggccgtgttcgagcctagcgaggccgagatcagccacacccagaaagccaccctcgtgtgcctggctaccggcttctaccccgaccatgtggaactgtcttggtgggtcaacggcaaagaggtgcacagcggcgtgtgtaccgacccccagccactgaaagaacagcccgccctgaacgacagccggtactgcctgagcagcagactgagagtgtccgccaccttctggcagaacccccggaaccacttcagatgccaggtgcagttctacggcctgagcgagaacgacgagtggacccaggacagagccaagcccgtgacccagatcgtgtctgccgaagcctggggcagagccgattgcgacgtgaagctggtggaaaagagcttcgagacagacaccaacctgaacttccagaacctgagcgtgatcggcttcagaatcctgctgctgaaagtggccggctttaacctgctgatgaccctgcggctgtggtccagc

SEQ ID NO: 39417 - DNA, 2292 bp, synthetic construct
  source 1..2292: mol_type = other DNA
atggccttaccagtgaccgccttgctcctgccgctggccttgctgctccacgccgccaggccggaagttcagctgcttgagtctggcggaggactggttcaacctggcggaagcctgagactgtcttgtgccgccagcggcttcatcttcagcagctacgccatgagctgggtccgacaggctcctggaaagggccaagaatgggtttccggcgttagcggcacaggcgtgaacacctactacgccgatagcgtgaagggcagattcaccatcagccgggacaacagcaagaacaccctgtacctccagatgaacagcctgagagccgaggacaccgccgtgtactattgtgcctctggcaaaggctgggacagcggctcttggtacgaggactatagaggccagggcaccctggtcacagtttcttcaggtaccggcggaggcggatctggcggcggaggtagcggtggcggaggatctgaattcgacatccagatgacacagagccctagcagcctgtctgccagcgtgggagacagagtgaccatcacctgtagagccagccaggacgtgaacacagccgtggcttggtatcagcagaagcctggcaaggcccctaagctgctgatctacagcgcctacttcctgtacagcggcgtgcccagcagattcagcggaagcagaagcggcaccgacttcaccctgacaatatccagcctccagcctgaggacttcgccacctactactgccagcagtacagcagatacagccccgtgacctttggacagggcaccaaggtggaaatcaagagactcgaggacctgaagaacgtgttcccacctgaggtggccgtgttcgagcctagcgaggccgagatcagccacacccagaaagccaccctcgtgtgcctggctaccggcttctaccccgaccatgtggaactgtcttggtgggtcaacggcaaagaggtgcacagcggcgtgtgtaccgacccccagccactgaaagaacagcccgccctgaacgacagccggtactgcctgagcagcagactgagagtgtccgccaccttctggcagaacccccggaaccacttcagatgccaggtgcagttctacggcctgagcgagaacgacgagtggacccaggacagagccaagcccgtgacccagatcgtgtctgccgaagcctggggcagagccgattgcgacgtgaagctggtggaaaagagcttcgagacagacaccaacctgaacttccagaacctgagcgtgatcggcttcagaatcctgctgctgaaagtggccggctttaacctgctgatgaccctgcggctgtggtccagcagggccaagcgatctggatctggagcaacaaacttctcactactcaaacaagcaggtgacgtggaggagaatcccgggcctactagtatggactggatttggcgcatccttttccttgtcggcgctgctaccggcgcgcattccttcgaagaagttcagctggttgaaagtggtggcggcctggttcaacctggcggatctctgagactgagctgtgccgccagcggcttcaatgtgtacgcctctggaatgcactgggtccgacaggcccctggcaaaggacttgagtgggtcgccaaaatctaccccgacagcgactacacctattacgccgacagcgtgaagggcagattcaccatcagcgccgacaccagcaagaacaccgcctacctccagatgaactccctgagagccgaggacaccgccgtgtactactgtagcagagacagcagcttctactacgtgtacgctatggactactggggccagggcacactggtcacagtctcttctacgcgtatccagaaccctgatcctgccgtgtaccagctgcgggatagcaagagcagcgacaagagcgtgtgtctgttcaccgacttcgacagccagaccaacgtgtcccagagcaaggactccgacgtgtacatcaccgataagtgcgtgctggacatgcggagcatggacttcaagagcaactccgccgtggcctggtccaacaagtccgatttcgcctgcgccaacgccttcaacaacagcattatccccgaggacacattcttcccaagccccgagagcagctgcggctttaccagcgagagctaccagcagggcgtgctgagcgccaccatcctgtacgagatcctgctgggcaaggccaccctgtacgccgtgctggtgtctgccctggtgctgatggctatggtcaagcggaaggacagccgggga

SEQ ID NO: 39418 - DNA, 2304 bp, synthetic construct
  source 1..2304: mol_type = other DNA
atggccttaccagtgaccgccttgctcctgccgctggccttgctgctccacgccgccaggccggaagttcagctgcttgagtctggcggaggactggttcaacctggcggaagcctgagactgtcttgtgccgccagcggcttcatcttcagcagctacgccatgagctgggtccgacaggctcctggaaagggccaagaatgggtttccggcgttagcggcacaggcgtgaacacctactacgccgatagcgtgaagggcagattcaccatcagccgggacaacagcaagaacaccctgtacctccagatgaacagcctgagagccgaggacaccgccgtgtactattgtgcctctggcaaaggctgggacagcggctcttggtacgaggactatagaggccagggcaccctggtcacagtttcttcaggtaccggcggaggcggatctggcggcggaggtagcggtggcggaggatctgaattcgacatccagatgacacagagccctagcagcctgtctgccagcgtgggagacagagtgaccatcacctgtagagccagccaggacgtgaacacagccgtggcttggtatcagcagaagcctggcaaggcccctaagctgctgatctacagcgcctacttcctgtacagcggcgtgcccagcagattcagcggaagcagaagcggcaccgacttcaccctgacaatatccagcctccagcctgaggacttcgccacctactactgccagcagtacagcagatacagccccgtgacctttggacagggcaccaaggtggaaatcaagagactcgagatccagaaccctgatcctgccgtgtaccagctgcgggatagcaagagcagcgacaagagcgtgtgtctgttcaccgacttcgacagccagaccaacgtgtcccagagcaaggactccgacgtgtacatcaccgataagtgcgtgctggacatgcggagcatggacttcaagagcaactccgccgtggcctggtccaacaagtccgatttcgcctgcgccaacgccttcaacaacagcattatccccgaggacacattcttcccaagccccgagagcagctgcggctttaccagcgagagctaccagcagggcgtgctgagcgccaccatcctgtacgagatcctgctgggcaaggccaccctgtacgccgtgctggtgtctgccctggtgctgatggctatggtcaagcggaaggacagccggggacgcgccaagagaagcggatctggcgtgaagcagaccctgaatttcgacctgctgaagctggctggcgacgtggaatccaacccaggccctactagtatggactggatttggcgcatccttttccttgtcggcgctgctaccggcgcgcattccttcgaagaagttcagctggttgaaagtggtggcggcctggttcaacctggcggatctctgagactgagctgtgccgccagcggcttcaatgtgtacgcctctggaatgcactgggtccgacaggcccctggcaaaggacttgagtgggtcgccaaaatctaccccgacagcgactacacctattacgccgacagcgtgaagggcagattcaccatcagcgccgacaccagcaagaacaccgcctacctccagatgaactccctgagagccgaggacaccgccgtgtactactgtagcagagacagcagcttctactacgtgtacgctatggactactggggccagggcacactggtcacagtctcttctacgcgtgaggacctgaagaacgtgttcccacctgaggtggccgtgttcgagcctagcgaggccgagatcagccacacccagaaagccaccctcgtgtgcctggctaccggcttctaccccgaccatgtggaactgtcttggtgggtcaacggcaaagaggtgcacagcggcgtgtgtaccgacccccagccactgaaagaacagcccgccctgaacgacagccggtactgcctgagcagcagactgagagtgtccgccaccttctggcagaacccccggaaccacttcagatgccaggtgcagttctacggcctgagcgagaacgacgagtggacccaggacagagccaagcccgtgacccagatcgtgtctgccgaagcctggggcagagccgattgcgacgtgaagctggtggaaaagagcttcgagacagacaccaacctgaacttccagaacctgagcgtgatcggcttcagaatcctgctgctgaaagtggccggctttaacctgctgatgaccctgcggctgtggtccagc

SEQ ID NO: 39419 - DNA, 2196 bp, synthetic construct
  source 1..2196: mol_type = other DNA
atggccttaccagtgaccgccttgctcctgccgctggccttgctgctccacgccgccaggccgatgctgcccgctcctaagaatctggtggtgtccagaatcaccgaggacagcgccagactgtcttggacagctcctgatgccgccttcgacagcttccccatccggtacatcgagacactgatctggggcgaagccatctggctggatgtgcctggaagcgagagaagctacgacctgaccggactgaagcctggcacagagtatgccgtggtcatcaccggcgtgaaaggcggcagattctctagccctctggtggcctctttcaccaccggtaccggcggaggcggatctggcggcggaggtagcggtggcggaggatctgaattcgacatccagatgacacagagccctagcagcctgtctgccagcgtgggagacagagtgaccatcacctgtagagccagccaggacgtgaacacagccgtggcttggtatcagcagaagcctggcaaggcccctaagctgctgatctacagcgcctacttcctgtacagcggcgtgcccagcagattcagcggaagcagaagcggcaccgacttcaccctgacaatatccagcctccagcctgaggacttcgccacctactactgccagcagtacagcagatacagccccgtgacctttggacagggcaccaaggtggaaatcaagagactcgaggacctgaagaacgtgttcccacctgaggtggccgtgttcgagcctagcgaggccgagatcagccacacccagaaagccaccctcgtgtgcctggctaccggcttctaccccgaccatgtggaactgtcttggtgggtcaacggcaaagaggtgcacagcggcgtgtgtaccgacccccagccactgaaagaacagcccgccctgaacgacagccggtactgcctgagcagcagactgagagtgtccgccaccttctggcagaacccccggaaccacttcagatgccaggtgcagttctacggcctgagcgagaacgacgagtggacccaggacagagccaagcccgtgacccagatcgtgtctgccgaagcctggggcagagccgattgcgacgtgaagctggtggaaaagagcttcgagacagacaccaacctgaacttccagaacctgagcgtgatcggcttcagaatcctgctgctgaaagtggccggctttaacctgctgatgaccctgcggctgtggtccagcagggccaagcgatctggatctggagcaacaaacttctcactactcaaacaagcaggtgacgtggaggagaatcccgggcctactagtatggactggatttggcgcatccttttccttgtcggcgctgctaccggcgcgcattccttcgaagaagttcagctggttgaaagtggtggcggcctggttcaacctggcggatctctgagactgagctgtgccgccagcggcttcaatgtgtacgcctctggaatgcactgggtccgacaggcccctggcaaaggacttgagtgggtcgccaaaatctaccccgacagcgactacacctattacgccgacagcgtgaagggcagattcaccatcagcgccgacaccagcaagaacaccgcctacctccagatgaactccctgagagccgaggacaccgccgtgtactactgtagcagagacagcagcttctactacgtgtacgctatggactactggggccagggcacactggtcacagtctcttctacgcgtatccagaaccctgatcctgccgtgtaccagctgcgggatagcaagagcagcgacaagagcgtgtgtctgttcaccgacttcgacagccagaccaacgtgtcccagagcaaggactccgacgtgtacatcaccgataagtgcgtgctggacatgcggagcatggacttcaagagcaactccgccgtggcctggtccaacaagtccgatttcgcctgcgccaacgccttcaacaacagcattatccccgaggacacattcttcccaagccccgagagcagctgcggctttaccagcgagagctaccagcagggcgtgctgagcgccaccatcctgtacgagatcctgctgggcaaggccaccctgtacgccgtgctggtgtctgccctggtgctgatggctatggtcaagcggaaggacagccgggga

SEQ ID NO: 39420 - DNA, 2208 bp, synthetic construct
  source 1..2208: mol_type = other DNA
atggccttaccagtgaccgccttgctcctgccgctggccttgctgctccacgccgccaggccgatgctgcccgctcctaagaatctggtggtgtccagaatcaccgaggacagcgccagactgtcttggacagctcctgatgccgccttcgacagcttccccatccggtacatcgagacactgatctggggcgaagccatctggctggatgtgcctggaagcgagagaagctacgacctgaccggactgaagcctggcacagagtatgccgtggtcatcaccggcgtgaaaggcggcagattctctagccctctggtggcctctttcaccaccggtaccggcggaggcggatctggcggcggaggtagcggtggcggaggatctgaattcgacatccagatgacacagagccctagcagcctgtctgccagcgtgggagacagagtgaccatcacctgtagagccagccaggacgtgaacacagccgtggcttggtatcagcagaagcctggcaaggcccctaagctgctgatctacagcgcctacttcctgtacagcggcgtgcccagcagattcagcggaagcagaagcggcaccgacttcaccctgacaatatccagcctccagcctgaggacttcgccacctactactgccagcagtacagcagatacagccccgtgacctttggacagggcaccaaggtggaaatcaagagactcgagatccagaaccctgatcctgccgtgtaccagctgcgggatagcaagagcagcgacaagagcgtgtgtctgttcaccgacttcgacagccagaccaacgtgtcccagagcaaggactccgacgtgtacatcaccgataagtgcgtgctggacatgcggagcatggacttcaagagcaactccgccgtggcctggtccaacaagtccgatttcgcctgcgccaacgccttcaacaacagcattatccccgaggacacattcttcccaagccccgagagcagctgcggctttaccagcgagagctaccagcagggcgtgctgagcgccaccatcctgtacgagatcctgctgggcaaggccaccctgtacgccgtgctggtgtctgccctggtgctgatggctatggtcaagcggaaggacagccggggacgcgccaagagaagcggatctggcgtgaagcagaccctgaatttcgacctgctgaagctggctggcgacgtggaatccaacccaggccctactagtatggactggatttggcgcatccttttccttgtcggcgctgctaccggcgcgcattccttcgaagaagttcagctggttgaaagtggtggcggcctggttcaacctggcggatctctgagactgagctgtgccgccagcggcttcaatgtgtacgcctctggaatgcactgggtccgacaggcccctggcaaaggacttgagtgggtcgccaaaatctaccccgacagcgactacacctattacgccgacagcgtgaagggcagattcaccatcagcgccgacaccagcaagaacaccgcctacctccagatgaactccctgagagccgaggacaccgccgtgtactactgtagcagagacagcagcttctactacgtgtacgctatggactactggggccagggcacactggtcacagtctcttctacgcgtgaggacctgaagaacgtgttcccacctgaggtggccgtgttcgagcctagcgaggccgagatcagccacacccagaaagccaccctcgtgtgcctggctaccggcttctaccccgaccatgtggaactgtcttggtgggtcaacggcaaagaggtgcacagcggcgtgtgtaccgacccccagccactgaaagaacagcccgccctgaacgacagccggtactgcctgagcagcagactgagagtgtccgccaccttctggcagaacccccggaaccacttcagatgccaggtgcagttctacggcctgagcgagaacgacgagtggacccaggacagagccaagcccgtgacccagatcgtgtctgccgaagcctggggcagagccgattgcgacgtgaagctggtggaaaagagcttcgagacagacaccaacctgaacttccagaacctgagcgtgatcggcttcagaatcctgctgctgaaagtggccggctttaacctgctgatgaccctgcggctgtggtccagc

SEQ ID NO: 39421 - DNA, 2283 bp, synthetic construct
  source 1..2283: mol_type = other DNA
atggccttaccagtgaccgccttgctcctgccgctggccttgctgctccacgccgccaggccggaggtgcagctggttgaatctggcggaggactggttcagcctggcggatctctgagactgtcttgtgccgccagcggcttcaacatcaaggatacctgtatcggctgggttcgcagagcccctggcaaagaggaagaactggtcgccaaaatctgcaagtacagcggccacaccagatacgccgacagcgtgaagggcagattcaccatcagcgccgacaccagcaagaacaccgcctacctccagatgaacagcctgagagccgaggacaccgccgtgtactattgtgccgctgtgtccgtcagagatgggcactacaattactggggccagggcaccaccgtgaccgtttcttcaggtaccggcggaggcggatctggcggcggaggtagcggtggcggaggatctgaattcgacatccagatgacacagagccctagcagcctgtctgccagcgtgggagacagagtgaccatcacctgtagagccagccaggacgtgaacacagccgtggcttggtatcagcagaagcctggcaaggcccctaagctgctgatctacagcgcctacttcctgtacagcggcgtgcccagcagattcagcggaagcagaagcggcaccgacttcaccctgacaatatccagcctccagcctgaggacttcgccacctactactgccagcagtacagcagatacagccccgtgacctttggacagggcaccaaggtggaaatcaagagactcgaggacctgaagaacgtgttcccacctgaggtggccgtgttcgagcctagcgaggccgagatcagccacacccagaaagccaccctcgtgtgcctggctaccggcttctaccccgaccatgtggaactgtcttggtgggtcaacggcaaagaggtgcacagcggcgtgtgtaccgacccccagccactgaaagaacagcccgccctgaacgacagccggtactgcctgagcagcagactgagagtgtccgccaccttctggcagaacccccggaaccacttcagatgccaggtgcagttctacggcctgagcgagaacgacgagtggacccaggacagagccaagcccgtgacccagatcgtgtctgccgaagcctggggcagagccgattgcgacgtgaagctggtggaaaagagcttcgagacagacaccaacctgaacttccagaacctgagcgtgatcggcttcagaatcctgctgctgaaagtggccggctttaacctgctgatgaccctgcggctgtggtccagcagggccaagcgatctggatctggagcaacaaacttctcactactcaaacaagcaggtgacgtggaggagaatcccgggcctactagtatggactggatttggcgcatccttttccttgtcggcgctgctaccggcgcgcattccttcgaagaagttcagctggttgaaagtggtggcggcctggttcaacctggcggatctctgagactgagctgtgccgccagcggcttcaatgtgtacgcctctggaatgcactgggtccgacaggcccctggcaaaggacttgagtgggtcgccaaaatctaccccgacagcgactacacctattacgccgacagcgtgaagggcagattcaccatcagcgccgacaccagcaagaacaccgcctacctccagatgaactccctgagagccgaggacaccgccgtgtactactgtagcagagacagcagcttctactacgtgtacgctatggactactggggccagggcacactggtcacagtctcttctacgcgtatccagaaccctgatcctgccgtgtaccagctgcgggatagcaagagcagcgacaagagcgtgtgtctgttcaccgacttcgacagccagaccaacgtgtcccagagcaaggactccgacgtgtacatcaccgataagtgcgtgctggacatgcggagcatggacttcaagagcaactccgccgtggcctggtccaacaagtccgatttcgcctgcgccaacgccttcaacaacagcattatccccgaggacacattcttcccaagccccgagagcagctgcggctttaccagcgagagctaccagcagggcgtgctgagcgccaccatcctgtacgagatcctgctgggcaaggccaccctgtacgccgtgctggtgtctgccctggtgctgatggctatggtcaagcggaaggacagccgggga

SEQ ID NO: 39422 - DNA, 2295 bp, synthetic construct
  source 1..2295: mol_type = other DNA
atggccttaccagtgaccgccttgctcctgccgctggccttgctgctccacgccgccaggccggaggtgcagctggttgaatctggcggaggactggttcagcctggcggatctctgagactgtcttgtgccgccagcggcttcaacatcaaggatacctgtatcggctgggttcgcagagcccctggcaaagaggaagaactggtcgccaaaatctgcaagtacagcggccacaccagatacgccgacagcgtgaagggcagattcaccatcagcgccgacaccagcaagaacaccgcctacctccagatgaacagcctgagagccgaggacaccgccgtgtactattgtgccgctgtgtccgtcagagatgggcactacaattactggggccagggcaccaccgtgaccgtttcttcaggtaccggcggaggcggatctggcggcggaggtagcggtggcggaggatctgaattcgacatccagatgacacagagccctagcagcctgtctgccagcgtgggagacagagtgaccatcacctgtagagccagccaggacgtgaacacagccgtggcttggtatcagcagaagcctggcaaggcccctaagctgctgatctacagcgcctacttcctgtacagcggcgtgcccagcagattcagcggaagcagaagcggcaccgacttcaccctgacaatatccagcctccagcctgaggacttcgccacctactactgccagcagtacagcagatacagccccgtgacctttggacagggcaccaaggtggaaatcaagagactcgagatccagaaccctgatcctgccgtgtaccagctgcgggatagcaagagcagcgacaagagcgtgtgtctgttcaccgacttcgacagccagaccaacgtgtcccagagcaaggactccgacgtgtacatcaccgataagtgcgtgctggacatgcggagcatggacttcaagagcaactccgccgtggcctggtccaacaagtccgatttcgcctgcgccaacgccttcaacaacagcattatccccgaggacacattcttcccaagccccgagagcagctgcggctttaccagcgagagctaccagcagggcgtgctgagcgccaccatcctgtacgagatcctgctgggcaaggccaccctgtacgccgtgctggtgtctgccctggtgctgatggctatggtcaagcggaaggacagccggggacgcgccaagagaagcggatctggcgtgaagcagaccctgaatttcgacctgctgaagctggctggcgacgtggaatccaacccaggccctactagtatggactggatttggcgcatccttttccttgtcggcgctgctaccggcgcgcattccttcgaagaagttcagctggttgaaagtggtggcggcctggttcaacctggcggatctctgagactgagctgtgccgccagcggcttcaatgtgtacgcctctggaatgcactgggtccgacaggcccctggcaaaggacttgagtgggtcgccaaaatctaccccgacagcgactacacctattacgccgacagcgtgaagggcagattcaccatcagcgccgacaccagcaagaacaccgcctacctccagatgaactccctgagagccgaggacaccgccgtgtactactgtagcagagacagcagcttctactacgtgtacgctatggactactggggccagggcacactggtcacagtctcttctacgcgtgaggacctgaagaacgtgttcccacctgaggtggccgtgttcgagcctagcgaggccgagatcagccacacccagaaagccaccctcgtgtgcctggctaccggcttctaccccgaccatgtggaactgtcttggtgggtcaacggcaaagaggtgcacagcggcgtgtgtaccgacccccagccactgaaagaacagcccgccctgaacgacagccggtactgcctgagcagcagactgagagtgtccgccaccttctggcagaacccccggaaccacttcagatgccaggtgcagttctacggcctgagcgagaacgacgagtggacccaggacagagccaagcccgtgacccagatcgtgtctgccgaagcctggggcagagccgattgcgacgtgaagctggtggaaaagagcttcgagacagacaccaacctgaacttccagaacctgagcgtgatcggcttcagaatcctgctgctgaaagtggccggctttaacctgctgatgaccctgcggctgtggtccagc

SEQ ID NO: 39423 - DNA, 3399 bp, synthetic construct
  source 1..3399: mol_type = other DNA
atggccttaccagtgaccgccttgctcctgccgctggccttgctgctccacgccgccaggccggaagtgcagctggttgaatctggcggaggactggttcaggctggcggatctctgagactgtcttgtgccgccagcggcagaacctttagcatgggctggtttagacaggcccctggcaaagagagagagttcgtcgccgccatcacatactctggcggcagcccttactacgccgactctgtgaagggcagattcaccatcagccgggacaacgccaagaacaccgtgtacctccagatgaacagcctgaagcctgaggacaccgccgtgtactactgcgccgccaatccaacatacggcagcgactggaacgccgagaattggggccagggaacccaagtgacagtgtctagcggtaccggcggaggcggatctggcggcggaggtagcggtggcggaggatctgaattcgacatccagatgacacagagccctagcagcctgtctgccagcgtgggagacagagtgaccatcacctgtagagccagccaggacgtgaacacagccgtggcttggtatcagcagaagcctggcaaggcccctaagctgctgatctacagcgcctacttcctgtacagcggcgtgcccagcagattcagcggaagcagaagcggcaccgacttcaccctgacaatatccagcctccagcctgaggacttcgccacctactactgccagcagtacagcagatacagccccgtgacctttggacagggcaccaaggtggaaatcaagagactcgaggacctgaagaacgtgttcccacctgaggtggccgtgttcgagcctagcgaggccgagatcagccacacccagaaagccaccctcgtgtgcctggctaccggcttctaccccgaccatgtggaactgtcttggtgggtcaacggcaaagaggtgcacagcggcgtgtgtaccgacccccagccactgaaagaacagcccgccctgaacgacagccggtactgcctgagcagcagactgagagtgtccgccaccttctggcagaacccccggaaccacttcagatgccaggtgcagttctacggcctgagcgagaacgacgagtggacccaggacagagccaagcccgtgacccagatcgtgtctgccgaagcctggggcagagccgattgcgacgtgaagctggtggaaaagagcttcgagacagacaccaacctgaacttccagaacctgagcgtgatcggcttcagaatcctgctgctgaaagtggccggctttaacctgctgatgaccctgcggctgtggtccagcagggccaagcgatctggatctggagcaacaaacttctcactactcaaacaagcaggtgacgtggaggagaatcccgggcctactagtgccaccatggactggatttggcgcatccttttccttgtcggcgctgctaccggcgcccattccgggcccgaagtgcaactggttgaatccggtggcggcctggtgcaagcaggcggatctctcagacttagctgtgccgcctccggcagaaccttcacaatgggatggtttaggcaggctccagggaaagagagagagttcgtcgccgccatctctctgtctcccacactggcctactacgccgactctgtgaaaggccggttcaccatctccagagataatgccaagaacaccgtggtgctgcaaatgaactctctgaaacccgaggatacagccctgtactattgtgccgctgaccggaagtccgtgatgagcatcagacccgattactggggacagggcacacaagtcacagtgtcctctggatccggcggcggaggatctggcggaggcggatctgggggcggaggctctttcgaagaagttcagctggttgaaagtggtggcggcctggttcaacctggcggatctctgagactgagctgtgccgccagcggcttcaatgtgtacgcctctggaatgcactgggtccgacaggcccctggcaaaggacttgagtgggtcgccaaaatctaccccgacagcgactacacctattacgccgacagcgtgaagggcagattcaccatcagcgccgacaccagcaagaacaccgcctacctccagatgaactccctgagagccgaggacaccgccgtgtactactgtagcagagacagcagcttctactacgtgtacgctatggactactggggccagggcacactggtcacagtctcttctacgcgtatccagaaccctgatcctgccgtgtaccagctgcgggatagcaagagcagcgacaagagcgtgtgtctgttcaccgacttcgacagccagaccaacgtgtcccagagcaaggactccgacgtgtacatcaccgataagtgcgtgctggacatgcggagcatggacttcaagagcaactccgccgtggcctggtccaacaagtccgatttcgcctgcgccaacgccttcaacaacagcattatccccgaggacacattcttcccaagccccgagagcagctgcggctttaccagcgagagctaccagcagggcgtgctgagcgccaccatcctgtacgagatcctgctgggcaaggccaccctgtacgccgtgctggtgtctgccctggtgctgatggctatggtcaagcggaaggacagccggggacgcgccaagagaagcggatctggcgtgaagcagaccctgaatttcgacctgctgaagctggctggcgacgtggaatccaacccaggcccttctagaggccatatgaccgagtacaagcccacggtgcgcctcgccacccgcgacgacgtccccagggccgtacgcaccctcgccgccgcgttcgccgactaccccgccacgcgccacaccgtcgatccggaccgccacatcgagcgggtcaccgagctgcaagaactcttcctcacgcgcgtcgggctcgacatcggcaaggtgtgggtcgcggacgacggcgccgcggtggcggtctggaccacgccggagagcgtcgaagcgggggcggtgttcgccgagatcggcccgcgcatggccgagttgagcggttcccggctggccgcgcagcaacagatggaaggcctcctggcgccgcaccggcccaaggagcccgcgtggttcctggccaccgtcggcgtctcgcccgaccaccagggcaagggtctgggcagcgccgtcgtgctccccggagtggaggcggccgagcgcgccggggtgcccgccttcctggagacctccgcgccccgcaacctccccttctacgagcggctcggcttcaccgtcaccgccgacgtcgaggtgcccgaaggaccgcgcacctggtgcatgacccgcaagcccggtgcctga

SEQ ID NO: 39424 - DNA, 2313 bp, synthetic construct
  source 1..2313: mol_type = other DNA
atggccttaccagtgaccgccttgctcctgccgctggccttgctgctccacgccgccaggccggaagtgcagctggttgaatctggcggaggactggttcagcctggcggatctctgagactgtcttgtgccgcctctggcttcgccagcgactactatatcatcggctggttcagacaggcccctggcaaagagagagagggcgtcagctgtatcagcagcagatacgccaacaccaactacgccgacagcgtgaagggcagattcaccatcagccgggacaacgccaagaacaccgtgtacctccagatgaacagcctgaagcctgaggacaccgccgtgtactactgtgccgccgacaccagaagatacacctgtcctgacattgccaccatgcaccggaacttcgattcttggggccagggcacactggtcaccgtttcttctggtaccggcggaggcggatctggcggcggaggtagcggtggcggaggatctgaattcgacatccagatgacacagagccctagcagcctgtctgccagcgtgggagacagagtgaccatcacctgtagagccagccaggacgtgaacacagccgtggcttggtatcagcagaagcctggcaaggcccctaagctgctgatctacagcgcctacttcctgtacagcggcgtgcccagcagattcagcggaagcagaagcggcaccgacttcaccctgacaatatccagcctccagcctgaggacttcgccacctactactgccagcagtacagcagatacagccccgtgacctttggacagggcaccaaggtggaaatcaagagactcgaggacctgaagaacgtgttcccacctgaggtggccgtgttcgagcctagcgaggccgagatcagccacacccagaaagccaccctcgtgtgcctggctaccggcttctaccccgaccatgtggaactgtcttggtgggtcaacggcaaagaggtgcacagcggcgtgtgtaccgacccccagccactgaaagaacagcccgccctgaacgacagccggtactgcctgagcagcagactgagagtgtccgccaccttctggcagaacccccggaaccacttcagatgccaggtgcagttctacggcctgagcgagaacgacgagtggacccaggacagagccaagcccgtgacccagatcgtgtctgccgaagcctggggcagagccgattgcgacgtgaagctggtggaaaagagcttcgagacagacaccaacctgaacttccagaacctgagcgtgatcggcttcagaatcctgctgctgaaagtggccggctttaacctgctgatgaccctgcggctgtggtccagcagggccaagcgatctggatctggagcaacaaacttctcactactcaaacaagcaggtgacgtggaggagaatcccgggcctactagtatggactggatttggcgcatccttttccttgtcggcgctgctaccggcgcgcattccttcgaagaagttcagctggttgaaagtggtggcggcctggttcaacctggcggatctctgagactgagctgtgccgccagcggcttcaatgtgtacgcctctggaatgcactgggtccgacaggcccctggcaaaggacttgagtgggtcgccaaaatctaccccgacagcgactacacctattacgccgacagcgtgaagggcagattcaccatcagcgccgacaccagcaagaacaccgcctacctccagatgaactccctgagagccgaggacaccgccgtgtactactgtagcagagacagcagcttctactacgtgtacgctatggactactggggccagggcacactggtcacagtctcttctacgcgtatccagaaccctgatcctgccgtgtaccagctgcgggatagcaagagcagcgacaagagcgtgtgtctgttcaccgacttcgacagccagaccaacgtgtcccagagcaaggactccgacgtgtacatcaccgataagtgcgtgctggacatgcggagcatggacttcaagagcaactccgccgtggcctggtccaacaagtccgatttcgcctgcgccaacgccttcaacaacagcattatccccgaggacacattcttcccaagccccgagagcagctgcggctttaccagcgagagctaccagcagggcgtgctgagcgccaccatcctgtacgagatcctgctgggcaaggccaccctgtacgccgtgctggtgtctgccctggtgctgatggctatggtcaagcggaaggacagccggggataa

SEQ ID NO: 39425 - DNA, 2313 bp, synthetic construct
  source 1..2313: mol_type = other DNA
atggccttaccagtgaccgccttgctcctgccgctggccttgctgctccacgccgccaggccggaagtgcagctggttgaatctggcggaggactggttcagcctggcggatctctgagactgagctgtgaagccagcggcttcgccagcgacgattacatcatcggctggttcagacaggcccctggcaaagagagagagggcgtcagctgcatcagctctaagtacgccaacaccgtgtacaccgacagcgtgaagggcagattcagactgagcagaggcaccgccaagaataccgtgtacctccagatgagcgccctgaagcctgaggataccgccgtgtactactgcgctatggacagccgcagagtgacatgccctgagatcagcaccatgcaccggaacttcgattcttggggccagggcacactggtcacagtgtcatctggtaccggcggaggcggatctggcggcggaggtagcggtggcggaggatctgaattcgacatccagatgacacagagccctagcagcctgtctgccagcgtgggagacagagtgaccatcacctgtagagccagccaggacgtgaacacagccgtggcttggtatcagcagaagcctggcaaggcccctaagctgctgatctacagcgcctacttcctgtacagcggcgtgcccagcagattcagcggaagcagaagcggcaccgacttcaccctgacaatatccagcctccagcctgaggacttcgccacctactactgccagcagtacagcagatacagccccgtgacctttggacagggcaccaaggtggaaatcaagagactcgaggacctgaagaacgtgttcccacctgaggtggccgtgttcgagcctagcgaggccgagatcagccacacccagaaagccaccctcgtgtgcctggctaccggcttctaccccgaccatgtggaactgtcttggtgggtcaacggcaaagaggtgcacagcggcgtgtgtaccgacccccagccactgaaagaacagcccgccctgaacgacagccggtactgcctgagcagcagactgagagtgtccgccaccttctggcagaacccccggaaccacttcagatgccaggtgcagttctacggcctgagcgagaacgacgagtggacccaggacagagccaagcccgtgacccagatcgtgtctgccgaagcctggggcagagccgattgcgacgtgaagctggtggaaaagagcttcgagacagacaccaacctgaacttccagaacctgagcgtgatcggcttcagaatcctgctgctgaaagtggccggctttaacctgctgatgaccctgcggctgtggtccagcagggccaagcgatctggatctggagcaacaaacttctcactactcaaacaagcaggtgacgtggaggagaatcccgggcctactagtatggactggatttggcgcatccttttccttgtcggcgctgctaccggcgcgcattccttcgaagaagttcagctggttgaaagtggtggcggcctggttcaacctggcggatctctgagactgagctgtgccgccagcggcttcaatgtgtacgcctctggaatgcactgggtccgacaggcccctggcaaaggacttgagtgggtcgccaaaatctaccccgacagcgactacacctattacgccgacagcgtgaagggcagattcaccatcagcgccgacaccagcaagaacaccgcctacctccagatgaactccctgagagccgaggacaccgccgtgtactactgtagcagagacagcagcttctactacgtgtacgctatggactactggggccagggcacactggtcacagtctcttctacgcgtatccagaaccctgatcctgccgtgtaccagctgcgggatagcaagagcagcgacaagagcgtgtgtctgttcaccgacttcgacagccagaccaacgtgtcccagagcaaggactccgacgtgtacatcaccgataagtgcgtgctggacatgcggagcatggacttcaagagcaactccgccgtggcctggtccaacaagtccgatttcgcctgcgccaacgccttcaacaacagcattatccccgaggacacattcttcccaagccccgagagcagctgcggctttaccagcgagagctaccagcagggcgtgctgagcgccaccatcctgtacgagatcctgctgggcaaggccaccctgtacgccgtgctggtgtctgccctggtgctgatggctatggtcaagcggaaggacagccggggataa

SEQ ID NO: 39426 - DNA, 2310 bp, synthetic construct
  source 1..2310: mol_type = other DNA
atggccttaccagtgaccgccttgctcctgccgctggccttgctgctccacgccgccaggccggaagtgcagctggttgaatctggcggaggactggttcagcctggcggatctctgagactgtcttgtgccgcctctggcttcgccagcgactactatatcatcggctggttcagacaggcccctggcaaagagagagagggcgtcagctgtatcagcagcagatacgccaacaccaactacgccgacagcgtgaagggcagattcaccatcagccgggacaacgccaagaacaccgtgtacctccagatgaacagcctgaagcctgaggacaccgccgtgtactactgtgccgccgacaccagaagatacacctgtcctgacattgccaccatgcaccggaacttcgattcttggggccagggcacactggtcaccgtttcttctggtaccggcggaggcggatctggcggcggaggtagcggtggcggaggatctgaattcgacatccagatgacacagagccctagcagcctgtctgccagcgtgggagacagagtgaccatcacctgtagagccagccaggacgtgaacacagccgtggcttggtatcagcagaagcctggcaaggcccctaagctgctgatctacagcgcctacttcctgtacagcggcgtgcccagcagattcagcggaagcagaagcggcaccgacttcaccctgacaatatccagcctccagcctgaggacttcgccacctactactgccagcagtacagcagatacagccccgtgacctttggacagggcaccaaggtggaaatcaagagactcgagatccagaaccctgatcctgccgtgtaccagctgcgggatagcaagagcagcgacaagagcgtgtgtctgttcaccgacttcgacagccagaccaacgtgtcccagagcaaggactccgacgtgtacatcaccgataagtgcgtgctggacatgcggagcatggacttcaagagcaactccgccgtggcctggtccaacaagtccgatttcgcctgcgccaacgccttcaacaacagcattatccccgaggacacattcttcccaagccccgagagcagctgcggctttaccagcgagagctaccagcagggcgtgctgagcgccaccatcctgtacgagatcctgctgggcaaggccaccctgtacgccgtgctggtgtctgccctggtgctgatggctatggtcaagcggaaggacagccggggaagggccaagcgatctggatctggagcaacaaacttctcactactcaaacaagcaggtgacgtggaggagaatcccgggcctactagtatggactggatttggcgcatccttttccttgtcggcgctgctaccggcgcgcattccttcgaagaagttcagctggttgaaagtggtggcggcctggttcaacctggcggatctctgagactgagctgtgccgccagcggcttcaatgtgtacgcctctggaatgcactgggtccgacaggcccctggcaaaggacttgagtgggtcgccaaaatctaccccgacagcgactacacctattacgccgacagcgtgaagggcagattcaccatcagcgccgacaccagcaagaacaccgcctacctccagatgaactccctgagagccgaggacaccgccgtgtactactgtagcagagacagcagcttctactacgtgtacgctatggactactggggccagggcacactggtcacagtctcttctacgcgtgacctgaagaacgtgttcccacctgaggtggccgtgttcgagcctagcgaggccgagatcagccacacccagaaagccaccctcgtgtgcctggctaccggcttctaccccgaccatgtggaactgtcttggtgggtcaacggcaaagaggtgcacagcggcgtgtgtaccgacccccagccactgaaagaacagcccgccctgaacgacagccggtactgcctgagcagcagactgagagtgtccgccaccttctggcagaacccccggaaccacttcagatgccaggtgcagttctacggcctgagcgagaacgacgagtggacccaggacagagccaagcccgtgacccagatcgtgtctgccgaagcctggggcagagccgattgcgacgtgaagctggtggaaaagagcttcgagacagacaccaacctgaacttccagaacctgagcgtgatcggcttcagaatcctgctgctgaaagtggccggctttaacctgctgatgaccctgcggctgtggtccagc

SEQ ID NO: 39427 - DNA, 2310 bp, synthetic construct
  source 1..2310: mol_type = other DNA
atggccttaccagtgaccgccttgctcctgccgctggccttgctgctccacgccgccaggccggaagtgcagctggttgaatctggcggaggactggttcagcctggcggatctctgagactgagctgtgaagccagcggcttcgccagcgacgattacatcatcggctggttcagacaggcccctggcaaagagagagagggcgtcagctgcatcagctctaagtacgccaacaccgtgtacaccgacagcgtgaagggcagattcagactgagcagaggcaccgccaagaataccgtgtacctccagatgagcgccctgaagcctgaggataccgccgtgtactactgcgctatggacagccgcagagtgacatgccctgagatcagcaccatgcaccggaacttcgattcttggggccagggcacactggtcacagtgtcatctggtaccggcggaggcggatctggcggcggaggtagcggtggcggaggatctgaattcgacatccagatgacacagagccctagcagcctgtctgccagcgtgggagacagagtgaccatcacctgtagagccagccaggacgtgaacacagccgtggcttggtatcagcagaagcctggcaaggcccctaagctgctgatctacagcgcctacttcctgtacagcggcgtgcccagcagattcagcggaagcagaagcggcaccgacttcaccctgacaatatccagcctccagcctgaggacttcgccacctactactgccagcagtacagcagatacagccccgtgacctttggacagggcaccaaggtggaaatcaagagactcgagatccagaaccctgatcctgccgtgtaccagctgcgggatagcaagagcagcgacaagagcgtgtgtctgttcaccgacttcgacagccagaccaacgtgtcccagagcaaggactccgacgtgtacatcaccgataagtgcgtgctggacatgcggagcatggacttcaagagcaactccgccgtggcctggtccaacaagtccgatttcgcctgcgccaacgccttcaacaacagcattatccccgaggacacattcttcccaagccccgagagcagctgcggctttaccagcgagagctaccagcagggcgtgctgagcgccaccatcctgtacgagatcctgctgggcaaggccaccctgtacgccgtgctggtgtctgccctggtgctgatggctatggtcaagcggaaggacagccggggaagggccaagcgatctggatctggagcaacaaacttctcactactcaaacaagcaggtgacgtggaggagaatcccgggcctactagtatggactggatttggcgcatccttttccttgtcggcgctgctaccggcgcgcattccttcgaagaagttcagctggttgaaagtggtggcggcctggttcaacctggcggatctctgagactgagctgtgccgccagcggcttcaatgtgtacgcctctggaatgcactgggtccgacaggcccctggcaaaggacttgagtgggtcgccaaaatctaccccgacagcgactacacctattacgccgacagcgtgaagggcagattcaccatcagcgccgacaccagcaagaacaccgcctacctccagatgaactccctgagagccgaggacaccgccgtgtactactgtagcagagacagcagcttctactacgtgtacgctatggactactggggccagggcacactggtcacagtctcttctacgcgtgacctgaagaacgtgttcccacctgaggtggccgtgttcgagcctagcgaggccgagatcagccacacccagaaagccaccctcgtgtgcctggctaccggcttctaccccgaccatgtggaactgtcttggtgggtcaacggcaaagaggtgcacagcggcgtgtgtaccgacccccagccactgaaagaacagcccgccctgaacgacagccggtactgcctgagcagcagactgagagtgtccgccaccttctggcagaacccccggaaccacttcagatgccaggtgcagttctacggcctgagcgagaacgacgagtggacccaggacagagccaagcccgtgacccagatcgtgtctgccgaagcctggggcagagccgattgcgacgtgaagctggtggaaaagagcttcgagacagacaccaacctgaacttccagaacctgagcgtgatcggcttcagaatcctgctgctgaaagtggccggctttaacctgctgatgaccctgcggctgtggtccagc

SEQ ID NO: 39428 - DNA, 2283 bp, synthetic construct
  source 1..2283: mol_type = other DNA
atggccttaccagtgaccgccttgctcctgccgctggccttgctgctccacgccgccaggccgcaagtcaaactggaagaaagcggtggcggcctggtgcaacctggcgaatctctgagactgagctgtagcgccagcggctccatcttcaaggtgttcagagtgttcgccatgagctggtacaggcaaggccctggcaagcagagagagctggtcgcctctatcagcagcggcgagacaaccacatacgccgaatctgtgaaaggccggttcaccatcagccgggataatgccaagaataccgcctatctccagatggactccctgaagcctgaagatacagctgtgtactactgcaacgccgaccataccttcaccggcgatttttggggccagggaacccaagtgaccgtgtctagtggtaccggcggaggcggatctggcggcggaggtagcggtggcggaggatctgaattcgacatccagatgacacagagccctagcagcctgtctgccagcgtgggagacagagtgaccatcacctgtagagccagccaggacgtgaacacagccgtggcttggtatcagcagaagcctggcaaggcccctaagctgctgatctacagcgcctacttcctgtacagcggcgtgcccagcagattcagcggaagcagaagcggcaccgacttcaccctgacaatatccagcctccagcctgaggacttcgccacctactactgccagcagtacagcagatacagccccgtgacctttggacagggcaccaaggtggaaatcaagagactcgagatccagaaccctgatcctgccgtgtaccagctgcgggatagcaagagcagcgacaagagcgtgtgtctgttcaccgacttcgacagccagaccaacgtgtcccagagcaaggactccgacgtgtacatcaccgataagtgcgtgctggacatgcggagcatggacttcaagagcaactccgccgtggcctggtccaacaagtccgatttcgcctgcgccaacgccttcaacaacagcattatccccgaggacacattcttcccaagccccgagagcagctgcggctttaccagcgagagctaccagcagggcgtgctgagcgccaccatcctgtacgagatcctgctgggcaaggccaccctgtacgccgtgctggtgtctgccctggtgctgatggctatggtcaagcggaaggacagccggggaagggccaagcgatctggatctggagcaacaaacttctcactactcaaacaagcaggtgacgtggaggagaatcccgggcctactagtatggactggatttggcgcatccttttccttgtcggcgctgctaccggcgcgcattccttcgaagaagttcagctggttgaaagtggtggcggcctggttcaacctggcggatctctgagactgagctgtgccgccagcggcttcaatgtgtacgcctctggaatgcactgggtccgacaggcccctggcaaaggacttgagtgggtcgccaaaatctaccccgacagcgactacacctattacgccgacagcgtgaagggcagattcaccatcagcgccgacaccagcaagaacaccgcctacctccagatgaactccctgagagccgaggacaccgccgtgtactactgtagcagagacagcagcttctactacgtgtacgctatggactactggggccagggcacactggtcacagtctcttctacgcgtgacctgaagaacgtgttcccacctgaggtggccgtgttcgagcctagcgaggccgagatcagccacacccagaaagccaccctcgtgtgcctggctaccggcttctaccccgaccatgtggaactgtcttggtgggtcaacggcaaagaggtgcacagcggcgtgtgtaccgacccccagccactgaaagaacagcccgccctgaacgacagccggtactgcctgagcagcagactgagagtgtccgccaccttctggcagaacccccggaaccacttcagatgccaggtgcagttctacggcctgagcgagaacgacgagtggacccaggacagagccaagcccgtgacccagatcgtgtctgccgaagcctggggcagagccgattgcgacgtgaagctggtggaaaagagcttcgagacagacaccaacctgaacttccagaacctgagcgtgatcggcttcagaatcctgctgctgaaagtggccggctttaacctgctgatgaccctgcggctgtggtccagc

SEQ ID NO: 39429 - DNA, 2289 bp, synthetic construct
  source 1..2289: mol_type = other DNA
atggccttaccagtgaccgccttgctcctgccgctggccttgctgctccacgccgccaggccggacatccagatgacacagagccctagcagcctgtctgccagcgtgggagacagagtgaccatcacctgtagagccagccaggacgtgaacacagccgtggcttggtatcagcagaagcctggcaaggcccctaagctgctgatctacagcgcctacttcctgtacagcggcgtgcccagcagattcagcggaagcagaagcggcaccgacttcaccctgacaatatccagcctccagcctgaggacttcgccacctactactgccagcagtacagcagatacagccccgtgacctttggacagggcaccaaggtggaaatcaagagactcgaggacctgaagaacgtgttcccacctgaggtggccgtgttcgagcctagcgaggccgagatcagccacacccagaaagccaccctcgtgtgcctggctaccggcttctaccccgaccatgtggaactgtcttggtgggtcaacggcaaagaggtgcacagcggcgtgtgtaccgacccccagccactgaaagaacagcccgccctgaacgacagccggtactgcctgagcagcagactgagagtgtccgccaccttctggcagaacccccggaaccacttcagatgccaggtgcagttctacggcctgagcgagaacgacgagtggacccaggacagagccaagcccgtgacccagatcgtgtctgccgaagcctggggcagagccgattgcgacgtgaagctggtggaaaagagcttcgagacagacaccaacctgaacttccagaacctgagcgtgatcggcttcagaatcctgctgctgaaagtggccggctttaacctgctgatgaccctgcggctgtggtccagcagggccaagcgatctggatctggagcaacaaacttctcactactcaaacaagcaggtgacgtggaggagaatcccgggcctactagtgccaccatggactggatttggcgcatccttttccttgtcggcgctgctaccggcgcccattccgggcccgaagtgcagctggttgaatctggcggaggactggttcaggctggcggatctctgagactgtcttgtgccgccagcggcagaacctttagcatgggctggtttagacaggcccctggcaaagagagagagttcgtcgccgccatcacatactctggcggcagcccttactacgccgactctgtgaagggcagattcaccatcagccgggacaacgccaagaacaccgtgtacctccagatgaacagcctgaagcctgaggacaccgccgtgtactactgcgccgccaatccaacatacggcagcgactggaacgccgagaattggggccagggaacccaagtgacagtgtctagcggatccggcggcggaggatctggcggaggcggatctgggggcggaggctctttcgaagaagttcagctggttgaaagtggtggcggcctggttcaacctggcggatctctgagactgagctgtgccgccagcggcttcaatgtgtacgcctctggaatgcactgggtccgacaggcccctggcaaaggacttgagtgggtcgccaaaatctaccccgacagcgactacacctattacgccgacagcgtgaagggcagattcaccatcagcgccgacaccagcaagaacaccgcctacctccagatgaactccctgagagccgaggacaccgccgtgtactactgtagcagagacagcagcttctactacgtgtacgctatggactactggggccagggcacactggtcacagtctcttctacgcgtatccagaaccctgatcctgccgtgtaccagctgcgggatagcaagagcagcgacaagagcgtgtgtctgttcaccgacttcgacagccagaccaacgtgtcccagagcaaggactccgacgtgtacatcaccgataagtgcgtgctggacatgcggagcatggacttcaagagcaactccgccgtggcctggtccaacaagtccgatttcgcctgcgccaacgccttcaacaacagcattatccccgaggacacattcttcccaagccccgagagcagctgcggctttaccagcgagagctaccagcagggcgtgctgagcgccaccatcctgtacgagatcctgctgggcaaggccaccctgtacgccgtgctggtgtctgccctggtgctgatggctatggtcaagcggaaggacagccggggataa

SEQ ID NO: 39430 - DNA, 2292 bp, synthetic construct
  source 1..2292: mol_type = other DNA
atggccttaccagtgaccgccttgctcctgccgctggccttgctgctccacgccgccaggccggacatccagatgacacagagccctagcagcctgtctgccagcgtgggagacagagtgaccatcacctgtagagccagccaggacgtgaacacagccgtggcttggtatcagcagaagcctggcaaggcccctaagctgctgatctacagcgcctacttcctgtacagcggcgtgcccagcagattcagcggaagcagaagcggcaccgacttcaccctgacaatatccagcctccagcctgaggacttcgccacctactactgccagcagtacagcagatacagccccgtgacctttggacagggcaccaaggtggaaatcaagagactcgaggacctgaagaacgtgttcccacctgaggtggccgtgttcgagcctagcgaggccgagatcagccacacccagaaagccaccctcgtgtgcctggctaccggcttctaccccgaccatgtggaactgtcttggtgggtcaacggcaaagaggtgcacagcggcgtgtgtaccgacccccagccactgaaagaacagcccgccctgaacgacagccggtactgcctgagcagcagactgagagtgtccgccaccttctggcagaacccccggaaccacttcagatgccaggtgcagttctacggcctgagcgagaacgacgagtggacccaggacagagccaagcccgtgacccagatcgtgtctgccgaagcctggggcagagccgattgcgacgtgaagctggtggaaaagagcttcgagacagacaccaacctgaacttccagaacctgagcgtgatcggcttcagaatcctgctgctgaaagtggccggctttaacctgctgatgaccctgcggctgtggtccagcagggccaagcgatctggatctggagcaacaaacttctcactactcaaacaagcaggtgacgtggaggagaatcccgggcctactagtgccaccatggactggatttggcgcatccttttccttgtcggcgctgctaccggcgcccattccgggcccgaagtgcaactggtggaatctgggggcggactggtgcagccaggcggaagtctgaggctgtcttgtgccgcctccggcagcatcttcggcttcaacgacatggcctggtatcggcaggctcccggaaaacagcgcgagctggtggctctgattagcagagtgggcgtgaccagcagcgccgactctgtgaagggcagattcacaatctccagagtgaacgccaaggatacagtgtacctccagatgaactctctgaaacctgaggatacagcagtgtactattgctacatggaccagcggctggacggcagcacactggcctactggggacagggaactcaagtgacagtgtctagcggatccggcggcggaggatctggcggaggcggatctgggggcggaggctctttcgaagaagttcagctggttgaaagtggtggcggcctggttcaacctggcggatctctgagactgagctgtgccgccagcggcttcaatgtgtacgcctctggaatgcactgggtccgacaggcccctggcaaaggacttgagtgggtcgccaaaatctaccccgacagcgactacacctattacgccgacagcgtgaagggcagattcaccatcagcgccgacaccagcaagaacaccgcctacctccagatgaactccctgagagccgaggacaccgccgtgtactactgtagcagagacagcagcttctactacgtgtacgctatggactactggggccagggcacactggtcacagtctcttctacgcgtatccagaaccctgatcctgccgtgtaccagctgcgggatagcaagagcagcgacaagagcgtgtgtctgttcaccgacttcgacagccagaccaacgtgtcccagagcaaggactccgacgtgtacatcaccgataagtgcgtgctggacatgcggagcatggacttcaagagcaactccgccgtggcctggtccaacaagtccgatttcgcctgcgccaacgccttcaacaacagcattatccccgaggacacattcttcccaagccccgagagcagctgcggctttaccagcgagagctaccagcagggcgtgctgagcgccaccatcctgtacgagatcctgctgggcaaggccaccctgtacgccgtgctggtgtctgccctggtgctgatggctatggtcaagcggaaggacagccggggataa

SEQ ID NO: 39431 - DNA, 2280 bp, synthetic construct
  source 1..2280: mol_type = other DNA
atggccttaccagtgaccgccttgctcctgccgctggccttgctgctccacgccgccaggccggacatccagatgacacagagccctagcagcctgtctgccagcgtgggagacagagtgaccatcacctgtagagccagccaggacgtgaacacagccgtggcttggtatcagcagaagcctggcaaggcccctaagctgctgatctacagcgcctacttcctgtacagcggcgtgcccagcagattcagcggaagcagaagcggcaccgacttcaccctgacaatatccagcctccagcctgaggacttcgccacctactactgccagcagtacagcagatacagccccgtgacctttggacagggcaccaaggtggaaatcaagagactcgaggacctgaagaacgtgttcccacctgaggtggccgtgttcgagcctagcgaggccgagatcagccacacccagaaagccaccctcgtgtgcctggctaccggcttctaccccgaccatgtggaactgtcttggtgggtcaacggcaaagaggtgcacagcggcgtgtgtaccgacccccagccactgaaagaacagcccgccctgaacgacagccggtactgcctgagcagcagactgagagtgtccgccaccttctggcagaacccccggaaccacttcagatgccaggtgcagttctacggcctgagcgagaacgacgagtggacccaggacagagccaagcccgtgacccagatcgtgtctgccgaagcctggggcagagccgattgcgacgtgaagctggtggaaaagagcttcgagacagacaccaacctgaacttccagaacctgagcgtgatcggcttcagaatcctgctgctgaaagtggccggctttaacctgctgatgaccctgcggctgtggtccagcagggccaagcgatctggatctggagcaacaaacttctcactactcaaacaagcaggtgacgtggaggagaatcccgggcctactagtgccaccatggactggatttggcgcatccttttccttgtcggcgctgctaccggcgcccattccgggcccgaggtgcagctggttgaatctggcggaggactggttcaggctggcggatctctgagactgtcttgtgccgccagcggctctgtgttcagcggcaatgtgatgggctggtacagacaggcccctggcaaagaaagagagtgggttgccgccattgccagcggcggcagcatctactacagagactctgtgaagggcagattcaccatcagccgggacaacgccaagaacaccgtgtacctccagatgaacagcctgaagcctgaggacaccgccgtgtactactgcaactctcaccctcctacactgccctattggggcctgggaacccaagtgacagtgtcctctggatccggcggcggaggatctggcggaggcggatctgggggcggaggctctttcgaagaagttcagctggttgaaagtggtggcggcctggttcaacctggcggatctctgagactgagctgtgccgccagcggcttcaatgtgtacgcctctggaatgcactgggtccgacaggcccctggcaaaggacttgagtgggtcgccaaaatctaccccgacagcgactacacctattacgccgacagcgtgaagggcagattcaccatcagcgccgacaccagcaagaacaccgcctacctccagatgaactccctgagagccgaggacaccgccgtgtactactgtagcagagacagcagcttctactacgtgtacgctatggactactggggccagggcacactggtcacagtctcttctacgcgtatccagaaccctgatcctgccgtgtaccagctgcgggatagcaagagcagcgacaagagcgtgtgtctgttcaccgacttcgacagccagaccaacgtgtcccagagcaaggactccgacgtgtacatcaccgataagtgcgtgctggacatgcggagcatggacttcaagagcaactccgccgtggcctggtccaacaagtccgatttcgcctgcgccaacgccttcaacaacagcattatccccgaggacacattcttcccaagccccgagagcagctgcggctttaccagcgagagctaccagcagggcgtgctgagcgccaccatcctgtacgagatcctgctgggcaaggccaccctgtacgccgtgctggtgtctgccctggtgctgatggctatggtcaagcggaaggacagccggggataa

SEQ ID NO: 39432 - DNA, 2274 bp, synthetic construct
  source 1..2274: mol_type = other DNA
atggccttaccagtgaccgccttgctcctgccgctggccttgctgctccacgccgccaggccggacatccagatgacacagagccctagcagcctgtctgccagcgtgggagacagagtgaccatcacctgtagagccagccaggacgtgaacacagccgtggcttggtatcagcagaagcctggcaaggcccctaagctgctgatctacagcgcctacttcctgtacagcggcgtgcccagcagattcagcggaagcagaagcggcaccgacttcaccctgacaatatccagcctccagcctgaggacttcgccacctactactgccagcagtacagcagatacagccccgtgacctttggacagggcaccaaggtggaaatcaagagactcgaggacctgaagaacgtgttcccacctgaggtggccgtgttcgagcctagcgaggccgagatcagccacacccagaaagccaccctcgtgtgcctggctaccggcttctaccccgaccatgtggaactgtcttggtgggtcaacggcaaagaggtgcacagcggcgtgtgtaccgacccccagccactgaaagaacagcccgccctgaacgacagccggtactgcctgagcagcagactgagagtgtccgccaccttctggcagaacccccggaaccacttcagatgccaggtgcagttctacggcctgagcgagaacgacgagtggacccaggacagagccaagcccgtgacccagatcgtgtctgccgaagcctggggcagagccgattgcgacgtgaagctggtggaaaagagcttcgagacagacaccaacctgaacttccagaacctgagcgtgatcggcttcagaatcctgctgctgaaagtggccggctttaacctgctgatgaccctgcggctgtggtccagcagggccaagcgatctggatctggagcaacaaacttctcactactcaaacaagcaggtgacgtggaggagaatcccgggcctactagtgccaccatggactggatttggcgcatccttttccttgtcggcgctgctaccggcgcccattccgggcccgaagttcagctgctggaatctggcggaggactcgttcaacctggcggctctctgagactgagctgtgccgcttctggcttcagcttctctagctacgccctgagctgggttcgacaagctcccggaaagggccttgaatgggtgtccagcatcggcgagaatgacggcaccacagactatgccgatgccgtgaaaggccggtttaccatcagcagagacaattccaagaacacgctctatctgcaaatgaactccctgcgcgtggaagatacagccgtgtattattgcgtgaaggacggcatccactggggacagggaaccctggttacagtgtctagcggatccggcggcggaggatctggcggaggcggatctgggggcggaggctctttcgaagaagttcagctggttgaaagtggtggcggcctggttcaacctggcggatctctgagactgagctgtgccgccagcggcttcaatgtgtacgcctctggaatgcactgggtccgacaggcccctggcaaaggacttgagtgggtcgccaaaatctaccccgacagcgactacacctattacgccgacagcgtgaagggcagattcaccatcagcgccgacaccagcaagaacaccgcctacctccagatgaactccctgagagccgaggacaccgccgtgtactactgtagcagagacagcagcttctactacgtgtacgctatggactactggggccagggcacactggtcacagtctcttctacgcgtatccagaaccctgatcctgccgtgtaccagctgcgggatagcaagagcagcgacaagagcgtgtgtctgttcaccgacttcgacagccagaccaacgtgtcccagagcaaggactccgacgtgtacatcaccgataagtgcgtgctggacatgcggagcatggacttcaagagcaactccgccgtggcctggtccaacaagtccgatttcgcctgcgccaacgccttcaacaacagcattatccccgaggacacattcttcccaagccccgagagcagctgcggctttaccagcgagagctaccagcagggcgtgctgagcgccaccatcctgtacgagatcctgctgggcaaggccaccctgtacgccgtgctggtgtctgccctggtgctgatggctatggtcaagcggaaggacagccggggataa

SEQ ID NO: 39433 - DNA, 3381 bp, synthetic construct
  source 1..3381: mol_type = other DNA
atgggacccagactgctgttttgggctctgctgtgtctgctcggcacaggacctgttgaagctggcgtgacacagagccccacacacctgattaagaccagaggccagcaggccacactgagatgcagccctatcagcggccacaccagcgtgtactggtatcagcaggctctcggactgggcctccagttcctgctttggtacgacgagggcgaagagagaaaccggggcaacttccctcctcggttttccggcagacagttccccaactacagcagcgagctgaacgtgaacgccctggaactggaagatagcgccctgtacctgtgtgcctcttctcttggtggacctcgcggactggctggactgagaggggatgagcagtttttcggccctggcaccagactgaccgtgctggaaggtaccggcggaggcggatctggcggcggagaattcgacatccagatgacacagagccctagcagcctgtctgccagcgtgggagacagagtgaccatcacctgtagagccagccaggacgtgaacacagccgtggcttggtatcagcagaagcctggcaaggcccctaagctgctgatctacagcgcctacttcctgtacagcggcgtgcccagcagattcagcggaagcagaagcggcaccgacttcaccctgacaatatccagcctccagcctgaggacttcgccacctactactgccagcagtacagcagatacagccccgtgacctttggacagggcaccaaggtggaaatcaagagactcgaggacctgaagaacgtgttcccacctgaggtggccgtgttcgagcctagcgaggccgagatcagccacacccagaaagccaccctcgtgtgcctggctaccggcttctaccccgaccatgtggaactgtcttggtgggtcaacggcaaagaggtgcacagcggcgtgtgtaccgacccccagccactgaaagaacagcccgccctgaacgacagccggtactgcctgagcagcagactgagagtgtccgccaccttctggcagaacccccggaaccacttcagatgccaggtgcagttctacggcctgagcgagaacgacgagtggacccaggacagagccaagcccgtgacccagatcgtgtctgccgaagcctggggcagagccgattgcgacgtgaagctggtggaaaagagcttcgagacagacaccaacctgaacttccagaacctgagcgtgatcggcttcagaatcctgctgctgaaagtggccggctttaacctgctgatgaccctgcggctgtggtccagcagggccaagcgatctggatctggagcaacaaacttctcactactcaaacaagcaggtgacgtggaggagaatcccgggcctactagtgccaccatggactggatttggcgcatccttttccttgtcggcgctgctaccggcgcccattccgggcccgaagtgcagctggttgaatctggcggaggactggttcaggctggcggatctctgagactgtcttgtgccgccagcggcagaacctttagcatgggctggtttagacaggcccctggcaaagagagagagttcgtcgccgccatcacatactctggcggcagcccttactacgccgactctgtgaagggcagattcaccatcagccgggacaacgccaagaacaccgtgtacctccagatgaacagcctgaagcctgaggacaccgccgtgtactactgcgccgccaatccaacatacggcagcgactggaacgccgagaattggggccagggaacccaagtgacagtgtctagcggatccggcggcggaggatctggcggaggcggatctgggggcggaggctctttcgaagaagttcagctggttgaaagtggtggcggcctggttcaacctggcggatctctgagactgagctgtgccgccagcggcttcaatgtgtacgcctctggaatgcactgggtccgacaggcccctggcaaaggacttgagtgggtcgccaaaatctaccccgacagcgactacacctattacgccgacagcgtgaagggcagattcaccatcagcgccgacaccagcaagaacaccgcctacctccagatgaactccctgagagccgaggacaccgccgtgtactactgtagcagagacagcagcttctactacgtgtacgctatggactactggggccagggcacactggtcacagtctcttctacgcgtatccagaaccctgatcctgccgtgtaccagctgcgggatagcaagagcagcgacaagagcgtgtgtctgttcaccgacttcgacagccagaccaacgtgtcccagagcaaggactccgacgtgtacatcaccgataagtgcgtgctggacatgcggagcatggacttcaagagcaactccgccgtggcctggtccaacaagtccgatttcgcctgcgccaacgccttcaacaacagcattatccccgaggacacattcttcccaagccccgagagcagctgcggctttaccagcgagagctaccagcagggcgtgctgagcgccaccatcctgtacgagatcctgctgggcaaggccaccctgtacgccgtgctggtgtctgccctggtgctgatggctatggtcaagcggaaggacagccggggacgcgccaagagaagcggatctggcgtgaagcagaccctgaatttcgacctgctgaagctggctggcgacgtggaatccaacccaggcccttctagaggccatatgaccgagtacaagcccacggtgcgcctcgccacccgcgacgacgtccccagggccgtacgcaccctcgccgccgcgttcgccgactaccccgccacgcgccacaccgtcgatccggaccgccacatcgagcgggtcaccgagctgcaagaactcttcctcacgcgcgtcgggctcgacatcggcaaggtgtgggtcgcggacgacggcgccgcggtggcggtctggaccacgccggagagcgtcgaagcgggggcggtgttcgccgagatcggcccgcgcatggccgagttgagcggttcccggctggccgcgcagcaacagatggaaggcctcctggcgccgcaccggcccaaggagcccgcgtggttcctggccaccgtcggcgtctcgcccgaccaccagggcaagggtctgggcagcgccgtcgtgctccccggagtggaggcggccgagcgcgccggggtgcccgccttcctggagacctccgcgccccgcaacctccccttctacgagcggctcggcttcaccgtcaccgccgacgtcgaggtgcccgaaggaccgcgcacctggtgcatgacccgcaagcccggtgcctga

SEQ ID NO: 39434 - DNA, 3378 bp, synthetic construct
  source 1..3378: mol_type = other DNA
atgggacccagactgctgttttgggctctgctgtgtctgctcggcacaggacctgttgaagctggcgtgacacagagccccacacacctgattaagaccagaggccagcaggccacactgagatgcagccctatcagcggccacaccagcgtgtactggtatcagcaggctctcggactgggcctccagttcctgctttggtacgacgagggcgaagagagaaaccggggcaacttccctcctcggttttccggcagacagttccccaactacagcagcgagctgaacgtgaacgccctggaactggaagatagcgccctgtacctgtgtgccagctctctcggcggagatgaactgggagccgatggcaacgagcagttctttggccctggcaccagactgaccgtgctggaaggtaccggcggaggcggatctggcggcggaagcgaattcgacatccagatgacacagagccctagcagcctgtctgccagcgtgggagacagagtgaccatcacctgtagagccagccaggacgtgaacacagccgtggcttggtatcagcagaagcctggcaaggcccctaagctgctgatctacagcgcctacttcctgtacagcggcgtgcccagcagattcagcggaagcagaagcggcaccgacttcaccctgacaatatccagcctccagcctgaggacttcgccacctactactgccagcagtacagcagatacagccccgtgacctttggacagggcaccaaggtggaaatcaagagactcgaggacctgaagaacgtgttcccacctgaggtggccgtgttcgagcctagcgaggccgagatcagccacacccagaaagccaccctcgtgtgcctggctaccggcttctaccccgaccatgtggaactgtcttggtgggtcaacggcaaagaggtgcacagcggcgtgtgtaccgacccccagccactgaaagaacagcccgccctgaacgacagccggtactgcctgagcagcagactgagagtgtccgccaccttctggcagaacccccggaaccacttcagatgccaggtgcagttctacggcctgagcgagaacgacgagtggacccaggacagagccaagcccgtgacccagatcgtgtctgccgaagcctggggcagagccgattgcgacgtgaagctggtggaaaagagcttcgagacagacaccaacctgaacttccagaacctgagcgtgatcggcttcagaatcctgctgctgaaagtggccggctttaacctgctgatgaccctgcggctgtggtccagcagggccaagcgatctggatctggagcaacaaacttctcactactcaaacaagcaggtgacgtggaggagaatcccgggcctactagtgccaccatggactggatttggcgcatccttttccttgtcggcgctgctaccggcgcccattccgggcccgaagtgcagctggttgaatctggcggaggactggttcaggctggcggatctctgagactgtcttgtgccgccagcggcagaacctttagcatgggctggtttagacaggcccctggcaaagagagagagttcgtcgccgccatcacatactctggcggcagcccttactacgccgactctgtgaagggcagattcaccatcagccgggacaacgccaagaacaccgtgtacctccagatgaacagcctgaagcctgaggacaccgccgtgtactactgcgccgccaatccaacatacggcagcgactggaacgccgagaattggggccagggaacccaagtgacagtgtctagcggatccggcggcggaggatctggcggaggcggatctgggggcggaggctctttcgaagaagttcagctggttgaaagtggtggcggcctggttcaacctggcggatctctgagactgagctgtgccgccagcggcttcaatgtgtacgcctctggaatgcactgggtccgacaggcccctggcaaaggacttgagtgggtcgccaaaatctaccccgacagcgactacacctattacgccgacagcgtgaagggcagattcaccatcagcgccgacaccagcaagaacaccgcctacctccagatgaactccctgagagccgaggacaccgccgtgtactactgtagcagagacagcagcttctactacgtgtacgctatggactactggggccagggcacactggtcacagtctcttctacgcgtatccagaaccctgatcctgccgtgtaccagctgcgggatagcaagagcagcgacaagagcgtgtgtctgttcaccgacttcgacagccagaccaacgtgtcccagagcaaggactccgacgtgtacatcaccgataagtgcgtgctggacatgcggagcatggacttcaagagcaactccgccgtggcctggtccaacaagtccgatttcgcctgcgccaacgccttcaacaacagcattatccccgaggacacattcttcccaagccccgagagcagctgcggctttaccagcgagagctaccagcagggcgtgctgagcgccaccatcctgtacgagatcctgctgggcaaggccaccctgtacgccgtgctggtgtctgccctggtgctgatggctatggtcaagcggaaggacagccggggacgcgccaagagaagcggatctggcgtgaagcagaccctgaatttcgacctgctgaagctggctggcgacgtggaatccaacccaggcccttctagaggccatatgaccgagtacaagcccacggtgcgcctcgccacccgcgacgacgtccccagggccgtacgcaccctcgccgccgcgttcgccgactaccccgccacgcgccacaccgtcgatccggaccgccacatcgagcgggtcaccgagctgcaagaactcttcctcacgcgcgtcgggctcgacatcggcaaggtgtgggtcgcggacgacggcgccgcggtggcggtctggaccacgccggagagcgtcgaagcgggggcggtgttcgccgagatcggcccgcgcatggccgagttgagcggttcccggctggccgcgcagcaacagatggaaggcctcctggcgccgcaccggcccaaggagcccgcgtggttcctggccaccgtcggcgtctcgcccgaccaccagggcaagggtctgggcagcgccgtcgtgctccccggagtggaggcggccgagcgcgccggggtgcccgccttcctggagacctccgcgccccgcaacctccccttctacgagcggctcggcttcaccgtcaccgccgacgtcgaggtgcccgaaggaccgcgcacctggtgcatgacccgcaagcccggtgcctga

SEQ ID NO: 39435 - DNA, 2853 bp, synthetic construct
  source 1..2853: mol_type = other DNA
atggccttaccagtgaccgccttgctcctgccgctggccttgctgctccacgccgccaggccggacatccagatgacacagagccctagcagcctgtctgccagcgtgggagacagagtgaccatcacctgtagagccagccaggacgtgaacacagccgtggcttggtatcagcagaagcctggcaaggcccctaagctgctgatctacagcgcctacttcctgtacagcggcgtgcccagcagattcagcggaagcagaagcggcaccgacttcaccctgacaatatccagcctccagcctgaggacttcgccacctactactgccagcagtacagcagatacagccccgtgacctttggacagggcaccaaggtggaaatcaagagactcgaggacctgaagaacgtgttcccacctgaggtggccgtgttcgagcctagcgaggccgagatcagccacacccagaaagccaccctcgtgtgcctggctaccggcttctaccccgaccatgtggaactgtcttggtgggtcaacggcaaagaggtgcacagcggcgtgtgtaccgacccccagccactgaaagaacagcccgccctgaacgacagccggtactgcctgagcagcagactgagagtgtccgccaccttctggcagaacccccggaaccacttcagatgccaggtgcagttctacggcctgagcgagaacgacgagtggacccaggacagagccaagcccgtgacccagatcgtgtctgccgaagcctggggcagagccgattgcgacgtgaagctggtggaaaagagcttcgagacagacaccaacctgaacttccagaacctgagcgtgatcggcttcagaatcctgctgctgaaagtggccggctttaacctgctgatgaccctgcggctgtggtccagcagggccaagcgatctggatctggagcaacaaacttctcactactcaaacaagcaggtgacgtggaggagaatcccgggcctactagtgccaccatggactggatttggcgcatccttttccttgtcggcgctgctaccggcgcccattccgggcccatgggaagctggcttgagttctaccacagactcaacgccattgacagcaggctgtgggcacttggcggaagcgaagctgaactcgccgcttttgaaaaagaaattgccgctttcgagtccgagcttcaggcttacaaaggcaaagggaatcctgaggtcgagagcctgagagatcacgctgcccacattagagagtggttgcaggcataccggcacaatggatccggcggcggaggatctggcggaggcggatctgggggcggaggctctttcgaagaagttcagctggttgaaagtggtggcggcctggttcaacctggcggatctctgagactgagctgtgccgccagcggcttcaatgtgtacgcctctggaatgcactgggtccgacaggcccctggcaaaggacttgagtgggtcgccaaaatctaccccgacagcgactacacctattacgccgacagcgtgaagggcagattcaccatcagcgccgacaccagcaagaacaccgcctacctccagatgaactccctgagagccgaggacaccgccgtgtactactgtagcagagacagcagcttctactacgtgtacgctatggactactggggccagggcacactggtcacagtctcttctacgcgtatccagaaccctgatcctgccgtgtaccagctgcgggatagcaagagcagcgacaagagcgtgtgtctgttcaccgacttcgacagccagaccaacgtgtcccagagcaaggactccgacgtgtacatcaccgataagtgcgtgctggacatgcggagcatggacttcaagagcaactccgccgtggcctggtccaacaagtccgatttcgcctgcgccaacgccttcaacaacagcattatccccgaggacacattcttcccaagccccgagagcagctgcggctttaccagcgagagctaccagcagggcgtgctgagcgccaccatcctgtacgagatcctgctgggcaaggccaccctgtacgccgtgctggtgtctgccctggtgctgatggctatggtcaagcggaaggacagccggggacgcgccaagagaagcggatctggcgtgaagcagaccctgaatttcgacctgctgaagctggctggcgacgtggaatccaacccaggcccttctagaggccatatgaccgagtacaagcccacggtgcgcctcgccacccgcgacgacgtccccagggccgtacgcaccctcgccgccgcgttcgccgactaccccgccacgcgccacaccgtcgatccggaccgccacatcgagcgggtcaccgagctgcaagaactcttcctcacgcgcgtcgggctcgacatcggcaaggtgtgggtcgcggacgacggcgccgcggtggcggtctggaccacgccggagagcgtcgaagcgggggcggtgttcgccgagatcggcccgcgcatggccgagttgagcggttcccggctggccgcgcagcaacagatggaaggcctcctggcgccgcaccggcccaaggagcccgcgtggttcctggccaccgtcggcgtctcgcccgaccaccagggcaagggtctgggcagcgccgtcgtgctccccggagtggaggcggccgagcgcgccggggtgcccgccttcctggagacctccgcgccccgcaacctccccttctacgagcggctcggcttcaccgtcaccgccgacgtcgaggtgcccgaaggaccgcgcacctggtgcatgacccgcaagcccggtgcctga

SEQ ID NO: 39436 - DNA, 2853 bp, synthetic construct
  source 1..2853: mol_type = other DNA
atggccttaccagtgaccgccttgctcctgccgctggccttgctgctccacgccgccaggccggcatgcatgggcagttggttcgagttctacgaccggctgaatgccatcgacgccagactgtgggctctcggaggatctgaagctgagctggccgccttcgagaaagagatcgccgcctttgagagcgagctgcaagcctacaaaggcaagggcaaccccgaggtggaaaacctgagagtgcacgccgctgccatcagagaatggctccaggcttacagacacaacggtaccggcggaggcggatctggcggcggaggtagcggtggcggaggatctgaattcgacatccagatgacacagagccctagcagcctgtctgccagcgtgggagacagagtgaccatcacctgtagagccagccaggacgtgaacacagccgtggcttggtatcagcagaagcctggcaaggcccctaagctgctgatctacagcgcctacttcctgtacagcggcgtgcccagcagattcagcggaagcagaagcggcaccgacttcaccctgacaatatccagcctccagcctgaggacttcgccacctactactgccagcagtacagcagatacagccccgtgacctttggacagggcaccaaggtggaaatcaagagactcgaggacctgaagaacgtgttcccacctgaggtggccgtgttcgagcctagcgaggccgagatcagccacacccagaaagccaccctcgtgtgcctggctaccggcttctaccccgaccatgtggaactgtcttggtgggtcaacggcaaagaggtgcacagcggcgtgtgtaccgacccccagccactgaaagaacagcccgccctgaacgacagccggtactgcctgagcagcagactgagagtgtccgccaccttctggcagaacccccggaaccacttcagatgccaggtgcagttctacggcctgagcgagaacgacgagtggacccaggacagagccaagcccgtgacccagatcgtgtctgccgaagcctggggcagagccgattgcgacgtgaagctggtggaaaagagcttcgagacagacaccaacctgaacttccagaacctgagcgtgatcggcttcagaatcctgctgctgaaagtggccggctttaacctgctgatgaccctgcggctgtggtccagcagggccaagcgatctggatctggagcaacaaacttctcactactcaaacaagcaggtgacgtggaggagaatcccgggcctactagtatggactggatttggcgcatccttttccttgtcggcgctgctaccggcgcgcattccttcgaagaagttcagctggttgaaagtggtggcggcctggttcaacctggcggatctctgagactgagctgtgccgccagcggcttcaatgtgtacgcctctggaatgcactgggtccgacaggcccctggcaaaggacttgagtgggtcgccaaaatctaccccgacagcgactacacctattacgccgacagcgtgaagggcagattcaccatcagcgccgacaccagcaagaacaccgcctacctccagatgaactccctgagagccgaggacaccgccgtgtactactgtagcagagacagcagcttctactacgtgtacgctatggactactggggccagggcacactggtcacagtctcttctacgcgtatccagaaccctgatcctgccgtgtaccagctgcgggatagcaagagcagcgacaagagcgtgtgtctgttcaccgacttcgacagccagaccaacgtgtcccagagcaaggactccgacgtgtacatcaccgataagtgcgtgctggacatgcggagcatggacttcaagagcaactccgccgtggcctggtccaacaagtccgatttcgcctgcgccaacgccttcaacaacagcattatccccgaggacacattcttcccaagccccgagagcagctgcggctttaccagcgagagctaccagcagggcgtgctgagcgccaccatcctgtacgagatcctgctgggcaaggccaccctgtacgccgtgctggtgtctgccctggtgctgatggctatggtcaagcggaaggacagccggggacgcgccaagagaagcggatctggcgtgaagcagaccctgaatttcgacctgctgaagctggctggcgacgtggaatccaacccaggcccttctagaggccatatgaccgagtacaagcccacggtgcgcctcgccacccgcgacgacgtccccagggccgtacgcaccctcgccgccgcgttcgccgactaccccgccacgcgccacaccgtcgatccggaccgccacatcgagcgggtcaccgagctgcaagaactcttcctcacgcgcgtcgggctcgacatcggcaaggtgtgggtcgcggacgacggcgccgcggtggcggtctggaccacgccggagagcgtcgaagcgggggcggtgttcgccgagatcggcccgcgcatggccgagttgagcggttcccggctggccgcgcagcaacagatggaaggcctcctggcgccgcaccggcccaaggagcccgcgtggttcctggccaccgtcggcgtctcgcccgaccaccagggcaagggtctgggcagcgccgtcgtgctccccggagtggaggcggccgagcgcgccggggtgcccgccttcctggagacctccgcgccccgcaacctccccttctacgagcggctcggcttcaccgtcaccgccgacgtcgaggtgcccgaaggaccgcgcacctggtgcatgacccgcaagcccggtgcctga

SEQ ID NO: 39437 - DNA, 3204 bp, synthetic construct
  source 1..3204: mol_type = other DNA
atggccttaccagtgaccgccttgctcctgccgctggccttgctgctccacgccgccaggccggcatgcatggaccccgacctggaaatcagagccgccttcctgcggcagagaaacacagccctgagaacagaggtggccgagctggaacaagaggtgcagcggctggaaaacgaggtgtcccagtacgagacaagatacggccctctcggaggcggaaaaggtaccggcggaggcggatctggcggcggaggtagcggtggcggaggatctgaattcgacatccagatgacacagagccctagcagcctgtctgccagcgtgggagacagagtgaccatcacctgtagagccagccaggacgtgaacacagccgtggcttggtatcagcagaagcctggcaaggcccctaagctgctgatctacagcgcctacttcctgtacagcggcgtgcccagcagattcagcggaagcagaagcggcaccgacttcaccctgacaatatccagcctccagcctgaggacttcgccacctactactgccagcagtacagcagatacagccccgtgacctttggacagggcaccaaggtggaaatcaagagactcgaggacctgaagaacgtgttcccacctgaggtggccgtgttcgagcctagcgaggccgagatcagccacacccagaaagccaccctcgtgtgcctggctaccggcttctaccccgaccatgtggaactgtcttggtgggtcaacggcaaagaggtgcacagcggcgtgtgtaccgacccccagccactgaaagaacagcccgccctgaacgacagccggtactgcctgagcagcagactgagagtgtccgccaccttctggcagaacccccggaaccacttcagatgccaggtgcagttctacggcctgagcgagaacgacgagtggacccaggacagagccaagcccgtgacccagatcgtgtctgccgaagcctggggcagagccgattgcgacgtgaagctggtggaaaagagcttcgagacagacaccaacctgaacttccagaacctgagcgtgatcggcttcagaatcctgctgctgaaagtggccggctttaacctgctgatgaccctgcggctgtggtccagcagggccaagcgatctggatctggagcaacaaacttctcactactcaaacaagcaggtgacgtggaggagaatcccgggcctactagtgccaccatggactggatttggcgcatccttttccttgtcggcgctgctaccggcgcccattccgggcccgaagtgcagctggttgaatctggcggaggactggttcaggctggcggatctctgagactgtcttgtgccgccagcggcagaacctttagcatgggctggtttagacaggcccctggcaaagagagagagttcgtcgccgccatcacatactctggcggcagcccttactacgccgactctgtgaagggcagattcaccatcagccgggacaacgccaagaacaccgtgtacctccagatgaacagcctgaagcctgaggacaccgccgtgtactactgcgccgccaatccaacatacggcagcgactggaacgccgagaattggggccagggaacccaagtgacagtgtctagcggatccggcggcggaggatctggcggaggcggatctgggggcggaggctctttcgaagaagttcagctggttgaaagtggtggcggcctggttcaacctggcggatctctgagactgagctgtgccgccagcggcttcaatgtgtacgcctctggaatgcactgggtccgacaggcccctggcaaaggacttgagtgggtcgccaaaatctaccccgacagcgactacacctattacgccgacagcgtgaagggcagattcaccatcagcgccgacaccagcaagaacaccgcctacctccagatgaactccctgagagccgaggacaccgccgtgtactactgtagcagagacagcagcttctactacgtgtacgctatggactactggggccagggcacactggtcacagtctcttctacgcgtatccagaaccctgatcctgccgtgtaccagctgcgggatagcaagagcagcgacaagagcgtgtgtctgttcaccgacttcgacagccagaccaacgtgtcccagagcaaggactccgacgtgtacatcaccgataagtgcgtgctggacatgcggagcatggacttcaagagcaactccgccgtggcctggtccaacaagtccgatttcgcctgcgccaacgccttcaacaacagcattatccccgaggacacattcttcccaagccccgagagcagctgcggctttaccagcgagagctaccagcagggcgtgctgagcgccaccatcctgtacgagatcctgctgggcaaggccaccctgtacgccgtgctggtgtctgccctggtgctgatggctatggtcaagcggaaggacagccggggacgcgccaagagaagcggatctggcgtgaagcagaccctgaatttcgacctgctgaagctggctggcgacgtggaatccaacccaggcccttctagaggccatatgaccgagtacaagcccacggtgcgcctcgccacccgcgacgacgtccccagggccgtacgcaccctcgccgccgcgttcgccgactaccccgccacgcgccacaccgtcgatccggaccgccacatcgagcgggtcaccgagctgcaagaactcttcctcacgcgcgtcgggctcgacatcggcaaggtgtgggtcgcggacgacggcgccgcggtggcggtctggaccacgccggagagcgtcgaagcgggggcggtgttcgccgagatcggcccgcgcatggccgagttgagcggttcccggctggccgcgcagcaacagatggaaggcctcctggcgccgcaccggcccaaggagcccgcgtggttcctggccaccgtcggcgtctcgcccgaccaccagggcaagggtctgggcagcgccgtcgtgctccccggagtggaggcggccgagcgcgccggggtgcccgccttcctggagacctccgcgccccgcaacctccccttctacgagcggctcggcttcaccgtcaccgccgacgtcgaggtgcccgaaggaccgcgcacctggtgcatgacccgcaagcccggtgcctga

SEQ ID NO: 39438 - DNA, 2853 bp, synthetic construct
  source 1..2853: mol_type = other DNA
atggccttaccagtgaccgccttgctcctgccgctggccttgctgctccacgccgccaggccggacatccagatgacacagagccctagcagcctgtctgccagcgtgggagacagagtgaccatcacctgtagagccagccaggacgtgaacacagccgtggcttggtatcagcagaagcctggcaaggcccctaagctgctgatctacagcgcctacttcctgtacagcggcgtgcccagcagattcagcggaagcagaagcggcaccgacttcaccctgacaatatccagcctccagcctgaggacttcgccacctactactgccagcagtacagcagatacagccccgtgacctttggacagggcaccaaggtggaaatcaagagactcgaggacctgaagaacgtgttcccacctgaggtggccgtgttcgagcctagcgaggccgagatcagccacacccagaaagccaccctcgtgtgcctggctaccggcttctaccccgaccatgtggaactgtcttggtgggtcaacggcaaagaggtgcacagcggcgtgtgtaccgacccccagccactgaaagaacagcccgccctgaacgacagccggtactgcctgagcagcagactgagagtgtccgccaccttctggcagaacccccggaaccacttcagatgccaggtgcagttctacggcctgagcgagaacgacgagtggacccaggacagagccaagcccgtgacccagatcgtgtctgccgaagcctggggcagagccgattgcgacgtgaagctggtggaaaagagcttcgagacagacaccaacctgaacttccagaacctgagcgtgatcggcttcagaatcctgctgctgaaagtggccggctttaacctgctgatgaccctgcggctgtggtccagcagggccaagcgatctggatctggagcaacaaacttctcactactcaaacaagcaggtgacgtggaggagaatcccgggcctactagtgccaccatggactggatttggcgcatccttttccttgtcggcgctgctaccggcgcccattccgggcccatgggatcttggagcgagttttacgatcggctgcacgccattcaccaccggctgtatgctctcggaggaagcgaagctgagctggccgcttttgaaaaagaaattgccgctttcgagtccgagcttcaggcttacaaaggcaaagggaatcctgaggtcgaggccctgagagataccgccgccttcatcagaacccggttgcaggcataccggcacaacggatccggcggcggaggatctggcggaggcggatctgggggcggaggctctttcgaagaagttcagctggttgaaagtggtggcggcctggttcaacctggcggatctctgagactgagctgtgccgccagcggcttcaatgtgtacgcctctggaatgcactgggtccgacaggcccctggcaaaggacttgagtgggtcgccaaaatctaccccgacagcgactacacctattacgccgacagcgtgaagggcagattcaccatcagcgccgacaccagcaagaacaccgcctacctccagatgaactccctgagagccgaggacaccgccgtgtactactgtagcagagacagcagcttctactacgtgtacgctatggactactggggccagggcacactggtcacagtctcttctacgcgtatccagaaccctgatcctgccgtgtaccagctgcgggatagcaagagcagcgacaagagcgtgtgtctgttcaccgacttcgacagccagaccaacgtgtcccagagcaaggactccgacgtgtacatcaccgataagtgcgtgctggacatgcggagcatggacttcaagagcaactccgccgtggcctggtccaacaagtccgatttcgcctgcgccaacgccttcaacaacagcattatccccgaggacacattcttcccaagccccgagagcagctgcggctttaccagcgagagctaccagcagggcgtgctgagcgccaccatcctgtacgagatcctgctgggcaaggccaccctgtacgccgtgctggtgtctgccctggtgctgatggctatggtcaagcggaaggacagccggggacgcgccaagagaagcggatctggcgtgaagcagaccctgaatttcgacctgctgaagctggctggcgacgtggaatccaacccaggcccttctagaggccatatgaccgagtacaagcccacggtgcgcctcgccacccgcgacgacgtccccagggccgtacgcaccctcgccgccgcgttcgccgactaccccgccacgcgccacaccgtcgatccggaccgccacatcgagcgggtcaccgagctgcaagaactcttcctcacgcgcgtcgggctcgacatcggcaaggtgtgggtcgcggacgacggcgccgcggtggcggtctggaccacgccggagagcgtcgaagcgggggcggtgttcgccgagatcggcccgcgcatggccgagttgagcggttcccggctggccgcgcagcaacagatggaaggcctcctggcgccgcaccggcccaaggagcccgcgtggttcctggccaccgtcggcgtctcgcccgaccaccagggcaagggtctgggcagcgccgtcgtgctccccggagtggaggcggccgagcgcgccggggtgcccgccttcctggagacctccgcgccccgcaacctccccttctacgagcggctcggcttcaccgtcaccgccgacgtcgaggtgcccgaaggaccgcgcacctggtgcatgacccgcaagcccggtgcctga

SEQ ID NO: 39439 - DNA, 3483 bp, synthetic construct
  source 1..3483: mol_type = other DNA
atggccttaccagtgaccgccttgctcctgccgctggccttgctgctccacgccgccaggccggacatccagatgacacagagccctagcagcctgtctgccagcgtgggagacagagtgaccatcacctgtagagccagccaggacgtgaacacagccgtggcttggtatcagcagaagcctggcaaggcccctaagctgctgatctacagcgcctacttcctgtacagcggcgtgcccagcagattcagcggaagcagaagcggcaccgacttcaccctgacaatatccagcctccagcctgaggacttcgccacctactactgccagcagtacagcagatacagccccgtgacctttggacagggcaccaaggtggaaatcaagagactcgaggacctgaagaacgtgttcccacctgaggtggccgtgttcgagcctagcgaggccgagatcagccacacccagaaagccaccctcgtgtgcctggctaccggcttctaccccgaccatgtggaactgtcttggtgggtcaacggcaaagaggtgcacagcggcgtgtgtaccgacccccagccactgaaagaacagcccgccctgaacgacagccggtactgcctgagcagcagactgagagtgtccgccaccttctggcagaacccccggaaccacttcagatgccaggtgcagttctacggcctgagcgagaacgacgagtggacccaggacagagccaagcccgtgacccagatcgtgtctgccgaagcctggggcagagccgattgcgacgtgaagctggtggaaaagagcttcgagacagacaccaacctgaacttccagaacctgagcgtgatcggcttcagaatcctgctgctgaaagtggccggctttaacctgctgatgaccctgcggctgtggtccagcagggccaagcgatctggatctggagcaacaaacttctcactactcaaacaagcaggtgacgtggaggagaatcccgggcctactagtaccatggactggatttggcgcatccttttccttgtcggcgctgctaccggcgcccattccctgttcaatcaagaggtgcagatccctctgaccgagagctactgtggcccctgtcctaagaactggatctgctacaagaacaactgctaccagttcttcgacgagagcaagaattggtacgagagccaggccagctgcatgagccagaatgccagcctgctgaaggtgtacagcaaagaggaccaggacctgctgaaactggtcaagagcgcccactggatgggccttgtgcacatccccaccaatggctcttggcagtgggaggacggcagcattctgagccctaacctgctgaccatcatcgagatgcagaagggcgactgcgccctgtacgccagcagctttaagggctacatcgagaattgcagcaccccgaacacctacatctgtatgcagagaaccgtttctggcggaggcggctctggaggaggcggaagtggcggcggaggcgacctctttaatcaagaagtccagattccactcaccgaatcctactgcggaccttgtccaaaaaattggatttgttataagaacaactgttatcaattctttgatgagtctaaaaattggtatgagtcccaggcttcctgcatgtctcagaacgcttctctgctgaaagtctactctaaagaagatcaggatctcctgaagctcgtcaagtctgcccattggatggggctcgtccacattcctaccaacggaagctggcaatgggaagatggctccatcctgtctccaaatctgctcacgattattgaaatgcagaaaggggattgtgctctctacgccagctccttcaagggatatattgagaactgtagcacgcccaatacttatatctgtatgcaacggaccgtgggatccggcggcggaggatctggcggaggcggatctgggggcggaggctctttcgaagaagttcagctggttgaaagtggtggcggcctggttcaacctggcggatctctgagactgagctgtgccgccagcggcttcaatgtgtacgcctctggaatgcactgggtccgacaggcccctggcaaaggacttgagtgggtcgccaaaatctaccccgacagcgactacacctattacgccgacagcgtgaagggcagattcaccatcagcgccgacaccagcaagaacaccgcctacctccagatgaactccctgagagccgaggacaccgccgtgtactactgtagcagagacagcagcttctactacgtgtacgctatggactactggggccagggcacactggtcacagtctcttctacgcgtatccagaaccctgatcctgccgtgtaccagctgcgggatagcaagagcagcgacaagagcgtgtgtctgttcaccgacttcgacagccagaccaacgtgtcccagagcaaggactccgacgtgtacatcaccgataagtgcgtgctggacatgcggagcatggacttcaagagcaactccgccgtggcctggtccaacaagtccgatttcgcctgcgccaacgccttcaacaacagcattatccccgaggacacattcttcccaagccccgagagcagctgcggctttaccagcgagagctaccagcagggcgtgctgagcgccaccatcctgtacgagatcctgctgggcaaggccaccctgtacgccgtgctggtgtctgccctggtgctgatggctatggtcaagcggaaggacagccggggacgcgccaagagaagcggatctggcgtgaagcagaccctgaatttcgacctgctgaagctggctggcgacgtggaatccaacccaggcccttctagaggccatatgaccgagtacaagcccacggtgcgcctcgccacccgcgacgacgtccccagggccgtacgcaccctcgccgccgcgttcgccgactaccccgccacgcgccacaccgtcgatccggaccgccacatcgagcgggtcaccgagctgcaagaactcttcctcacgcgcgtcgggctcgacatcggcaaggtgtgggtcgcggacgacggcgccgcggtggcggtctggaccacgccggagagcgtcgaagcgggggcggtgttcgccgagatcggcccgcgcatggccgagttgagcggttcccggctggccgcgcagcaacagatggaaggcctcctggcgccgcaccggcccaaggagcccgcgtggttcctggccaccgtcggcgtctcgcccgaccaccagggcaagggtctgggcagcgccgtcgtgctccccggagtggaggcggccgagcgcgccggggtgcccgccttcctggagacctccgcgccccgcaacctccccttctacgagcggctcggcttcaccgtcaccgccgacgtcgaggtgcccgaaggaccgcgcacctggtgcatgacccgcaagcccggtgcctga

SEQ ID NO: 39440 - DNA, 1869 bp, synthetic construct
  source 1..1869: mol_type = other DNA
atggccttaccagtgaccgccttgctcctgccgctggccttgctgctccacgccgccaggccggacatccagatgacacagagccctagcagcctgtctgccagcgtgggagacagagtgaccatcacctgtagagccagccaggacgtgaacacagccgtggcttggtatcagcagaagcctggcaaggcccctaagctgctgatctacagcgcctacttcctgtacagcggcgtgcccagcagattcagcggaagcagaagcggcaccgacttcaccctgacaatatccagcctccagcctgaggacttcgccacctactactgccagcagtacagcagatacagccccgtgacctttggacagggcaccaaggtggaaatcaagagactcgaggacctgaagaacgtgttcccacctgaggtggccgtgttcgagcctagcgaggccgagatcagccacacccagaaagccaccctcgtgtgcctggctaccggcttctaccccgaccatgtggaactgtcttggtgggtcaacggcaaagaggtgcacagcggcgtgtgtaccgacccccagccactgaaagaacagcccgccctgaacgacagccggtactgcctgagcagcagactgagagtgtccgccaccttctggcagaacccccggaaccacttcagatgccaggtgcagttctacggcctgagcgagaacgacgagtggacccaggacagagccaagcccgtgacccagatcgtgtctgccgaagcctggggcagagccgattgcggctttaccagcgagagctaccagcagggcgtgctgagcgccaccaacctgagcgtgatcggcttcagaatcctgctgctgaaagtggccggctttaacctgctgatgaccctgcggctgtggtccagcagggccaagcgatctggatctggagcaacaaacttctcactactcaaacaagcaggtgacgtggaggagaatcccgggcctactagtatggactggatttggcgcatccttttccttgtcggcgctgctaccggcgcgcattccttcgaagaagttcagctggttgaaagtggtggcggcctggttcaacctggcggatctctgagactgagctgtgccgccagcggcttcaatgtgtacgcctctggaatgcactgggtccgacaggcccctggcaaaggacttgagtgggtcgccaaaatctaccccgacagcgactacacctattacgccgacagcgtgaagggcagattcaccatcagcgccgacaccagcaagaacaccgcctacctccagatgaactccctgagagccgaggacaccgccgtgtactactgtagcagagacagcagcttctactacgtgtacgctatggactactggggccagggcacactggtcacagtctcttctacgcgtatccagaaccctgatcctgccgtgtaccagctgcgggatagcaagagcagcgacaagagcgtgtgtctgttcaccgacttcgacagccagaccaacgtgtcccagagcaaggactccgacgtgtacatcaccgataagtgcgtgctggacatgcggagcatggacttcaagagcaactccgccgtggcctggtccaacaagtccgatttcgcctgcgccaacgccttcaacaacagcattatccccgaggacacattcttcccaagccccgagagcagctgcgacgtgaagctggtggaaaagagcttcgagacagacaccaacctgaacttccagatcctgtacgagatcctgctgggcaaggccaccctgtacgccgtgctggtgtctgccctggtgctgatggctatggtcaagcggaaggacagccgggga

SEQ ID NO: 39441 - DNA, 1881 bp, synthetic construct
  source 1..1881: mol_type = other DNA
atggccttaccagtgaccgccttgctcctgccgctggccttgctgctccacgccgccaggccggacatccagatgacacagagccctagcagcctgtctgccagcgtgggagacagagtgaccatcacctgtagagccagccaggacgtgaacacagccgtggcttggtatcagcagaagcctggcaaggcccctaagctgctgatctacagcgcctacttcctgtacagcggcgtgcccagcagattcagcggaagcagaagcggcaccgacttcaccctgacaatatccagcctccagcctgaggacttcgccacctactactgccagcagtacagcagatacagccccgtgacctttggacagggcaccaaggtggaaatcaagagactcgagatccagaaccctgatcctgccgtgtaccagctgcgggatagcaagagcagcgacaagagcgtgtgtctgttcaccgacttcgacagccagaccaacgtgtcccagagcaaggactccgacgtgtacatcaccgataagtgcgtgctggacatgcggagcatggacttcaagagcaactccgccgtggcctggtccaacaagtccgatttcgcctgcgccaacgccttcaacaacagcattatccccgaggacacattcttcccaagccccgagagcagctgcgacgtgaagctggtggaaaagagcttcgagacagacaccaacctgaacttccagatcctgtacgagatcctgctgggcaaggccaccctgtacgccgtgctggtgtctgccctggtgctgatggctatggtcaagcggaaggacagccggggacgcgccaagagaagcggatctggcgtgaagcagaccctgaatttcgacctgctgaagctggctggcgacgtggaatccaacccaggccctactagtatggactggatttggcgcatccttttccttgtcggcgctgctaccggcgcgcattccttcgaagaagttcagctggttgaaagtggtggcggcctggttcaacctggcggatctctgagactgagctgtgccgccagcggcttcaatgtgtacgcctctggaatgcactgggtccgacaggcccctggcaaaggacttgagtgggtcgccaaaatctaccccgacagcgactacacctattacgccgacagcgtgaagggcagattcaccatcagcgccgacaccagcaagaacaccgcctacctccagatgaactccctgagagccgaggacaccgccgtgtactactgtagcagagacagcagcttctactacgtgtacgctatggactactggggccagggcacactggtcacagtctcttctacgcgtgaggacctgaagaacgtgttcccacctgaggtggccgtgttcgagcctagcgaggccgagatcagccacacccagaaagccaccctcgtgtgcctggctaccggcttctaccccgaccatgtggaactgtcttggtgggtcaacggcaaagaggtgcacagcggcgtgtgtaccgacccccagccactgaaagaacagcccgccctgaacgacagccggtactgcctgagcagcagactgagagtgtccgccaccttctggcagaacccccggaaccacttcagatgccaggtgcagttctacggcctgagcgagaacgacgagtggacccaggacagagccaagcccgtgacccagatcgtgtctgccgaagcctggggcagagccgattgcggctttaccagcgagagctaccagcagggcgtgctgagcgccaccaacctgagcgtgatcggcttcagaatcctgctgctgaaagtggccggctttaacctgctgatgaccctgcggctgtggtccagc

SEQ ID NO: 39442 - DNA, 2274 bp, synthetic construct
  source 1..2274: mol_type = other DNA
atggccttaccagtgaccgccttgctcctgccgctggccttgctgctccacgccgccaggccggaagtgcagctggttgaatctggcggaggactggttcagcctggcggatctctgagactgtcttgtgccgccagcggcttcagcttcagcgacttttggatgagctgggtccgacaggcccctggcaaaggacttgaatgggtcgccacaatcagccaggccggcagcgagaaggactacgtggactctgtgaagggcagattcaccatcagccgggacaacgccaagaagtccctgtacctccagatgaacagcctgagagccgaggacaccgccgtgtactattgtgcctctggcgtgtacagcttcgactacagaggccagggcaccctggtcacagtctcttctggtaccggcggaggcggatctggcggcggaggtagcggtggcggaggatctgaattcgacatccagatgacacagagccctagcagcctgtctgccagcgtgggagacagagtgaccatcacctgtagagccagccaggacgtgaacacagccgtggcttggtatcagcagaagcctggcaaggcccctaagctgctgatctacagcgcctacttcctgtacagcggcgtgcccagcagattcagcggaagcagaagcggcaccgacttcaccctgacaatatccagcctccagcctgaggacttcgccacctactactgccagcagtacagcagatacagccccgtgacctttggacagggcaccaaggtggaaatcaagagactcgaggacctgaagaacgtgttcccacctgaggtggccgtgttcgagcctagcgaggccgagatcagccacacccagaaagccaccctcgtgtgcctggctaccggcttctaccccgaccatgtggaactgtcttggtgggtcaacggcaaagaggtgcacagcggcgtgtgtaccgacccccagccactgaaagaacagcccgccctgaacgacagccggtactgcctgagcagcagactgagagtgtccgccaccttctggcagaacccccggaaccacttcagatgccaggtgcagttctacggcctgagcgagaacgacgagtggacccaggacagagccaagcccgtgacccagatcgtgtctgccgaagcctggggcagagccgattgcggctttaccagcgagagctaccagcagggcgtgctgagcgccaccaacctgagcgtgatcggcttcagaatcctgctgctgaaagtggccggctttaacctgctgatgaccctgcggctgtggtccagcagggccaagcgatctggatctggagcaacaaacttctcactactcaaacaagcaggtgacgtggaggagaatcccgggcctactagtatggactggatttggcgcatccttttccttgtcggcgctgctaccggcgcgcattccttcgaagaagttcagctggttgaaagtggtggcggcctggttcaacctggcggatctctgagactgagctgtgccgccagcggcttcaatgtgtacgcctctggaatgcactgggtccgacaggcccctggcaaaggacttgagtgggtcgccaaaatctaccccgacagcgactacacctattacgccgacagcgtgaagggcagattcaccatcagcgccgacaccagcaagaacaccgcctacctccagatgaactccctgagagccgaggacaccgccgtgtactactgtagcagagacagcagcttctactacgtgtacgctatggactactggggccagggcacactggtcacagtctcttctacgcgtatccagaaccctgatcctgccgtgtaccagctgcgggatagcaagagcagcgacaagagcgtgtgtctgttcaccgacttcgacagccagaccaacgtgtcccagagcaaggactccgacgtgtacatcaccgataagtgcgtgctggacatgcggagcatggacttcaagagcaactccgccgtggcctggtccaacaagtccgatttcgcctgcgccaacgccttcaacaacagcattatccccgaggacacattcttcccaagccccgagagcagctgcgacgtgaagctggtggaaaagagcttcgagacagacaccaacctgaacttccagatcctgtacgagatcctgctgggcaaggccaccctgtacgccgtgctggtgtctgccctggtgctgatggctatggtcaagcggaaggacagccgggga

SEQ ID NO: 39443 - DNA, 2286 bp, synthetic construct
  source 1..2286: mol_type = other DNA
atggccttaccagtgaccgccttgctcctgccgctggccttgctgctccacgccgccaggccggaagtgcagctggttgaatctggcggaggactggttcagcctggcggatctctgagactgtcttgtgccgccagcggcttcagcttcagcgacttttggatgagctgggtccgacaggcccctggcaaaggacttgaatgggtcgccacaatcagccaggccggcagcgagaaggactacgtggactctgtgaagggcagattcaccatcagccgggacaacgccaagaagtccctgtacctccagatgaacagcctgagagccgaggacaccgccgtgtactattgtgcctctggcgtgtacagcttcgactacagaggccagggcaccctggtcacagtctcttctggtaccggcggaggcggatctggcggcggaggtagcggtggcggaggatctgaattcgacatccagatgacacagagccctagcagcctgtctgccagcgtgggagacagagtgaccatcacctgtagagccagccaggacgtgaacacagccgtggcttggtatcagcagaagcctggcaaggcccctaagctgctgatctacagcgcctacttcctgtacagcggcgtgcccagcagattcagcggaagcagaagcggcaccgacttcaccctgacaatatccagcctccagcctgaggacttcgccacctactactgccagcagtacagcagatacagccccgtgacctttggacagggcaccaaggtggaaatcaagagactcgagatccagaaccctgatcctgccgtgtaccagctgcgggatagcaagagcagcgacaagagcgtgtgtctgttcaccgacttcgacagccagaccaacgtgtcccagagcaaggactccgacgtgtacatcaccgataagtgcgtgctggacatgcggagcatggacttcaagagcaactccgccgtggcctggtccaacaagtccgatttcgcctgcgccaacgccttcaacaacagcattatccccgaggacacattcttcccaagccccgagagcagctgcgacgtgaagctggtggaaaagagcttcgagacagacaccaacctgaacttccagatcctgtacgagatcctgctgggcaaggccaccctgtacgccgtgctggtgtctgccctggtgctgatggctatggtcaagcggaaggacagccggggacgcgccaagagaagcggatctggcgtgaagcagaccctgaatttcgacctgctgaagctggctggcgacgtggaatccaacccaggccctactagtatggactggatttggcgcatccttttccttgtcggcgctgctaccggcgcgcattccttcgaagaagttcagctggttgaaagtggtggcggcctggttcaacctggcggatctctgagactgagctgtgccgccagcggcttcaatgtgtacgcctctggaatgcactgggtccgacaggcccctggcaaaggacttgagtgggtcgccaaaatctaccccgacagcgactacacctattacgccgacagcgtgaagggcagattcaccatcagcgccgacaccagcaagaacaccgcctacctccagatgaactccctgagagccgaggacaccgccgtgtactactgtagcagagacagcagcttctactacgtgtacgctatggactactggggccagggcacactggtcacagtctcttctacgcgtgaggacctgaagaacgtgttcccacctgaggtggccgtgttcgagcctagcgaggccgagatcagccacacccagaaagccaccctcgtgtgcctggctaccggcttctaccccgaccatgtggaactgtcttggtgggtcaacggcaaagaggtgcacagcggcgtgtgtaccgacccccagccactgaaagaacagcccgccctgaacgacagccggtactgcctgagcagcagactgagagtgtccgccaccttctggcagaacccccggaaccacttcagatgccaggtgcagttctacggcctgagcgagaacgacgagtggacccaggacagagccaagcccgtgacccagatcgtgtctgccgaagcctggggcagagccgattgcggctttaccagcgagagctaccagcagggcgtgctgagcgccaccaacctgagcgtgatcggcttcagaatcctgctgctgaaagtggccggctttaacctgctgatgaccctgcggctgtggtccagc

SEQ ID NO: 39444 - DNA, 2685 bp, synthetic construct
  source 1..2685: mol_type = other DNA
atggccttaccagtgaccgccttgctcctgccgctggccttgctgctccacgccgccaggccggaagtgcagctggttgaatctggcggaggactggttcagcctggcggatctctgagactgtcttgtgccgccagcggcttcagcttcagcgacttttggatgagctgggtccgacaggcccctggcaaaggacttgaatgggtcgccacaatcagccaggccggcagcgagaaggactacgtggactctgtgaagggcagattcaccatcagccgggacaacgccaagaagtccctgtacctccagatgaacagcctgagagccgaggacaccgccgtgtactattgtgcctctggcgtgtacagcttcgactacagaggccagggcaccctggtcacagtctcttctggtaccggcggaggcggatctggcggcggaggtagcggtggcggaggatctgaattcgacatccagatgacacagagccctagcagcctgtctgccagcgtgggagacagagtgaccatcacctgtagagccagccaggacgtgaacacagccgtggcttggtatcagcagaagcctggcaaggcccctaagctgctgatctacagcgcctacttcctgtacagcggcgtgcccagcagattcagcggaagcagaagcggcaccgacttcaccctgacaatatccagcctccagcctgaggacttcgccacctactactgccagcagtacagcagatacagccccgtgacctttggacagggcaccaaggtggaaatcaagagactcgaggacctgaagaacgtgttcccacctgaggtggccgtgttcgagcctagcgaggccgagatcagccacacccagaaagccaccctcgtgtgcctggctaccggcttctaccccgaccatgtggaactgtcttggtgggtcaacggcaaagaggtgcacagcggcgtgtgtaccgacccccagccactgaaagaacagcccgccctgaacgacagccggtactgcctgagcagcagactgagagtgtccgccaccttctggcagaacccccggaaccacttcagatgccaggtgcagttctacggcctgagcgagaacgacgagtggacccaggacagagccaagcccgtgacccagatcgtgtctgccgaagcctggggcagagccgattgcggctttaccagcgagagctaccagcagggcgtgctgagcgccaccaacctgagcgtgatcggcttcagaatcctgctgctgaaagtggccggctttaacctgctgatgaccctgcggctgtggtccagcagggccaagcgatctggatctggagcaacaaacttctcactactcaaacaagcaggtgacgtggaggagaatcccgggcctactagtatggactggatttggcgcatccttttccttgtcggcgctgctaccggcgcgcattccgggccccagctccagctgcaagagtctggacctggcctggtcaagcctagcgagacactgagcctgacctgtaccgtgtccggcgatagcatcagcagcggcgattactactggggctggatcagacagcctcctggcaaaggactggaatggatcggccacatctactacagcggcgtgacctactacaaccccagcctgaagtccagagtgaccatcagcgtggacaccagccggaaccagttctccctgaagctgtctagcgtgacagccgccgataccgccgtgtactactgcaccagagaggacagcagcaactggcggagtagaggccagggaacactggtcacagttagctctggatccggcggaggcggaagtggaggcggaggatctggcggcggaggctctttcgaagaagttcagctggttgaaagtggtggcggcctggttcaacctggcggatctctgagactgagctgtgccgccagcggcttcaatgtgtacgcctctggaatgcactgggtccgacaggcccctggcaaaggacttgagtgggtcgccaaaatctaccccgacagcgactacacctattacgccgacagcgtgaagggcagattcaccatcagcgccgacaccagcaagaacaccgcctacctccagatgaactccctgagagccgaggacaccgccgtgtactactgtagcagagacagcagcttctactacgtgtacgctatggactactggggccagggcacactggtcacagtctcttctacgcgtatccagaaccctgatcctgccgtgtaccagctgcgggatagcaagagcagcgacaagagcgtgtgtctgttcaccgacttcgacagccagaccaacgtgtcccagagcaaggactccgacgtgtacatcaccgataagtgcgtgctggacatgcggagcatggacttcaagagcaactccgccgtggcctggtccaacaagtccgatttcgcctgcgccaacgccttcaacaacagcattatccccgaggacacattcttcccaagccccgagagcagctgcgacgtgaagctggtggaaaagagcttcgagacagacaccaacctgaacttccagatcctgtacgagatcctgctgggcaaggccaccctgtacgccgtgctggtgtctgccctggtgctgatggctatggtcaagcggaaggacagccgggga

SEQ ID NO: 39445 - DNA, 2697 bp, synthetic construct
  source 1..2697: mol_type = other DNA
atggccttaccagtgaccgccttgctcctgccgctggccttgctgctccacgccgccaggccggaagtgcagctggttgaatctggcggaggactggttcagcctggcggatctctgagactgtcttgtgccgccagcggcttcagcttcagcgacttttggatgagctgggtccgacaggcccctggcaaaggacttgaatgggtcgccacaatcagccaggccggcagcgagaaggactacgtggactctgtgaagggcagattcaccatcagccgggacaacgccaagaagtccctgtacctccagatgaacagcctgagagccgaggacaccgccgtgtactattgtgcctctggcgtgtacagcttcgactacagaggccagggcaccctggtcacagtctcttctggtaccggcggaggcggatctggcggcggaggtagcggtggcggaggatctgaattcgacatccagatgacacagagccctagcagcctgtctgccagcgtgggagacagagtgaccatcacctgtagagccagccaggacgtgaacacagccgtggcttggtatcagcagaagcctggcaaggcccctaagctgctgatctacagcgcctacttcctgtacagcggcgtgcccagcagattcagcggaagcagaagcggcaccgacttcaccctgacaatatccagcctccagcctgaggacttcgccacctactactgccagcagtacagcagatacagccccgtgacctttggacagggcaccaaggtggaaatcaagagactcgagatccagaaccctgatcctgccgtgtaccagctgcgggatagcaagagcagcgacaagagcgtgtgtctgttcaccgacttcgacagccagaccaacgtgtcccagagcaaggactccgacgtgtacatcaccgataagtgcgtgctggacatgcggagcatggacttcaagagcaactccgccgtggcctggtccaacaagtccgatttcgcctgcgccaacgccttcaacaacagcattatccccgaggacacattcttcccaagccccgagagcagctgcgacgtgaagctggtggaaaagagcttcgagacagacaccaacctgaacttccagatcctgtacgagatcctgctgggcaaggccaccctgtacgccgtgctggtgtctgccctggtgctgatggctatggtcaagcggaaggacagccggggacgcgccaagagaagcggatctggcgtgaagcagaccctgaatttcgacctgctgaagctggctggcgacgtggaatccaacccaggccctactagtatggactggatttggcgcatccttttccttgtcggcgctgctaccggcgcgcattccgggccccagctccagctgcaagagtctggacctggcctggtcaagcctagcgagacactgagcctgacctgtaccgtgtccggcgatagcatcagcagcggcgattactactggggctggatcagacagcctcctggcaaaggactggaatggatcggccacatctactacagcggcgtgacctactacaaccccagcctgaagtccagagtgaccatcagcgtggacaccagccggaaccagttctccctgaagctgtctagcgtgacagccgccgataccgccgtgtactactgcaccagagaggacagcagcaactggcggagtagaggccagggaacactggtcacagttagctctggatccggcggaggcggaagtggaggcggaggatctggcggcggaggctctttcgaagaagttcagctggttgaaagtggtggcggcctggttcaacctggcggatctctgagactgagctgtgccgccagcggcttcaatgtgtacgcctctggaatgcactgggtccgacaggcccctggcaaaggacttgagtgggtcgccaaaatctaccccgacagcgactacacctattacgccgacagcgtgaagggcagattcaccatcagcgccgacaccagcaagaacaccgcctacctccagatgaactccctgagagccgaggacaccgccgtgtactactgtagcagagacagcagcttctactacgtgtacgctatggactactggggccagggcacactggtcacagtctcttctacgcgtgaggacctgaagaacgtgttcccacctgaggtggccgtgttcgagcctagcgaggccgagatcagccacacccagaaagccaccctcgtgtgcctggctaccggcttctaccccgaccatgtggaactgtcttggtgggtcaacggcaaagaggtgcacagcggcgtgtgtaccgacccccagccactgaaagaacagcccgccctgaacgacagccggtactgcctgagcagcagactgagagtgtccgccaccttctggcagaacccccggaaccacttcagatgccaggtgcagttctacggcctgagcgagaacgacgagtggacccaggacagagccaagcccgtgacccagatcgtgtctgccgaagcctggggcagagccgattgcggctttaccagcgagagctaccagcagggcgtgctgagcgccaccaacctgagcgtgatcggcttcagaatcctgctgctgaaagtggccggctttaacctgctgatgaccctgcggctgtggtccagc

SEQ ID NO: 39446 - DNA, 2181 bp, synthetic construct
  source 1..2181: mol_type = other DNA
atggccttaccagtgaccgccttgctcctgccgctggccttgctgctccacgccgccaggccggacatccagatgacacagagccctagcagcctgtctgccagcgtgggagacagagtgaccatcacctgtagagccagccaggacgtgaacacagccgtggcttggtatcagcagaagcctggcaaggcccctaagctgctgatctacagcgcctacttcctgtacagcggcgtgcccagcagattcagcggaagcagaagcggcaccgacttcaccctgacaatatccagcctccagcctgaggacttcgccacctactactgccagcagtacagcagatacagccccgtgacctttggacagggcaccaaggtggaaatcaagagactcgaggacctgaagaacgtgttcccacctgaggtggccgtgttcgagcctagcgaggccgagatcagccacacccagaaagccaccctcgtgtgcctggctaccggcttctaccccgaccatgtggaactgtcttggtgggtcaacggcaaagaggtgcacagcggcgtgtgtaccgacccccagccactgaaagaacagcccgccctgaacgacagccggtactgcctgagcagcagactgagagtgtccgccaccttctggcagaacccccggaaccacttcagatgccaggtgcagttctacggcctgagcgagaacgacgagtggacccaggacagagccaagcccgtgacccagatcgtgtctgccgaagcctggggcagagccgatgatgtgattaagatccactggcaggaaaagaagtccaacaccatcctgggcagccaggaaggcaacaccatgaagaccaacgacacctacatgaagttcagctggctgaccgtgcccgagaagtccctggacaaagaacacagatgcatcgtgcggcacgaaaacaacaagaacggcgtggaccaggaaatcatcttcccacccatcaagaccgatgtgattacaatggaccccaaggacaactgctccaaggacgccaacgataccctgctgctccagctgaccaacaccagcgcctactacatgtacttgttgctgctgctgaagtccgtggtgtacttcgccatcatcacatgctgcctgctgatggctatggtcaagcggaaggacagccggggaagggccaagcgatctggatctggagcaacaaacttctcactactcaaacaagcaggtgacgtggaggagaatcccgggcctactagtatggactggatttggcgcatccttttccttgtcggcgctgctaccggcgcgcattccttcgaagaagttcagctggttgaaagtggtggcggcctggttcaacctggcggatctctgagactgagctgtgccgccagcggcttcaatgtgtacgcctctggaatgcactgggtccgacaggcccctggcaaaggacttgagtgggtcgccaaaatctaccccgacagcgactacacctattacgccgacagcgtgaagggcagattcaccatcagcgccgacaccagcaagaacaccgcctacctccagatgaactccctgagagccgaggacaccgccgtgtactactgtagcagagacagcagcttctactacgtgtacgctatggactactggggccagggcacactggtcacagtctcttctacgcgtatccagaaccctgatcctgccgtgtaccagctgcgggatagcaagagcagcgacaagagcgtgtgtctgttcaccgacttcgacagccagaccaacgtgtcccagagcaaggactccgacgtgtacatcaccgataagtgcgtgctggacatgcggagcatggacttcaagagcaactccgccgtggcctggtccaacaagtccgatttcgcctgcgccaacgccttcaacaacagcattatccccgaggacacattcttcccaagccccgagagcagcgactccaccgaccacgtgaagcccaaagagacagagaacaccaagcagcccagcaagagctgccacaagcccaaggccatcgtgcacaccgagaaagtgaacatgatgagcctgaccgtgctgggcctgcggatgctgttcgccaaaaccgtggccgtgaacttcctgctgaccgccaagctgttcttcctcctcaccgcc

SEQ ID NO: 39447 - DNA, 2193 bp, synthetic construct
  source 1..2193: mol_type = other DNA
atggccttaccagtgaccgccttgctcctgccgctggccttgctgctccacgccgccaggccggacatccagatgacacagagccctagcagcctgtctgccagcgtgggagacagagtgaccatcacctgtagagccagccaggacgtgaacacagccgtggcttggtatcagcagaagcctggcaaggcccctaagctgctgatctacagcgcctacttcctgtacagcggcgtgcccagcagattcagcggaagcagaagcggcaccgacttcaccctgacaatatccagcctccagcctgaggacttcgccacctactactgccagcagtacagcagatacagccccgtgacctttggacagggcaccaaggtggaaatcaagagactcgagatccagaaccctgatcctgccgtgtaccagctgcgggatagcaagagcagcgacaagagcgtgtgtctgttcaccgacttcgacagccagaccaacgtgtcccagagcaaggactccgacgtgtacatcaccgataagtgcgtgctggacatgcggagcatggacttcaagagcaactccgccgtggcctggtccaacaagtccgatttcgcctgcgccaacgccttcaacaacagcattatccccgaggacacattcttcccaagccccgagagcagcgactccaccgaccacgtgaagcccaaagagacagagaacaccaagcagcccagcaagagctgccacaagcccaaggccatcgtgcacaccgagaaagtgaacatgatgagcctgaccgtgctgggcctgcggatgctgttcgccaaaaccgtggccgtgaacttcctgctgaccgccaagctgttcttcctcctcaccgcccgcgccaagagaagcggatctggcgtgaagcagaccctgaatttcgacctgctgaagctggctggcgacgtggaatccaacccaggccctactagtatggactggatttggcgcatccttttccttgtcggcgctgctaccggcgcgcattccttcgaagaagttcagctggttgaaagtggtggcggcctggttcaacctggcggatctctgagactgagctgtgccgccagcggcttcaatgtgtacgcctctggaatgcactgggtccgacaggcccctggcaaaggacttgagtgggtcgccaaaatctaccccgacagcgactacacctattacgccgacagcgtgaagggcagattcaccatcagcgccgacaccagcaagaacaccgcctacctccagatgaactccctgagagccgaggacaccgccgtgtactactgtagcagagacagcagcttctactacgtgtacgctatggactactggggccagggcacactggtcacagtctcttctacgcgtgaggacctgaagaacgtgttcccacctgaggtggccgtgttcgagcctagcgaggccgagatcagccacacccagaaagccaccctcgtgtgcctggctaccggcttctaccccgaccatgtggaactgtcttggtgggtcaacggcaaagaggtgcacagcggcgtgtgtaccgacccccagccactgaaagaacagcccgccctgaacgacagccggtactgcctgagcagcagactgagagtgtccgccaccttctggcagaacccccggaaccacttcagatgccaggtgcagttctacggcctgagcgagaacgacgagtggacccaggacagagccaagcccgtgacccagatcgtgtctgccgaagcctggggcagagccgatgatgtgattaagatccactggcaggaaaagaagtccaacaccatcctgggcagccaggaaggcaacaccatgaagaccaacgacacctacatgaagttcagctggctgaccgtgcccgagaagtccctggacaaagaacacagatgcatcgtgcggcacgaaaacaacaagaacggcgtggaccaggaaatcatcttcccacccatcaagaccgatgtgattacaatggaccccaaggacaactgctccaaggacgccaacgataccctgctgctccagctgaccaacaccagcgcctactacatgtacttgttgctgctgctgaagtccgtggtgtacttcgccatcatcacatgctgcctgctgatggctatggtcaagcggaaggacagccgggga

SEQ ID NO: 39448 - DNA, 2586 bp, synthetic construct
  source 1..2586: mol_type = other DNA
atggccttaccagtgaccgccttgctcctgccgctggccttgctgctccacgccgccaggccggaagtgcagctggttgaatctggcggaggactggttcagcctggcggatctctgagactgtcttgtgccgccagcggcttcagcttcagcgacttttggatgagctgggtccgacaggcccctggcaaaggacttgaatgggtcgccacaatcagccaggccggcagcgagaaggactacgtggactctgtgaagggcagattcaccatcagccgggacaacgccaagaagtccctgtacctccagatgaacagcctgagagccgaggacaccgccgtgtactattgtgcctctggcgtgtacagcttcgactacagaggccagggcaccctggtcacagtctcttctggtaccggcggaggcggatctggcggcggaggtagcggtggcggaggatctgaattcgacatccagatgacacagagccctagcagcctgtctgccagcgtgggagacagagtgaccatcacctgtagagccagccaggacgtgaacacagccgtggcttggtatcagcagaagcctggcaaggcccctaagctgctgatctacagcgcctacttcctgtacagcggcgtgcccagcagattcagcggaagcagaagcggcaccgacttcaccctgacaatatccagcctccagcctgaggacttcgccacctactactgccagcagtacagcagatacagccccgtgacctttggacagggcaccaaggtggaaatcaagagactcgaggacctgaagaacgtgttcccacctgaggtggccgtgttcgagcctagcgaggccgagatcagccacacccagaaagccaccctcgtgtgcctggctaccggcttctaccccgaccatgtggaactgtcttggtgggtcaacggcaaagaggtgcacagcggcgtgtgtaccgacccccagccactgaaagaacagcccgccctgaacgacagccggtactgcctgagcagcagactgagagtgtccgccaccttctggcagaacccccggaaccacttcagatgccaggtgcagttctacggcctgagcgagaacgacgagtggacccaggacagagccaagcccgtgacccagatcgtgtctgccgaagcctggggcagagccgatgatgtgattaagatccactggcaggaaaagaagtccaacaccatcctgggcagccaggaaggcaacaccatgaagaccaacgacacctacatgaagttcagctggctgaccgtgcccgagaagtccctggacaaagaacacagatgcatcgtgcggcacgaaaacaacaagaacggcgtggaccaggaaatcatcttcccacccatcaagaccgatgtgattacaatggaccccaaggacaactgctccaaggacgccaacgataccctgctgctccagctgaccaacaccagcgcctactacatgtacttgttgctgctgctgaagtccgtggtgtacttcgccatcatcacatgctgcctgctgatggctatggtcaagcggaaggacagccggggaagggccaagcgatctggatctggagcaacaaacttctcactactcaaacaagcaggtgacgtggaggagaatcccgggcctactagtatggactggatttggcgcatccttttccttgtcggcgctgctaccggcgcgcattccttcgaagaagttcagctggttgaaagtggtggcggcctggttcaacctggcggatctctgagactgagctgtgccgccagcggcttcaatgtgtacgcctctggaatgcactgggtccgacaggcccctggcaaaggacttgagtgggtcgccaaaatctaccccgacagcgactacacctattacgccgacagcgtgaagggcagattcaccatcagcgccgacaccagcaagaacaccgcctacctccagatgaactccctgagagccgaggacaccgccgtgtactactgtagcagagacagcagcttctactacgtgtacgctatggactactggggccagggcacactggtcacagtctcttctacgcgtatccagaaccctgatcctgccgtgtaccagctgcgggatagcaagagcagcgacaagagcgtgtgtctgttcaccgacttcgacagccagaccaacgtgtcccagagcaaggactccgacgtgtacatcaccgataagtgcgtgctggacatgcggagcatggacttcaagagcaactccgccgtggcctggtccaacaagtccgatttcgcctgcgccaacgccttcaacaacagcattatccccgaggacacattcttcccaagccccgagagcagcgactccaccgaccacgtgaagcccaaagagacagagaacaccaagcagcccagcaagagctgccacaagcccaaggccatcgtgcacaccgagaaagtgaacatgatgagcctgaccgtgctgggcctgcggatgctgttcgccaaaaccgtggccgtgaacttcctgctgaccgccaagctgttcttcctcctcaccgcc

SEQ ID NO: 39449 - DNA, 2598 bp, synthetic construct
  source 1..2598: mol_type = other DNA
atggccttaccagtgaccgccttgctcctgccgctggccttgctgctccacgccgccaggccggaagtgcagctggttgaatctggcggaggactggttcagcctggcggatctctgagactgtcttgtgccgccagcggcttcagcttcagcgacttttggatgagctgggtccgacaggcccctggcaaaggacttgaatgggtcgccacaatcagccaggccggcagcgagaaggactacgtggactctgtgaagggcagattcaccatcagccgggacaacgccaagaagtccctgtacctccagatgaacagcctgagagccgaggacaccgccgtgtactattgtgcctctggcgtgtacagcttcgactacagaggccagggcaccctggtcacagtctcttctggtaccggcggaggcggatctggcggcggaggtagcggtggcggaggatctgaattcgacatccagatgacacagagccctagcagcctgtctgccagcgtgggagacagagtgaccatcacctgtagagccagccaggacgtgaacacagccgtggcttggtatcagcagaagcctggcaaggcccctaagctgctgatctacagcgcctacttcctgtacagcggcgtgcccagcagattcagcggaagcagaagcggcaccgacttcaccctgacaatatccagcctccagcctgaggacttcgccacctactactgccagcagtacagcagatacagccccgtgacctttggacagggcaccaaggtggaaatcaagagactcgagatccagaaccctgatcctgccgtgtaccagctgcgggatagcaagagcagcgacaagagcgtgtgtctgttcaccgacttcgacagccagaccaacgtgtcccagagcaaggactccgacgtgtacatcaccgataagtgcgtgctggacatgcggagcatggacttcaagagcaactccgccgtggcctggtccaacaagtccgatttcgcctgcgccaacgccttcaacaacagcattatccccgaggacacattcttcccaagccccgagagcagcgactccaccgaccacgtgaagcccaaagagacagagaacaccaagcagcccagcaagagctgccacaagcccaaggccatcgtgcacaccgagaaagtgaacatgatgagcctgaccgtgctgggcctgcggatgctgttcgccaaaaccgtggccgtgaacttcctgctgaccgccaagctgttcttcctcctcaccgcccgcgccaagagaagcggatctggcgtgaagcagaccctgaatttcgacctgctgaagctggctggcgacgtggaatccaacccaggccctactagtatggactggatttggcgcatccttttccttgtcggcgctgctaccggcgcgcattccttcgaagaagttcagctggttgaaagtggtggcggcctggttcaacctggcggatctctgagactgagctgtgccgccagcggcttcaatgtgtacgcctctggaatgcactgggtccgacaggcccctggcaaaggacttgagtgggtcgccaaaatctaccccgacagcgactacacctattacgccgacagcgtgaagggcagattcaccatcagcgccgacaccagcaagaacaccgcctacctccagatgaactccctgagagccgaggacaccgccgtgtactactgtagcagagacagcagcttctactacgtgtacgctatggactactggggccagggcacactggtcacagtctcttctacgcgtgaggacctgaagaacgtgttcccacctgaggtggccgtgttcgagcctagcgaggccgagatcagccacacccagaaagccaccctcgtgtgcctggctaccggcttctaccccgaccatgtggaactgtcttggtgggtcaacggcaaagaggtgcacagcggcgtgtgtaccgacccccagccactgaaagaacagcccgccctgaacgacagccggtactgcctgagcagcagactgagagtgtccgccaccttctggcagaacccccggaaccacttcagatgccaggtgcagttctacggcctgagcgagaacgacgagtggacccaggacagagccaagcccgtgacccagatcgtgtctgccgaagcctggggcagagccgatgatgtgattaagatccactggcaggaaaagaagtccaacaccatcctgggcagccaggaaggcaacaccatgaagaccaacgacacctacatgaagttcagctggctgaccgtgcccgagaagtccctggacaaagaacacagatgcatcgtgcggcacgaaaacaacaagaacggcgtggaccaggaaatcatcttcccacccatcaagaccgatgtgattacaatggaccccaaggacaactgctccaaggacgccaacgataccctgctgctccagctgaccaacaccagcgcctactacatgtacttgttgctgctgctgaagtccgtggtgtacttcgccatcatcacatgctgcctgctgatggctatggtcaagcggaaggacagccgggga

SEQ ID NO: 39450 - DNA, 2997 bp, synthetic construct
  source 1..2997: mol_type = other DNA
atggccttaccagtgaccgccttgctcctgccgctggccttgctgctccacgccgccaggccggaagtgcagctggttgaatctggcggaggactggttcagcctggcggatctctgagactgtcttgtgccgccagcggcttcagcttcagcgacttttggatgagctgggtccgacaggcccctggcaaaggacttgaatgggtcgccacaatcagccaggccggcagcgagaaggactacgtggactctgtgaagggcagattcaccatcagccgggacaacgccaagaagtccctgtacctccagatgaacagcctgagagccgaggacaccgccgtgtactattgtgcctctggcgtgtacagcttcgactacagaggccagggcaccctggtcacagtctcttctggtaccggcggaggcggatctggcggcggaggtagcggtggcggaggatctgaattcgacatccagatgacacagagccctagcagcctgtctgccagcgtgggagacagagtgaccatcacctgtagagccagccaggacgtgaacacagccgtggcttggtatcagcagaagcctggcaaggcccctaagctgctgatctacagcgcctacttcctgtacagcggcgtgcccagcagattcagcggaagcagaagcggcaccgacttcaccctgacaatatccagcctccagcctgaggacttcgccacctactactgccagcagtacagcagatacagccccgtgacctttggacagggcaccaaggtggaaatcaagagactcgaggacctgaagaacgtgttcccacctgaggtggccgtgttcgagcctagcgaggccgagatcagccacacccagaaagccaccctcgtgtgcctggctaccggcttctaccccgaccatgtggaactgtcttggtgggtcaacggcaaagaggtgcacagcggcgtgtgtaccgacccccagccactgaaagaacagcccgccctgaacgacagccggtactgcctgagcagcagactgagagtgtccgccaccttctggcagaacccccggaaccacttcagatgccaggtgcagttctacggcctgagcgagaacgacgagtggacccaggacagagccaagcccgtgacccagatcgtgtctgccgaagcctggggcagagccgatgatgtgattaagatccactggcaggaaaagaagtccaacaccatcctgggcagccaggaaggcaacaccatgaagaccaacgacacctacatgaagttcagctggctgaccgtgcccgagaagtccctggacaaagaacacagatgcatcgtgcggcacgaaaacaacaagaacggcgtggaccaggaaatcatcttcccacccatcaagaccgatgtgattacaatggaccccaaggacaactgctccaaggacgccaacgataccctgctgctccagctgaccaacaccagcgcctactacatgtacttgttgctgctgctgaagtccgtggtgtacttcgccatcatcacatgctgcctgctgatggctatggtcaagcggaaggacagccggggaagggccaagcgatctggatctggagcaacaaacttctcactactcaaacaagcaggtgacgtggaggagaatcccgggcctactagtatggactggatttggcgcatccttttccttgtcggcgctgctaccggcgcgcattccgggccccagctccagctgcaagagtctggacctggcctggtcaagcctagcgagacactgagcctgacctgtaccgtgtccggcgatagcatcagcagcggcgattactactggggctggatcagacagcctcctggcaaaggactggaatggatcggccacatctactacagcggcgtgacctactacaaccccagcctgaagtccagagtgaccatcagcgtggacaccagccggaaccagttctccctgaagctgtctagcgtgacagccgccgataccgccgtgtactactgcaccagagaggacagcagcaactggcggagtagaggccagggaacactggtcacagttagctctggatccggcggaggcggaagtggaggcggaggatctggcggcggaggctctttcgaagaagttcagctggttgaaagtggtggcggcctggttcaacctggcggatctctgagactgagctgtgccgccagcggcttcaatgtgtacgcctctggaatgcactgggtccgacaggcccctggcaaaggacttgagtgggtcgccaaaatctaccccgacagcgactacacctattacgccgacagcgtgaagggcagattcaccatcagcgccgacaccagcaagaacaccgcctacctccagatgaactccctgagagccgaggacaccgccgtgtactactgtagcagagacagcagcttctactacgtgtacgctatggactactggggccagggcacactggtcacagtctcttctacgcgtatccagaaccctgatcctgccgtgtaccagctgcgggatagcaagagcagcgacaagagcgtgtgtctgttcaccgacttcgacagccagaccaacgtgtcccagagcaaggactccgacgtgtacatcaccgataagtgcgtgctggacatgcggagcatggacttcaagagcaactccgccgtggcctggtccaacaagtccgatttcgcctgcgccaacgccttcaacaacagcattatccccgaggacacattcttcccaagccccgagagcagcgactccaccgaccacgtgaagcccaaagagacagagaacaccaagcagcccagcaagagctgccacaagcccaaggccatcgtgcacaccgagaaagtgaacatgatgagcctgaccgtgctgggcctgcggatgctgttcgccaaaaccgtggccgtgaacttcctgctgaccgccaagctgttcttcctcctcaccgcc

SEQ ID NO: 39451 - DNA, 3009 bp, synthetic construct
  source 1..3009: mol_type = other DNA
atggccttaccagtgaccgccttgctcctgccgctggccttgctgctccacgccgccaggccggaagtgcagctggttgaatctggcggaggactggttcagcctggcggatctctgagactgtcttgtgccgccagcggcttcagcttcagcgacttttggatgagctgggtccgacaggcccctggcaaaggacttgaatgggtcgccacaatcagccaggccggcagcgagaaggactacgtggactctgtgaagggcagattcaccatcagccgggacaacgccaagaagtccctgtacctccagatgaacagcctgagagccgaggacaccgccgtgtactattgtgcctctggcgtgtacagcttcgactacagaggccagggcaccctggtcacagtctcttctggtaccggcggaggcggatctggcggcggaggtagcggtggcggaggatctgaattcgacatccagatgacacagagccctagcagcctgtctgccagcgtgggagacagagtgaccatcacctgtagagccagccaggacgtgaacacagccgtggcttggtatcagcagaagcctggcaaggcccctaagctgctgatctacagcgcctacttcctgtacagcggcgtgcccagcagattcagcggaagcagaagcggcaccgacttcaccctgacaatatccagcctccagcctgaggacttcgccacctactactgccagcagtacagcagatacagccccgtgacctttggacagggcaccaaggtggaaatcaagagactcgagatccagaaccctgatcctgccgtgtaccagctgcgggatagcaagagcagcgacaagagcgtgtgtctgttcaccgacttcgacagccagaccaacgtgtcccagagcaaggactccgacgtgtacatcaccgataagtgcgtgctggacatgcggagcatggacttcaagagcaactccgccgtggcctggtccaacaagtccgatttcgcctgcgccaacgccttcaacaacagcattatccccgaggacacattcttcccaagccccgagagcagcgactccaccgaccacgtgaagcccaaagagacagagaacaccaagcagcccagcaagagctgccacaagcccaaggccatcgtgcacaccgagaaagtgaacatgatgagcctgaccgtgctgggcctgcggatgctgttcgccaaaaccgtggccgtgaacttcctgctgaccgccaagctgttcttcctcctcaccgcccgcgccaagagaagcggatctggcgtgaagcagaccctgaatttcgacctgctgaagctggctggcgacgtggaatccaacccaggccctactagtatggactggatttggcgcatccttttccttgtcggcgctgctaccggcgcgcattccgggccccagctccagctgcaagagtctggacctggcctggtcaagcctagcgagacactgagcctgacctgtaccgtgtccggcgatagcatcagcagcggcgattactactggggctggatcagacagcctcctggcaaaggactggaatggatcggccacatctactacagcggcgtgacctactacaaccccagcctgaagtccagagtgaccatcagcgtggacaccagccggaaccagttctccctgaagctgtctagcgtgacagccgccgataccgccgtgtactactgcaccagagaggacagcagcaactggcggagtagaggccagggaacactggtcacagttagctctggatccggcggaggcggaagtggaggcggaggatctggcggcggaggctctttcgaagaagttcagctggttgaaagtggtggcggcctggttcaacctggcggatctctgagactgagctgtgccgccagcggcttcaatgtgtacgcctctggaatgcactgggtccgacaggcccctggcaaaggacttgagtgggtcgccaaaatctaccccgacagcgactacacctattacgccgacagcgtgaagggcagattcaccatcagcgccgacaccagcaagaacaccgcctacctccagatgaactccctgagagccgaggacaccgccgtgtactactgtagcagagacagcagcttctactacgtgtacgctatggactactggggccagggcacactggtcacagtctcttctacgcgtgaggacctgaagaacgtgttcccacctgaggtggccgtgttcgagcctagcgaggccgagatcagccacacccagaaagccaccctcgtgtgcctggctaccggcttctaccccgaccatgtggaactgtcttggtgggtcaacggcaaagaggtgcacagcggcgtgtgtaccgacccccagccactgaaagaacagcccgccctgaacgacagccggtactgcctgagcagcagactgagagtgtccgccaccttctggcagaacccccggaaccacttcagatgccaggtgcagttctacggcctgagcgagaacgacgagtggacccaggacagagccaagcccgtgacccagatcgtgtctgccgaagcctggggcagagccgatgatgtgattaagatccactggcaggaaaagaagtccaacaccatcctgggcagccaggaaggcaacaccatgaagaccaacgacacctacatgaagttcagctggctgaccgtgcccgagaagtccctggacaaagaacacagatgcatcgtgcggcacgaaaacaacaagaacggcgtggaccaggaaatcatcttcccacccatcaagaccgatgtgattacaatggaccccaaggacaactgctccaaggacgccaacgataccctgctgctccagctgaccaacaccagcgcctactacatgtacttgttgctgctgctgaagtccgtggtgtacttcgccatcatcacatgctgcctgctgatggctatggtcaagcggaaggacagccgggga

SEQ ID NO: 39452 - DNA, 2175 bp, synthetic construct
  source 1..2175: mol_type = other DNA
atggccttaccagtgaccgccttgctcctgccgctggccttgctgctccacgccgccaggccggacatccagatgacacagagccctagcagcctgtctgccagcgtgggagacagagtgaccatcacctgtagagccagccaggacgtgaacacagccgtggcttggtatcagcagaagcctggcaaggcccctaagctgctgatctacagcgcctacttcctgtacagcggcgtgcccagcagattcagcggaagcagaagcggcaccgacttcaccctgacaatatccagcctccagcctgaggacttcgccacctactactgccagcagtacagcagatacagccccgtgacctttggacagggcaccaaggtggaaatcaagagactcgaggacctgaagaacgtgttcccacctgaggtggccgtgttcgagcctagcgaggccgagatcagccacacccagaaagccaccctcgtgtgcctggctaccggcttctaccccgaccatgtggaactgtcttggtgggtcaacggcaaagaggtgcacagcggcgtgtgtaccgacccccagccactgaaagaacagcccgccctgaacgacagccggtactgcctgagcagcagactgagagtgtccgccaccttctggcagaacccccggaaccacttcagatgccaggtgcagttctacggcctgagcgagaacgacgagtggacccaggacagagccaagcccgtgacccagatcgtgtctgccgaagcctggggcagagccgatgatgtgattaagatccactggcaggaaaagaagtccaacaccatcctgggcagccaggaaggcaacaccatgaagaccaacgacacctacatgaagttcagctggctgaccgtgcccgagaagtccctggacaaagaacacagatgcatcgtgcggcacgaaaacaacaagaacggcgtggaccaggaaatcatcttcccacccatcaagaccgatgtgattacaatggaccccaaggacaactgctccaaggacgccaacgataccctgctgctccagctgaccaacaccagcgcctactacatgtacttgttgctgctgctgaagtccgtggtgtacttcgccatcatcacatgctgcctgctgcggagaaccgccttctgctgcaacggcgagaagtctagggccaagcgatctggatctggagcaacaaacttctcactactcaaacaagcaggtgacgtggaggagaatcccgggcctactagtatggactggatttggcgcatccttttccttgtcggcgctgctaccggcgcgcattccttcgaagaagttcagctggttgaaagtggtggcggcctggttcaacctggcggatctctgagactgagctgtgccgccagcggcttcaatgtgtacgcctctggaatgcactgggtccgacaggcccctggcaaaggacttgagtgggtcgccaaaatctaccccgacagcgactacacctattacgccgacagcgtgaagggcagattcaccatcagcgccgacaccagcaagaacaccgcctacctccagatgaactccctgagagccgaggacaccgccgtgtactactgtagcagagacagcagcttctactacgtgtacgctatggactactggggccagggcacactggtcacagtctcttctacgcgtatccagaaccctgatcctgccgtgtaccagctgcgggatagcaagagcagcgacaagagcgtgtgtctgttcaccgacttcgacagccagaccaacgtgtcccagagcaaggactccgacgtgtacatcaccgataagtgcgtgctggacatgcggagcatggacttcaagagcaactccgccgtggcctggtccaacaagtccgatttcgcctgcgccaacgccttcaacaacagcattatccccgaggacacattcttcccaagccccgagagcagcgactccaccgaccacgtgaagcccaaagagacagagaacaccaagcagcccagcaagagctgccacaagcccaaggccatcgtgcacaccgagaaagtgaacatgatgagcctgaccgtgctgggcctgcggatgctgttcgccaaaaccgtggccgtgaacttcctgctgaccgccaagctgttcttcctc

SEQ ID NO: 39453 - DNA, 2187 bp, synthetic construct
  source 1..2187: mol_type = other DNA
atggccttaccagtgaccgccttgctcctgccgctggccttgctgctccacgccgccaggccggacatccagatgacacagagccctagcagcctgtctgccagcgtgggagacagagtgaccatcacctgtagagccagccaggacgtgaacacagccgtggcttggtatcagcagaagcctggcaaggcccctaagctgctgatctacagcgcctacttcctgtacagcggcgtgcccagcagattcagcggaagcagaagcggcaccgacttcaccctgacaatatccagcctccagcctgaggacttcgccacctactactgccagcagtacagcagatacagccccgtgacctttggacagggcaccaaggtggaaatcaagagactcgagatccagaaccctgatcctgccgtgtaccagctgcgggatagcaagagcagcgacaagagcgtgtgtctgttcaccgacttcgacagccagaccaacgtgtcccagagcaaggactccgacgtgtacatcaccgataagtgcgtgctggacatgcggagcatggacttcaagagcaactccgccgtggcctggtccaacaagtccgatttcgcctgcgccaacgccttcaacaacagcattatccccgaggacacattcttcccaagccccgagagcagcgactccaccgaccacgtgaagcccaaagagacagagaacaccaagcagcccagcaagagctgccacaagcccaaggccatcgtgcacaccgagaaagtgaacatgatgagcctgaccgtgctgggcctgcggatgctgttcgccaaaaccgtggccgtgaacttcctgctgaccgccaagctgttcttcctccgcgccaagagaagcggatctggcgtgaagcagaccctgaatttcgacctgctgaagctggctggcgacgtggaatccaacccaggccctactagtatggactggatttggcgcatccttttccttgtcggcgctgctaccggcgcgcattccttcgaagaagttcagctggttgaaagtggtggcggcctggttcaacctggcggatctctgagactgagctgtgccgccagcggcttcaatgtgtacgcctctggaatgcactgggtccgacaggcccctggcaaaggacttgagtgggtcgccaaaatctaccccgacagcgactacacctattacgccgacagcgtgaagggcagattcaccatcagcgccgacaccagcaagaacaccgcctacctccagatgaactccctgagagccgaggacaccgccgtgtactactgtagcagagacagcagcttctactacgtgtacgctatggactactggggccagggcacactggtcacagtctcttctacgcgtgaggacctgaagaacgtgttcccacctgaggtggccgtgttcgagcctagcgaggccgagatcagccacacccagaaagccaccctcgtgtgcctggctaccggcttctaccccgaccatgtggaactgtcttggtgggtcaacggcaaagaggtgcacagcggcgtgtgtaccgacccccagccactgaaagaacagcccgccctgaacgacagccggtactgcctgagcagcagactgagagtgtccgccaccttctggcagaacccccggaaccacttcagatgccaggtgcagttctacggcctgagcgagaacgacgagtggacccaggacagagccaagcccgtgacccagatcgtgtctgccgaagcctggggcagagccgatgatgtgattaagatccactggcaggaaaagaagtccaacaccatcctgggcagccaggaaggcaacaccatgaagaccaacgacacctacatgaagttcagctggctgaccgtgcccgagaagtccctggacaaagaacacagatgcatcgtgcggcacgaaaacaacaagaacggcgtggaccaggaaatcatcttcccacccatcaagaccgatgtgattacaatggaccccaaggacaactgctccaaggacgccaacgataccctgctgctccagctgaccaacaccagcgcctactacatgtacttgttgctgctgctgaagtccgtggtgtacttcgccatcatcacatgctgcctgctgcggagaaccgccttctgctgcaacggcgagaagtct

SEQ ID NO: 39454 - DNA, 2580 bp, synthetic construct
  source 1..2580: mol_type = other DNA
atggccttaccagtgaccgccttgctcctgccgctggccttgctgctccacgccgccaggccggaagtgcagctggttgaatctggcggaggactggttcagcctggcggatctctgagactgtcttgtgccgccagcggcttcagcttcagcgacttttggatgagctgggtccgacaggcccctggcaaaggacttgaatgggtcgccacaatcagccaggccggcagcgagaaggactacgtggactctgtgaagggcagattcaccatcagccgggacaacgccaagaagtccctgtacctccagatgaacagcctgagagccgaggacaccgccgtgtactattgtgcctctggcgtgtacagcttcgactacagaggccagggcaccctggtcacagtctcttctggtaccggcggaggcggatctggcggcggaggtagcggtggcggaggatctgaattcgacatccagatgacacagagccctagcagcctgtctgccagcgtgggagacagagtgaccatcacctgtagagccagccaggacgtgaacacagccgtggcttggtatcagcagaagcctggcaaggcccctaagctgctgatctacagcgcctacttcctgtacagcggcgtgcccagcagattcagcggaagcagaagcggcaccgacttcaccctgacaatatccagcctccagcctgaggacttcgccacctactactgccagcagtacagcagatacagccccgtgacctttggacagggcaccaaggtggaaatcaagagactcgaggacctgaagaacgtgttcccacctgaggtggccgtgttcgagcctagcgaggccgagatcagccacacccagaaagccaccctcgtgtgcctggctaccggcttctaccccgaccatgtggaactgtcttggtgggtcaacggcaaagaggtgcacagcggcgtgtgtaccgacccccagccactgaaagaacagcccgccctgaacgacagccggtactgcctgagcagcagactgagagtgtccgccaccttctggcagaacccccggaaccacttcagatgccaggtgcagttctacggcctgagcgagaacgacgagtggacccaggacagagccaagcccgtgacccagatcgtgtctgccgaagcctggggcagagccgatgatgtgattaagatccactggcaggaaaagaagtccaacaccatcctgggcagccaggaaggcaacaccatgaagaccaacgacacctacatgaagttcagctggctgaccgtgcccgagaagtccctggacaaagaacacagatgcatcgtgcggcacgaaaacaacaagaacggcgtggaccaggaaatcatcttcccacccatcaagaccgatgtgattacaatggaccccaaggacaactgctccaaggacgccaacgataccctgctgctccagctgaccaacaccagcgcctactacatgtacttgttgctgctgctgaagtccgtggtgtacttcgccatcatcacatgctgcctgctgcggagaaccgccttctgctgcaacggcgagaagtctagggccaagcgatctggatctggagcaacaaacttctcactactcaaacaagcaggtgacgtggaggagaatcccgggcctactagtatggactggatttggcgcatccttttccttgtcggcgctgctaccggcgcgcattccttcgaagaagttcagctggttgaaagtggtggcggcctggttcaacctggcggatctctgagactgagctgtgccgccagcggcttcaatgtgtacgcctctggaatgcactgggtccgacaggcccctggcaaaggacttgagtgggtcgccaaaatctaccccgacagcgactacacctattacgccgacagcgtgaagggcagattcaccatcagcgccgacaccagcaagaacaccgcctacctccagatgaactccctgagagccgaggacaccgccgtgtactactgtagcagagacagcagcttctactacgtgtacgctatggactactggggccagggcacactggtcacagtctcttctacgcgtatccagaaccctgatcctgccgtgtaccagctgcgggatagcaagagcagcgacaagagcgtgtgtctgttcaccgacttcgacagccagaccaacgtgtcccagagcaaggactccgacgtgtacatcaccgataagtgcgtgctggacatgcggagcatggacttcaagagcaactccgccgtggcctggtccaacaagtccgatttcgcctgcgccaacgccttcaacaacagcattatccccgaggacacattcttcccaagccccgagagcagcgactccaccgaccacgtgaagcccaaagagacagagaacaccaagcagcccagcaagagctgccacaagcccaaggccatcgtgcacaccgagaaagtgaacatgatgagcctgaccgtgctgggcctgcggatgctgttcgccaaaaccgtggccgtgaacttcctgctgaccgccaagctgttcttcctc

SEQ ID NO: 39455 - DNA, 2991 bp, synthetic construct
  source 1..2991: mol_type = other DNA
atggccttaccagtgaccgccttgctcctgccgctggccttgctgctccacgccgccaggccggaagtgcagctggttgaatctggcggaggactggttcagcctggcggatctctgagactgtcttgtgccgccagcggcttcagcttcagcgacttttggatgagctgggtccgacaggcccctggcaaaggacttgaatgggtcgccacaatcagccaggccggcagcgagaaggactacgtggactctgtgaagggcagattcaccatcagccgggacaacgccaagaagtccctgtacctccagatgaacagcctgagagccgaggacaccgccgtgtactattgtgcctctggcgtgtacagcttcgactacagaggccagggcaccctggtcacagtctcttctggtaccggcggaggcggatctggcggcggaggtagcggtggcggaggatctgaattcgacatccagatgacacagagccctagcagcctgtctgccagcgtgggagacagagtgaccatcacctgtagagccagccaggacgtgaacacagccgtggcttggtatcagcagaagcctggcaaggcccctaagctgctgatctacagcgcctacttcctgtacagcggcgtgcccagcagattcagcggaagcagaagcggcaccgacttcaccctgacaatatccagcctccagcctgaggacttcgccacctactactgccagcagtacagcagatacagccccgtgacctttggacagggcaccaaggtggaaatcaagagactcgaggacctgaagaacgtgttcccacctgaggtggccgtgttcgagcctagcgaggccgagatcagccacacccagaaagccaccctcgtgtgcctggctaccggcttctaccccgaccatgtggaactgtcttggtgggtcaacggcaaagaggtgcacagcggcgtgtgtaccgacccccagccactgaaagaacagcccgccctgaacgacagccggtactgcctgagcagcagactgagagtgtccgccaccttctggcagaacccccggaaccacttcagatgccaggtgcagttctacggcctgagcgagaacgacgagtggacccaggacagagccaagcccgtgacccagatcgtgtctgccgaagcctggggcagagccgatgatgtgattaagatccactggcaggaaaagaagtccaacaccatcctgggcagccaggaaggcaacaccatgaagaccaacgacacctacatgaagttcagctggctgaccgtgcccgagaagtccctggacaaagaacacagatgcatcgtgcggcacgaaaacaacaagaacggcgtggaccaggaaatcatcttcccacccatcaagaccgatgtgattacaatggaccccaaggacaactgctccaaggacgccaacgataccctgctgctccagctgaccaacaccagcgcctactacatgtacttgttgctgctgctgaagtccgtggtgtacttcgccatcatcacatgctgcctgctgcggagaaccgccttctgctgcaacggcgagaagtctagggccaagcgatctggatctggagcaacaaacttctcactactcaaacaagcaggtgacgtggaggagaatcccgggcctactagtatggactggatttggcgcatccttttccttgtcggcgctgctaccggcgcgcattccgggccccagctccagctgcaagagtctggacctggcctggtcaagcctagcgagacactgagcctgacctgtaccgtgtccggcgatagcatcagcagcggcgattactactggggctggatcagacagcctcctggcaaaggactggaatggatcggccacatctactacagcggcgtgacctactacaaccccagcctgaagtccagagtgaccatcagcgtggacaccagccggaaccagttctccctgaagctgtctagcgtgacagccgccgataccgccgtgtactactgcaccagagaggacagcagcaactggcggagtagaggccagggaacactggtcacagttagctctggatccggcggaggcggaagtggaggcggaggatctggcggcggaggctctttcgaagaagttcagctggttgaaagtggtggcggcctggttcaacctggcggatctctgagactgagctgtgccgccagcggcttcaatgtgtacgcctctggaatgcactgggtccgacaggcccctggcaaaggacttgagtgggtcgccaaaatctaccccgacagcgactacacctattacgccgacagcgtgaagggcagattcaccatcagcgccgacaccagcaagaacaccgcctacctccagatgaactccctgagagccgaggacaccgccgtgtactactgtagcagagacagcagcttctactacgtgtacgctatggactactggggccagggcacactggtcacagtctcttctacgcgtatccagaaccctgatcctgccgtgtaccagctgcgggatagcaagagcagcgacaagagcgtgtgtctgttcaccgacttcgacagccagaccaacgtgtcccagagcaaggactccgacgtgtacatcaccgataagtgcgtgctggacatgcggagcatggacttcaagagcaactccgccgtggcctggtccaacaagtccgatttcgcctgcgccaacgccttcaacaacagcattatccccgaggacacattcttcccaagccccgagagcagcgactccaccgaccacgtgaagcccaaagagacagagaacaccaagcagcccagcaagagctgccacaagcccaaggccatcgtgcacaccgagaaagtgaacatgatgagcctgaccgtgctgggcctgcggatgctgttcgccaaaaccgtggccgtgaacttcctgctgaccgccaagctgttcttcctc

SEQ ID NO: 39456 - DNA, 1869 bp, synthetic construct
  source 1..1869: mol_type = other DNA
atggccttaccagtgaccgccttgctcctgccgctggccttgctgctccacgccgccaggccggacatccagatgacacagagccctagcagcctgtctgccagcgtgggagacagagtgaccatcacctgtagagccagccaggacgtgaacacagccgtggcttggtatcagcagaagcctggcaaggcccctaagctgctgatctacagcgcctacttcctgtacagcggcgtgcccagcagattcagcggaagcagaagcggcaccgacttcaccctgacaatatccagcctccagcctgaggacttcgccacctactactgccagcagtacagcagatacagccccgtgacctttggacagggcaccaaggtggaaatcaagagactcgaggacctgaagaacgtgttcccacctgaggtggccgtgttcgagcctagcgaggccgagatcagccacacccagaaagccaccctcgtgtgcctggctaccggcttctaccccgaccatgtggaactgtcttggtgggtcaacggcaaagaggtgcacagcggcgtgtctaccgacccccagccactgaaagaacagcccgccctgaacgacagccggtactgcctgagcagcagactgagagtgtccgccaccttctggcagaacccccggaaccacttcagatgccaggtgcagttctacggcctgagcgagaacgacgagtggacccaggacagagccaagcccgtgacccagatcgtgtctgccgaagcctggggcagagccgattgcgacgtgaagctggtggaaaagagcttcgagacagacaccaacctgaacttccagaacctgagcgtgatcggcttcagaatcctgctgctgaaagtggccggctttaacctgctgatgaccctgcggctgtggtccagcagggccaagcgatctggatctggagcaacaaacttctcactactcaaacaagcaggtgacgtggaggagaatcccgggcctactagtatggactggatttggcgcatccttttccttgtcggcgctgctaccggcgcgcattccttcgaagaagttcagctggttgaaagtggtggcggcctggttcaacctggcggatctctgagactgagctgtgccgccagcggcttcaatgtgtacgcctctggaatgcactgggtccgacaggcccctggcaaaggacttgagtgggtcgccaaaatctaccccgacagcgactacacctattacgccgacagcgtgaagggcagattcaccatcagcgccgacaccagcaagaacaccgcctacctccagatgaactccctgagagccgaggacaccgccgtgtactactgtagcagagacagcagcttctactacgtgtacgctatggactactggggccagggcacactggtcacagtctcttctacgcgtatccagaaccctgatcctgccgtgtaccagctgcgggatagcaagagcagcgacaagagcgtgtgtctgttcaccgacttcgacagccagaccaacgtgtcccagagcaaggactccgacgtgtacatcaccgataagaccgtgctggacatgcggagcatggacttcaagagcaactccgccgtggcctggtccaacaagtccgatttcgcctgcgccaacgccttcaacaacagcattatccccgaggacacattcttcccaagccccgagagcagctgcggctttaccagcgagagctaccagcagggcgtgctgagcgccaccatcctgtacgagatcctgctgggcaaggccaccctgtacgccgtgctggtgtctgccctggtgctgatggctatggtcaagcggaaggacagccgggga

SEQ ID NO: 39457 - DNA, 1869 bp, synthetic construct
  source 1..1869: mol_type = other DNA
atggccttaccagtgaccgccttgctcctgccgctggccttgctgctccacgccgccaggccggacatccagatgacacagagccctagcagcctgtctgccagcgtgggagacagagtgaccatcacctgtagagccagccaggacgtgaacacagccgtggcttggtatcagcagaagcctggcaaggcccctaagctgctgatctacagcgcctacttcctgtacagcggcgtgcccagcagattcagcggaagcagaagcggcaccgacttcaccctgacaatatccagcctccagcctgaggacttcgccacctactactgccagcagtacagcagatacagccccgtgacctttggacagggcaccaaggtggaaatcaagagactcgaggacctgaagaacgtgttcccacctgaggtggccgtgttcgagcctagcgaggccgagatcagccacacccagaaagccaccctcgtgtgcctggctaccggcttctaccccgaccatgtggaactgtcttggtgggtcaacggcaaagaggtgcacagcggcgtgtctaccgacccccagccactgaaagaacagcccgccctgaacgacagccggtactgcctgagcagcagactgagagtgtccgccaccttctggcagaacccccggaaccacttcagatgccaggtgcagttctacggcctgagcgagaacgacgagtggacccaggacagagccaagcccgtgacccagatcgtgtctgccgaagcctggggcagagccgattgcggctttaccagcgagagctaccagcagggcgtgctgagcgccaccaacctgagcgtgatcggcttcagaatcctgctgctgaaagtggccggctttaacctgctgatgaccctgcggctgtggtccagcagggccaagcgatctggatctggagcaacaaacttctcactactcaaacaagcaggtgacgtggaggagaatcccgggcctactagtatggactggatttggcgcatccttttccttgtcggcgctgctaccggcgcgcattccttcgaagaagttcagctggttgaaagtggtggcggcctggttcaacctggcggatctctgagactgagctgtgccgccagcggcttcaatgtgtacgcctctggaatgcactgggtccgacaggcccctggcaaaggacttgagtgggtcgccaaaatctaccccgacagcgactacacctattacgccgacagcgtgaagggcagattcaccatcagcgccgacaccagcaagaacaccgcctacctccagatgaactccctgagagccgaggacaccgccgtgtactactgtagcagagacagcagcttctactacgtgtacgctatggactactggggccagggcacactggtcacagtctcttctacgcgtatccagaaccctgatcctgccgtgtaccagctgcgggatagcaagagcagcgacaagagcgtgtgtctgttcaccgacttcgacagccagaccaacgtgtcccagagcaaggactccgacgtgtacatcaccgataagaccgtgctggacatgcggagcatggacttcaagagcaactccgccgtggcctggtccaacaagtccgatttcgcctgcgccaacgccttcaacaacagcattatccccgaggacacattcttcccaagccccgagagcagctgcgacgtgaagctggtggaaaagagcttcgagacagacaccaacctgaacttccagatcctgtacgagatcctgctgggcaaggccaccctgtacgccgtgctggtgtctgccctggtgctgatggctatggtcaagcggaaggacagccgggga

SEQ ID NO: 39458 - DNA, 2181 bp, synthetic construct
  source 1..2181: mol_type = other DNA
atggccttaccagtgaccgccttgctcctgccgctggccttgctgctccacgccgccaggccggacatccagatgacacagagccctagcagcctgtctgccagcgtgggagacagagtgaccatcacctgtagagccagccaggacgtgaacacagccgtggcttggtatcagcagaagcctggcaaggcccctaagctgctgatctacagcgcctacttcctgtacagcggcgtgcccagcagattcagcggaagcagaagcggcaccgacttcaccctgacaatatccagcctccagcctgaggacttcgccacctactactgccagcagtacagcagatacagccccgtgacctttggacagggcaccaaggtggaaatcaagagactcgaggacctgaagaacgtgttcccacctgaggtggccgtgttcgagcctagcgaggccgagatcagccacacccagaaagccaccctcgtgtgcctggctaccggcttctaccccgaccatgtggaactgtcttggtgggtcaacggcaaagaggtgcacagcggcgtgtctaccgacccccagccactgaaagaacagcccgccctgaacgacagccggtactgcctgagcagcagactgagagtgtccgccaccttctggcagaacccccggaaccacttcagatgccaggtgcagttctacggcctgagcgagaacgacgagtggacccaggacagagccaagcccgtgacccagatcgtgtctgccgaagcctggggcagagccgatgatgtgattaagatccactggcaggaaaagaagtccaacaccatcctgggcagccaggaaggcaacaccatgaagaccaacgacacctacatgaagttcagctggctgaccgtgcccgagaagtccctggacaaagaacacagatgcatcgtgcggcacgaaaacaacaagaacggcgtggaccaggaaatcatcttcccacccatcaagaccgatgtgattacaatggaccccaaggacaactgctccaaggacgccaacgataccctgctgctccagctgaccaacaccagcgcctactacatgtacttgttgctgctgctgaagtccgtggtgtacttcgccatcatcacatgctgcctgctgatggctatggtcaagcggaaggacagccggggaagggccaagcgatctggatctggagcaacaaacttctcactactcaaacaagcaggtgacgtggaggagaatcccgggcctactagtatggactggatttggcgcatccttttccttgtcggcgctgctaccggcgcgcattccttcgaagaagttcagctggttgaaagtggtggcggcctggttcaacctggcggatctctgagactgagctgtgccgccagcggcttcaatgtgtacgcctctggaatgcactgggtccgacaggcccctggcaaaggacttgagtgggtcgccaaaatctaccccgacagcgactacacctattacgccgacagcgtgaagggcagattcaccatcagcgccgacaccagcaagaacaccgcctacctccagatgaactccctgagagccgaggacaccgccgtgtactactgtagcagagacagcagcttctactacgtgtacgctatggactactggggccagggcacactggtcacagtctcttctacgcgtatccagaaccctgatcctgccgtgtaccagctgcgggatagcaagagcagcgacaagagcgtgtgtctgttcaccgacttcgacagccagaccaacgtgtcccagagcaaggactccgacgtgtacatcaccgataagaccgtgctggacatgcggagcatggacttcaagagcaactccgccgtggcctggtccaacaagtccgatttcgcctgcgccaacgccttcaacaacagcattatccccgaggacacattcttcccaagccccgagagcagcgactccaccgaccacgtgaagcccaaagagacagagaacaccaagcagcccagcaagagctgccacaagcccaaggccatcgtgcacaccgagaaagtgaacatgatgagcctgaccgtgctgggcctgcggatgctgttcgccaaaaccgtggccgtgaacttcctgctgaccgccaagctgttcttcctcctcaccgcc

SEQ ID NO: 39459 - DNA, 2175 bp, synthetic construct
  source 1..2175: mol_type = other DNA
atggccttaccagtgaccgccttgctcctgccgctggccttgctgctccacgccgccaggccggacatccagatgacacagagccctagcagcctgtctgccagcgtgggagacagagtgaccatcacctgtagagccagccaggacgtgaacacagccgtggcttggtatcagcagaagcctggcaaggcccctaagctgctgatctacagcgcctacttcctgtacagcggcgtgcccagcagattcagcggaagcagaagcggcaccgacttcaccctgacaatatccagcctccagcctgaggacttcgccacctactactgccagcagtacagcagatacagccccgtgacctttggacagggcaccaaggtggaaatcaagagactcgaggacctgaagaacgtgttcccacctgaggtggccgtgttcgagcctagcgaggccgagatcagccacacccagaaagccaccctcgtgtgcctggctaccggcttctaccccgaccatgtggaactgtcttggtgggtcaacggcaaagaggtgcacagcggcgtgtctaccgacccccagccactgaaagaacagcccgccctgaacgacagccggtactgcctgagcagcagactgagagtgtccgccaccttctggcagaacccccggaaccacttcagatgccaggtgcagttctacggcctgagcgagaacgacgagtggacccaggacagagccaagcccgtgacccagatcgtgtctgccgaagcctggggcagagccgatgatgtgattaagatccactggcaggaaaagaagtccaacaccatcctgggcagccaggaaggcaacaccatgaagaccaacgacacctacatgaagttcagctggctgaccgtgcccgagaagtccctggacaaagaacacagatgcatcgtgcggcacgaaaacaacaagaacggcgtggaccaggaaatcatcttcccacccatcaagaccgatgtgattacaatggaccccaaggacaactgctccaaggacgccaacgataccctgctgctccagctgaccaacaccagcgcctactacatgtacttgttgctgctgctgaagtccgtggtgtacttcgccatcatcacatgctgcctgctgcggagaaccgccttctgctgcaacggcgagaagtctagggccaagcgatctggatctggagcaacaaacttctcactactcaaacaagcaggtgacgtggaggagaatcccgggcctactagtatggactggatttggcgcatccttttccttgtcggcgctgctaccggcgcgcattccttcgaagaagttcagctggttgaaagtggtggcggcctggttcaacctggcggatctctgagactgagctgtgccgccagcggcttcaatgtgtacgcctctggaatgcactgggtccgacaggcccctggcaaaggacttgagtgggtcgccaaaatctaccccgacagcgactacacctattacgccgacagcgtgaagggcagattcaccatcagcgccgacaccagcaagaacaccgcctacctccagatgaactccctgagagccgaggacaccgccgtgtactactgtagcagagacagcagcttctactacgtgtacgctatggactactggggccagggcacactggtcacagtctcttctacgcgtatccagaaccctgatcctgccgtgtaccagctgcgggatagcaagagcagcgacaagagcgtgtgtctgttcaccgacttcgacagccagaccaacgtgtcccagagcaaggactccgacgtgtacatcaccgataagaccgtgctggacatgcggagcatggacttcaagagcaactccgccgtggcctggtccaacaagtccgatttcgcctgcgccaacgccttcaacaacagcattatccccgaggacacattcttcccaagccccgagagcagcgactccaccgaccacgtgaagcccaaagagacagagaacaccaagcagcccagcaagagctgccacaagcccaaggccatcgtgcacaccgagaaagtgaacatgatgagcctgaccgtgctgggcctgcggatgctgttcgccaaaaccgtggccgtgaacttcctgctgaccgccaagctgttcttcctc

SEQ ID NO: 39460 - DNA, 2607 bp, synthetic construct
  source 1..2607: mol_type = other DNA
atggccttaccagtgaccgccttgctcctgccgctggccttgctgctccacgccgccaggccgctcgaggaggacctgaagaacgtgttcccacctgaggtggccgtgttcgagcctagcgaggccgagatcagccacacccagaaagccaccctcgtgtgcctggctaccggcttctaccccgaccatgtggaactgtcttggtgggtcaacggcaaagaggtgcacagcggcgtgtgtaccgacccccagccactgaaagaacagcccgccctgaacgacagccggtactgcctgagcagcagactgagagtgtccgccaccttctggcagaacccccggaaccacttcagatgccaggtgcagttctacggcctgagcgagaacgacgagtggacccaggacagagccaagcccgtgacccagatcgtgtctgccgaagcctggggcagagccgattgcggctttaccagcgagagctaccagcagggcgtgctgagcgccaccaacctgagcgtgatcggcttcagaatcctgctgctgaaagtggccggctttaacctgctgatgaccctgcggctgtggtccagcagggccaagcgatctggatctggagcaacaaacttctcactactcaaacaagcaggtgacgtggaggagaatcccgggcctactagcatggccttaccagtgaccgccttgctcctgccgctggccttgctgctccacgccgccaggccggacatccagatgacacagagccctagcagcctgtctgccagcgtgggagacagagtgaccatcacctgtagagccagccaggacgtgaacacagccgtggcttggtatcagcagaagcctggcaaggcccctaagctgctgatctacagcgcctacttcctgtacagcggcgtgcccagcagattcagcggaagcagaagcggcaccgacttcaccctgacaatatccagcctccagcctgaggacttcgccacctactactgccagcagtacagcagatacagccccgtgacctttggacagggcaccaaggtggaaatcaagagaggcggaggcggaagtggaggcggaggatctggcggcggaggctctgaagttcagctggttgaaagtggtggcggcctggttcaacctggcggatctctgagactgagctgtgccgccagcggcttcaatgtgtacgcctctggaatgcactgggtccgacaggcccctggcaaaggacttgagtgggtcgccaaaatctaccccgacagcgactacacctattacgccgacagcgtgaagggcagattcaccatcagcgccgacaccagcaagaacaccgcctacctccagatgaactccctgagagccgaggacaccgccgtgtactactgtagcagagacagcagcttctactacgtgtacgctatggactactggggccagggcacactggtcacagtctcttctacgcgtatccagaaccctgatcctgccgtgtaccagctgcgggatagcaagagcagcgacaagagcgtgtgtctgttcaccgacttcgacagccagaccaacgtgtcccagagcaaggactccgacgtgtacatcaccgataagtgcgtgctggacatgcggagcatggacttcaagagcaactccgccgtggcctggtccaacaagtccgatttcgcctgcgccaacgccttcaacaacagcattatccccgaggacacattcttcccaagccccgagagcagctgcgacgtgaagctggtggaaaagagcttcgagacagacaccaacctgaacttccagatcctgtacgaggtgatcggcttcagaatcctgctgctgaaagtggccggctttaacctgctgatgaccctgcggctgtggtccagccgcgccaagagaagcggatctggcgtgaagcagaccctgaatttcgacctgctgaagctggctggcgacgtggaatccaacccaggcccttctagaggccatatgaccgagtacaagcccacggtgcgcctcgccacccgcgacgacgtccccagggccgtacgcaccctcgccgccgcgttcgccgactaccccgccacgcgccacaccgtcgatccggaccgccacatcgagcgggtcaccgagctgcaagaactcttcctcacgcgcgtcgggctcgacatcggcaaggtgtgggtcgcggacgacggcgccgcggtggcggtctggaccacgccggagagcgtcgaagcgggggcggtgttcgccgagatcggcccgcgcatggccgagttgagcggttcccggctggccgcgcagcaacagatggaaggcctcctggcgccgcaccggcccaaggagcccgcgtggttcctggccaccgtcggcgtctcgcccgaccaccagggcaagggtctgggcagcgccgtcgtgctccccggagtggaggcggccgagcgcgccggggtgcccgccttcctggagacctccgcgccccgcaacctccccttctacgagcggctcggcttcaccgtcaccgccgacgtcgaggtgcccgaaggaccgcgcacctggtgcatgacccgcaagcccggtgcctga

SEQ ID NO: 39461 - DNA, 2607 bp, synthetic construct
  source 1..2607: mol_type = other DNA
atggccttaccagtgaccgccttgctcctgccgctggccttgctgctccacgccgccaggccgctcgagatccagaaccctgatcctgccgtgtaccagctgcgggatagcaagagcagcgacaagagcgtgtgtctgttcaccgacttcgacagccagaccaacgtgtcccagagcaaggactccgacgtgtacatcaccgataagtgcgtgctggacatgcggagcatggacttcaagagcaactccgccgtggcctggtccaacaagtccgatttcgcctgcgccaacgccttcaacaacagcattatccccgaggacacattcttcccaagccccgagagcagctgcgacgtgaagctggtggaaaagagcttcgagacagacaccaacctgaacttccagatcctgtacgaggtgatcggcttcagaatcctgctgctgaaagtggccggctttaacctgctgatgaccctgcggctgtggtccagcagggccaagcgatctggatctggagcaacaaacttctcactactcaaacaagcaggtgacgtggaggagaatcccgggcctactagcatggccttaccagtgaccgccttgctcctgccgctggccttgctgctccacgccgccaggccggacatccagatgacacagagccctagcagcctgtctgccagcgtgggagacagagtgaccatcacctgtagagccagccaggacgtgaacacagccgtggcttggtatcagcagaagcctggcaaggcccctaagctgctgatctacagcgcctacttcctgtacagcggcgtgcccagcagattcagcggaagcagaagcggcaccgacttcaccctgacaatatccagcctccagcctgaggacttcgccacctactactgccagcagtacagcagatacagccccgtgacctttggacagggcaccaaggtggaaatcaagagaggcggaggcggaagtggaggcggaggatctggcggcggaggctctgaagttcagctggttgaaagtggtggcggcctggttcaacctggcggatctctgagactgagctgtgccgccagcggcttcaatgtgtacgcctctggaatgcactgggtccgacaggcccctggcaaaggacttgagtgggtcgccaaaatctaccccgacagcgactacacctattacgccgacagcgtgaagggcagattcaccatcagcgccgacaccagcaagaacaccgcctacctccagatgaactccctgagagccgaggacaccgccgtgtactactgtagcagagacagcagcttctactacgtgtacgctatggactactggggccagggcacactggtcacagtctcttctacgcgtgaggacctgaagaacgtgttcccacctgaggtggccgtgttcgagcctagcgaggccgagatcagccacacccagaaagccaccctcgtgtgcctggctaccggcttctaccccgaccatgtggaactgtcttggtgggtcaacggcaaagaggtgcacagcggcgtgtgtaccgacccccagccactgaaagaacagcccgccctgaacgacagccggtactgcctgagcagcagactgagagtgtccgccaccttctggcagaacccccggaaccacttcagatgccaggtgcagttctacggcctgagcgagaacgacgagtggacccaggacagagccaagcccgtgacccagatcgtgtctgccgaagcctggggcagagccgattgcggctttaccagcgagagctaccagcagggcgtgctgagcgccaccaacctgagcgtgatcggcttcagaatcctgctgctgaaagtggccggctttaacctgctgatgaccctgcggctgtggtccagccgcgccaagagaagcggatctggcgtgaagcagaccctgaatttcgacctgctgaagctggctggcgacgtggaatccaacccaggcccttctagaggccatatgaccgagtacaagcccacggtgcgcctcgccacccgcgacgacgtccccagggccgtacgcaccctcgccgccgcgttcgccgactaccccgccacgcgccacaccgtcgatccggaccgccacatcgagcgggtcaccgagctgcaagaactcttcctcacgcgcgtcgggctcgacatcggcaaggtgtgggtcgcggacgacggcgccgcggtggcggtctggaccacgccggagagcgtcgaagcgggggcggtgttcgccgagatcggcccgcgcatggccgagttgagcggttcccggctggccgcgcagcaacagatggaaggcctcctggcgccgcaccggcccaaggagcccgcgtggttcctggccaccgtcggcgtctcgcccgaccaccagggcaagggtctgggcagcgccgtcgtgctccccggagtggaggcggccgagcgcgccggggtgcccgccttcctggagacctccgcgccccgcaacctccccttctacgagcggctcggcttcaccgtcaccgccgacgtcgaggtgcccgaaggaccgcgcacctggtgcatgacccgcaagcccggtgcctga

SEQ ID NO: 39462 - DNA, 2607 bp, synthetic construct; identical to SEQ ID NO: 39460
  source 1..2607: mol_type = other DNA

SEQ ID NO: 39463 - DNA, 2931 bp, synthetic construct
  source 1..2931: mol_type = other DNA
atggccttaccagtgaccgccttgctcctgccgctggccttgctgctccacgccgccaggccgctcgaggaggacctgaagaacgtgttcccacctgaggtggccgtgttcgagcctagcgaggccgagatcagccacacccagaaagccaccctcgtgtgcctggctaccggcttctaccccgaccatgtggaactgtcttggtgggtcaacggcaaagaggtgcacagcggcgtgtctaccgacccccagccactgaaagaacagcccgccctgaacgacagccggtactgcctgagcagcagactgagagtgtccgccaccttctggcagaacccccggaaccacttcagatgccaggtgcagttctacggcctgagcgagaacgacgagtggacccaggacagagccaagcccgtgacccagatcgtgtctgccgaagcctggggcagagccgatgatgtgattaagatccactggcaggaaaagaagtccaacaccatcctgggcagccaggaaggcaacaccatgaagaccaacgacacctacatgaagttcagctggctgaccgtgcccgagaagtccctggacaaagaacacagatgcatcgtgcggcacgaaaacaacaagaacggcgtggaccaggaaatcatcttcccacccatcaagaccgatgtgattacaatggaccccaaggacaactgctccaaggacgccaacgataccctgctgctccagctgaccaacaccagcgcctactacatgtacttgttgctgctgctgaagtccgtggtgtacttcgccatcatcacatgctgcctgctgatggctatggtcaagcggaaggacagccggggaagggccaagcgatctggatctggagcaacaaacttctcactactcaaacaagcaggtgacgtggaggagaatcccgggcctactagcatggccttaccagtgaccgccttgctcctgccgctggccttgctgctccacgccgccaggccggacatccagatgacacagagccctagcagcctgtctgccagcgtgggagacagagtgaccatcacctgtagagccagccaggacgtgaacacagccgtggcttggtatcagcagaagcctggcaaggcccctaagctgctgatctacagcgcctacttcctgtacagcggcgtgcccagcagattcagcggaagcagaagcggcaccgacttcaccctgacaatatccagcctccagcctgaggacttcgccacctactactgccagcagtacagcagatacagccccgtgacctttggacagggcaccaaggtggaaatcaagagaggcggaggcggaagtggaggcggaggatctggcggcggaggctctgaagttcagctggttgaaagtggtggcggcctggttcaacctggcggatctctgagactgagctgtgccgccagcggcttcaatgtgtacgcctctggaatgcactgggtccgacaggcccctggcaaaggacttgagtgggtcgccaaaatctaccccgacagcgactacacctattacgccgacagcgtgaagggcagattcaccatcagcgccgacaccagcaagaacaccgcctacctccagatgaactccctgagagccgaggacaccgccgtgtactactgtagcagagacagcagcttctactacgtgtacgctatggactactggggccagggcacactggtcacagtctcttctacgcgtatccagaaccctgatcctgccgtgtaccagctgcgggatagcaagagcagcgacaagagcgtgtgtctgttcaccgacttcgacagccagaccaacgtgtcccagagcaaggactccgacgtgtacatcaccgataagaccgtgctggacatgcggagcatggacttcaagagcaactccgccgtggcctggtccaacaagtccgatttcgcctgcgccaacgccttcaacaacagcattatccccgaggacacattcttcccaagccccgagagcagcgactccaccgaccacgtgaagcccaaagagacagagaacaccaagcagcccagcaagagctgccacaagcccaaggccatcgtgcacaccgagaaagtgaacatgatgagcctgaccgtgctgggcctgcggatgctgttcgccaaaaccgtggccgtgaacttcctgctgaccgccaagctgttcttcctcctcaccgcccgcgccaagagaagcggatctggcgtgaagcagaccctgaatttcgacctgctgaagctggctggcgacgtggaatccaacccaggcccttctagaggccatatgaccgagtacaagcccacggtgcgcctcgccacccgcgacgacgtccccagggccgtacgcaccctcgccgccgcgttcgccgactaccccgccacgcgccacaccgtcgatccggaccgccacatcgagcgggtcaccgagctgcaagaactcttcctcacgcgcgtcgggctcgacatcggcaaggtgtgggtcgcggacgacggcgccgcggtggcggtctggaccacgccggagagcgtcgaagcgggggcggtgttcgccgagatcggcccgcgcatggccgagttgagcggttcccggctggccgcgcagcaacagatggaaggcctcctggcgccgcaccggcccaaggagcccgcgtggttcctggccaccgtcggcgtctcgcccgaccaccagggcaagggtctgggcagcgccgtcgtgctccccggagtggaggcggccgagcgcgccggggtgcccgccttcctggagacctccgcgccccgcaacctccccttctacgagcggctcggcttcaccgtcaccgccgacgtcgaggtgcccgaaggaccgcgcacctggtgcatgacccgcaagcccggtgcctga

SEQ ID NO: 39464 - DNA, 2931 bp, synthetic construct
  source 1..2931: mol_type = other DNA
atggccttaccagtgaccgccttgctcctgccgctggccttgctgctccacgccgccaggccgctcgagatccagaaccctgatcctgccgtgtaccagctgcgggatagcaagagcagcgacaagagcgtgtgtctgttcaccgacttcgacagccagaccaacgtgtcccagagcaaggactccgacgtgtacatcaccgataagaccgtgctggacatgcggagcatggacttcaagagcaactccgccgtggcctggtccaacaagtccgatttcgcctgcgccaacgccttcaacaacagcattatccccgaggacacattcttcccaagccccgagagcagcgactccaccgaccacgtgaagcccaaagagacagagaacaccaagcagcccagcaagagctgccacaagcccaaggccatcgtgcacaccgagaaagtgaacatgatgagcctgaccgtgctgggcctgcggatgctgttcgccaaaaccgtggccgtgaacttcctgctgaccgccaagctgttcttcctcctcaccgccagggccaagcgatctggatctggagcaacaaacttctcactactcaaacaagcaggtgacgtggaggagaatcccgggcctactagcatggccttaccagtgaccgccttgctcctgccgctggccttgctgctccacgccgccaggccggacatccagatgacacagagccctagcagcctgtctgccagcgtgggagacagagtgaccatcacctgtagagccagccaggacgtgaacacagccgtggcttggtatcagcagaagcctggcaaggcccctaagctgctgatctacagcgcctacttcctgtacagcggcgtgcccagcagattcagcggaagcagaagcggcaccgacttcaccctgacaatatccagcctccagcctgaggacttcgccacctactactgccagcagtacagcagatacagccccgtgacctttggacagggcaccaaggtggaaatcaagagaggcggaggcggaagtggaggcggaggatctggcggcggaggctctgaagttcagctggttgaaagtggtggcggcctggttcaacctggcggatctctgagactgagctgtgccgccagcggcttcaatgtgtacgcctctggaatgcactgggtccgacaggcccctggcaaaggacttgagtgggtcgccaaaatctaccccgacagcgactacacctattacgccgacagcgtgaagggcagattcaccatcagcgccgacaccagcaagaacaccgcctacctccagatgaactccctgagagccgaggacaccgccgtgtactactgtagcagagacagcagcttctactacgtgtacgctatggactactggggccagggcacactggtcacagtctcttctacgcgtgaggacctgaagaacgtgttcccacctgaggtggccgtgttcgagcctagcgaggccgagatcagccacacccagaaagccaccctcgtgtgcctggctaccggcttctaccccgaccatgtggaactgtcttggtgggtcaacggcaaagaggtgcacagcggcgtgtctaccgacccccagccactgaaagaacagcccgccctgaacgacagccggtactgcctgagcagcagactgagagtgtccgccaccttctggcagaacccccggaaccacttcagatgccaggtgcagttctacggcctgagcgagaacgacgagtggacccaggacagagccaagcccgtgacccagatcgtgtctgccgaagcctggggcagagccgatgatgtgattaagatccactggcaggaaaagaagtccaacaccatcctgggcagccaggaaggcaacaccatgaagaccaacgacacctacatgaagttcagctggctgaccgtgcccgagaagtccctggacaaagaacacagatgcatcgtgcggcacgaaaacaacaagaacggcgtggaccaggaaatcatcttcccacccatcaagaccgatgtgattacaatggaccccaaggacaactgctccaaggacgccaacgataccctgctgctccagctgaccaacaccagcgcctactacatgtacttgttgctgctgctgaagtccgtggtgtacttcgccatcatcacatgctgcctgctgatggctatggtcaagcggaaggacagccggggacgcgccaagagaagcggatctggcgtgaagcagaccctgaatttcgacctgctgaagctggctggcgacgtggaatccaacccaggcccttctagaggccatatgaccgagtacaagcccacggtgcgcctcgccacccgcgacgacgtccccagggccgtacgcaccctcgccgccgcgttcgccgactaccccgccacgcgccacaccgtcgatccggaccgccacatcgagcgggtcaccgagctgcaagaactcttcctcacgcgcgtcgggctcgacatcggcaaggtgtgggtcgcggacgacggcgccgcggtggcggtctggaccacgccggagagcgtcgaagcgggggcggtgttcgccgagatcggcccgcgcatggccgagttgagcggttcccggctggccgcgcagcaacagatggaaggcctcctggcgccgcaccggcccaaggagcccgcgtggttcctggccaccgtcggcgtctcgcccgaccaccagggcaagggtctgggcagcgccgtcgtgctccccggagtggaggcggccgagcgcgccggggtgcccgccttcctggagacctccgcgccccgcaacctccccttctacgagcggctcggcttcaccgtcaccgccgacgtcgaggtgcccgaaggaccgcgcacctggtgcatgacccgcaagcccggtgcctga

SEQ ID NO: 39465 - DNA, 2925 bp, synthetic construct
  source 1..2925: mol_type = other DNA
atggccttaccagtgaccgccttgctcctgccgctggccttgctgctccacgccgccaggccgctcgaggaggacctgaagaacgtgttcccacctgaggtggccgtgttcgagcctagcgaggccgagatcagccacacccagaaagccaccctcgtgtgcctggctaccggcttctaccccgaccatgtggaactgtcttggtgggtcaacggcaaagaggtgcacagcggcgtgtgtaccgacccccagccactgaaagaacagcccgccctgaacgacagccggtactgcctgagcagcagactgagagtgtccgccaccttctggcagaacccccggaaccacttcagatgccaggtgcagttctacggcctgagcgagaacgacgagtggacccaggacagagccaagcccgtgacccagatcgtgtctgccgaagcctggggcagagccgatgatgtgattaagatccactggcaggaaaagaagtccaacaccatcctgggcagccaggaaggcaacaccatgaagaccaacgacacctacatgaagttcagctggctgaccgtgcccgagaagtccctggacaaagaacacagatgcatcgtgcggcacgaaaacaacaagaacggcgtggaccaggaaatcatcttcccacccatcaagaccgatgtgattacaatggaccccaaggacaactgctccaaggacgccaacgataccctgctgctccagctgaccaacaccagcgcctactacatgtacttgttgctgctgctgaagtccgtggtgtacttcgccatcatcacatgctgcctgctgcggagaaccgccttctgctgcaacggcgagaagtctagggccaagcgatctggatctggagcaacaaacttctcactactcaaacaagcaggtgacgtggaggagaatcccgggcctactagcatggccttaccagtgaccgccttgctcctgccgctggccttgctgctccacgccgccaggccggacatccagatgacacagagccctagcagcctgtctgccagcgtgggagacagagtgaccatcacctgtagagccagccaggacgtgaacacagccgtggcttggtatcagcagaagcctggcaaggcccctaagctgctgatctacagcgcctacttcctgtacagcggcgtgcccagcagattcagcggaagcagaagcggcaccgacttcaccctgacaatatccagcctccagcctgaggacttcgccacctactactgccagcagtacagcagatacagccccgtgacctttggacagggcaccaaggtggaaatcaagagaggcggaggcggaagtggaggcggaggatctggcggcggaggctctgaagttcagctggttgaaagtggtggcggcctggttcaacctggcggatctctgagactgagctgtgccgccagcggcttcaatgtgtacgcctctggaatgcactgggtccgacaggcccctggcaaaggacttgagtgggtcgccaaaatctaccccgacagcgactacacctattacgccgacagcgtgaagggcagattcaccatcagcgccgacaccagcaagaacaccgcctacctccagatgaactccctgagagccgaggacaccgccgtgtactactgtagcagagacagcagcttctactacgtgtacgctatggactactggggccagggcacactggtcacagtctcttctacgcgtatccagaaccctgatcctgccgtgtaccagctgcgggatagcaagagcagcgacaagagcgtgtgtctgttcaccgacttcgacagccagaccaacgtgtcccagagcaaggactccgacgtgtacatcaccgataagtgcgtgctggacatgcggagcatggacttcaagagcaactccgccgtggcctggtccaacaagtccgatttcgcctgcgccaacgccttcaacaacagcattatccccgaggacacattcttcccaagccccgagagcagcgactccaccgaccacgtgaagcccaaagagacagagaacaccaagcagcccagcaagagctgccacaagcccaaggccatcgtgcacaccgagaaagtgaacatgatgagcctgaccgtgctgggcctgcggatgctgttcgccaaaaccgtggccgtgaacttcctgctgaccgccaagctgttcttcctccgcgccaagagaagcggatctggcgtgaagcagaccctgaatttcgacctgctgaagctggctggcgacgtggaatccaacccaggcccttctagaggccatatgaccgagtacaagcccacggtgcgcctcgccacccgcgacgacgtccccagggccgtacgcaccctcgccgccgcgttcgccgactaccccgccacgcgccacaccgtcgatccggaccgccacatcgagcgggtcaccgagctgcaagaactcttcctcacgcgcgtcgggctcgacatcggcaaggtgtgggtcgcggacgacggcgccgcggtggcggtctggaccacgccggagagcgtcgaagcgggggcggtgttcgccgagatcggcccgcgcatggccgagttgagcggttcccggctggccgcgcagcaacagatggaaggcctcctggcgccgcaccggcccaaggagcccgcgtggttcctggccaccgtcggcgtctcgcccgaccaccagggcaagggtctgggcagcgccgtcgtgctccccggagtggaggcggccgagcgcgccggggtgcccgccttcctggagacctccgcgccccgcaacctccccttctacgagcggctcggcttcaccgtcaccgccgacgtcgaggtgcccgaaggaccgcgcacctggtgcatgacccgcaagcccggtgcctga

SEQ ID NO: 39466 - DNA, 2925 bp, synthetic construct
  source 1..2925: mol_type = other DNA
atggccttaccagtgaccgccttgctcctgccgctggccttgctgctccacgccgccaggccgctcgagatccagaaccctgatcctgccgtgtaccagctgcgggatagcaagagcagcgacaagagcgtgtgtctgttcaccgacttcgacagccagaccaacgtgtcccagagcaaggactccgacgtgtacatcaccgataagtgcgtgctggacatgcggagcatggacttcaagagcaactccgccgtggcctggtccaacaagtccgatttcgcctgcgccaacgccttcaacaacagcattatccccgaggacacattcttcccaagccccgagagcagcgactccaccgaccacgtgaagcccaaagagacagagaacaccaagcagcccagcaagagctgccacaagcccaaggccatcgtgcacaccgagaaagtgaacatgatgagcctgaccgtgctgggcctgcggatgctgttcgccaaaaccgtggccgtgaacttcctgctgaccgccaagctgttcttcctcagggccaagcgatctggatctggagcaacaaacttctcactactcaaacaagcaggtgacgtggaggagaatcccgggcctactagcatggccttaccagtgaccgccttgctcctgccgctggccttgctgctccacgccgccaggccggacatccagatgacacagagccctagcagcctgtctgccagcgtgggagacagagtgaccatcacctgtagagccagccaggacgtgaacacagccgtggcttggtatcagcagaagcctggcaaggcccctaagctgctgatctacagcgcctacttcctgtacagcggcgtgcccagcagattcagcggaagcagaagcggcaccgacttcaccctgacaatatccagcctccagcctgaggacttcgccacctactactgccagcagtacagcagatacagccccgtgacctttggacagggcaccaaggtggaaatcaagagaggcggaggcggaagtggaggcggaggatctggcggcggaggctctgaagttcagctggttgaaagtggtggcggcctggttcaacctggcggatctctgagactgagctgtgccgccagcggcttcaatgtgtacgcctctggaatgcactgggtccgacaggcccctggcaaaggacttgagtgggtcgccaaaatctaccccgacagcgactacacctattacgccgacagcgtgaagggcagattcaccatcagcgccgacaccagcaagaacaccgcctacctccagatgaactccctgagagccgaggacaccgccgtgtactactgtagcagagacagcagcttctactacgtgtacgctatggactactggggccagggcacactggtcacagtctcttctacgcgtgaggacctgaagaacgtgttcccacctgaggtggccgtgttcgagcctagcgaggccgagatcagccacacccagaaagccaccctcgtgtgcctggctaccggcttctaccccgaccatgtggaactgtcttggtgggtcaacggcaaagaggtgcacagcggcgtgtgtaccgacccccagccactgaaagaacagcccgccctgaacgacagccggtactgcctgagcagcagactgagagtgtccgccaccttctggcagaacccccggaaccacttcagatgccaggtgcagttctacggcctgagcgagaacgacgagtggacccaggacagagccaagcccgtgacccagatcgtgtctgccgaagcctggggcagagccgatgatgtgattaagatccactggcaggaaaagaagtccaacaccatcctgggcagccaggaaggcaacaccatgaagaccaacgacacctacatgaagttcagctggctgaccgtgcccgagaagtccctggacaaagaacacagatgcatcgtgcggcacgaaaacaacaagaacggcgtggaccaggaaatcatcttcccacccatcaagaccgatgtgattacaatggaccccaaggacaactgctccaaggacgccaacgataccctgctgctccagctgaccaacaccagcgcctactacatgtacttgttgctgctgctgaagtccgtggtgtacttcgccatcatcacatgctgcctgctgcggagaaccgccttctgctgcaacggcgagaagtctcgcgccaagagaagcggatctggcgtgaagcagaccctgaatttcgacctgctgaagctggctggcgacgtggaatccaacccaggcccttctagaggccatatgaccgagtacaagcccacggtgcgcctcgccacccgcgacgacgtccccagggccgtacgcaccctcgccgccgcgttcgccgactaccccgccacgcgccacaccgtcgatccggaccgccacatcgagcgggtcaccgagctgcaagaactcttcctcacgcgcgtcgggctcgacatcggcaaggtgtgggtcgcggacgacggcgccgcggtggcggtctggaccacgccggagagcgtcgaagcgggggcggtgttcgccgagatcggcccgcgcatggccgagttgagcggttcccggctggccgcgcagcaacagatggaaggcctcctggcgccgcaccggcccaaggagcccgcgtggttcctggccaccgtcggcgtctcgcccgaccaccagggcaagggtctgggcagcgccgtcgtgctccccggagtggaggcggccgagcgcgccggggtgcccgccttcctggagacctccgcgccccgcaacctccccttctacgagcggctcggcttcaccgtcaccgccgacgtcgaggtgcccgaaggaccgcgcacctggtgcatgacccgcaagcccggtgcctga

SEQ ID NO: 39467 - DNA, 2925 bp, synthetic construct
  source 1..2925: mol_type = other DNA
atggccttaccagtgaccgccttgctcctgccgctggccttgctgctccacgccgccaggccgctcgaggaggacctgaagaacgtgttcccacctgaggtggccgtgttcgagcctagcgaggccgagatcagccacacccagaaagccaccctcgtgtgcctggctaccggcttctaccccgaccatgtggaactgtcttggtgggtcaacggcaaagaggtgcacagcggcgtgtctaccgacccccagccactgaaagaacagcccgccctgaacgacagccggtactgcctgagcagcagactgagagtgtccgccaccttctggcagaacccccggaaccacttcagatgccaggtgcagttctacggcctgagcgagaacgacgagtggacccaggacagagccaagcccgtgacccagatcgtgtctgccgaagcctggggcagagccgatgatgtgattaagatccactggcaggaaaagaagtccaacaccatcctgggcagccaggaaggcaacaccatgaagaccaacgacacctacatgaagttcagctggctgaccgtgcccgagaagtccctggacaaagaacacagatgcatcgtgcggcacgaaaacaacaagaacggcgtggaccaggaaatcatcttcccacccatcaagaccgatgtgattacaatggaccccaaggacaactgctccaaggacgccaacgataccctgctgctccagctgaccaacaccagcgcctactacatgtacttgttgctgctgctgaagtccgtggtgtacttcgccatcatcacatgctgcctgctgcggagaaccgccttctgctgcaacggcgagaagtctagggccaagcgatctggatctggagcaacaaacttctcactactcaaacaagcaggtgacgtggaggagaatcccgggcctactagcatggccttaccagtgaccgccttgctcctgccgctggccttgctgctccacgccgccaggccggacatccagatgacacagagccctagcagcctgtctgccagcgtgggagacagagtgaccatcacctgtagagccagccaggacgtgaacacagccgtggcttggtatcagcagaagcctggcaaggcccctaagctgctgatctacagcgcctacttcctgtacagcggcgtgcccagcagattcagcggaagcagaagcggcaccgacttcaccctgacaatatccagcctccagcctgaggacttcgccacctactactgccagcagtacagcagatacagccccgtgacctttggacagggcaccaaggtggaaatcaagagaggcggaggcggaagtggaggcggaggatctggcggcggaggctctgaagttcagctggttgaaagtggtggcggcctggttcaacctggcggatctctgagactgagctgtgccgccagcggcttcaatgtgtacgcctctggaatgcactgggtccgacaggcccctggcaaaggacttgagtgggtcgccaaaatctaccccgacagcgactacacctattacgccgacagcgtgaagggcagattcaccatcagcgccgacaccagcaagaacaccgcctacctccagatgaactccctgagagccgaggacaccgccgtgtactactgtagcagagacagcagcttctactacgtgtacgctatggactactggggccagggcacactggtcacagtctcttctacgcgtatccagaaccctgatcctgccgtgtaccagctgcgggatagcaagagcagcgacaagagcgtgtgtctgttcaccgacttcgacagccagaccaacgtgtcccagagcaaggactccgacgtgtacatcaccgataagaccgtgctggacatgcggagcatggacttcaagagcaactccgccgtggcctggtccaacaagtccgatttcgcctgcgccaacgccttcaacaacagcattatccccgaggacacattcttcccaagccccgagagcagcgactccaccgaccacgtgaagcccaaagagacagagaacaccaagcagcccagcaagagctgccacaagcccaaggccatcgtgcacaccgagaaagtgaacatgatgagcctgaccgtgctgggcctgcggatgctgttcgccaaaaccgtggccgtgaacttcctgctgaccgccaagctgttcttcctccgcgccaagagaagcggatctggcgtgaagcagaccctgaatttcgacctgctgaagctggctggcgacgtggaatccaacccaggcccttctagaggccatatgaccgagtacaagcccacggtgcgcctcgccacccgcgacgacgtccccagggccgtacgcaccctcgccgccgcgttcgccgactaccccgccacgcgccacaccgtcgatccggaccgccacatcgagcgggtcaccgagctgcaagaactcttcctcacgcgcgtcgggctcgacatcggcaaggtgtgggtcgcggacgacggcgccgcggtggcggtctggaccacgccggagagcgtcgaagcgggggcggtgttcgccgagatcggcccgcgcatggccgagttgagcggttcccggctggccgcgcagcaacagatggaaggcctcctggcgccgcaccggcccaaggagcccgcgtggttcctggccaccgtcggcgtctcgcccgaccaccagggcaagggtctgggcagcgccgtcgtgctccccggagtggaggcggccgagcgcgccggggtgcccgccttcctggagacctccgcgccccgcaacctccccttctacgagcggctcggcttcaccgtcaccgccgacgtcgaggtgcccgaaggaccgcgcacctggtgcatgacccgcaagcccggtgcctga

SEQ ID NO: 39468 - DNA, 2925 bp, synthetic construct
  source 1..2925: mol_type = other DNA
atggccttaccagtgaccgccttgctcctgccgctggccttgctgctccacgccgccaggccgctcgagatccagaaccctgatcctgccgtgtaccagctgcgggatagcaagagcagcgacaagagcgtgtgtctgttcaccgacttcgacagccagaccaacgtgtcccagagcaaggactccgacgtgtacatcaccgataagaccgtgctggacatgcggagcatggacttcaagagcaactccgccgtggcctggtccaacaagtccgatttcgcctgcgccaacgccttcaacaacagcattatccccgaggacacattcttcccaagccccgagagcagcgactccaccgaccacgtgaagcccaaagagacagagaacaccaagcagcccagcaagagctgccacaagcccaaggccatcgtgcacaccgagaaagtgaacatgatgagcctgaccgtgctgggcctgcggatgctgttcgccaaaaccgtggccgtgaacttcctgctgaccgccaagctgttcttcctcagggccaagcgatctggatctggagcaacaaacttctcactactcaaacaagcaggtgacgtggaggagaatcccgggcctactagcatggccttaccagtgaccgccttgctcctgccgctggccttgctgctccacgccgccaggccggacatccagatgacacagagccctagcagcctgtctgccagcgtgggagacagagtgaccatcacctgtagagccagccaggacgtgaacacagccgtggcttggtatcagcagaagcctggcaaggcccctaagctgctgatctacagcgcctacttcctgtacagcggcgtgcccagcagattcagcggaagcagaagcggcaccgacttcaccctgacaatatccagcctccagcctgaggacttcgccacctactactgccagcagtacagcagatacagccccgtgacctttggacagggcaccaaggtggaaatcaagagaggcggaggcggaagtggaggcggaggatctggcggcggaggctctgaagttcagctggttgaaagtggtggcggcctggttcaacctggcggatctctgagactgagctgtgccgccagcggcttcaatgtgtacgcctctggaatgcactgggtccgacaggcccctggcaaaggacttgagtgggtcgccaaaatctaccccgacagcgactacacctattacgccgacagcgtgaagggcagattcaccatcagcgccgacaccagcaagaacaccgcctacctccagatgaactccctgagagccgaggacaccgccgtgtactactgtagcagagacagcagcttctactacgtgtacgctatggactactggggccagggcacactggtcacagtctcttctacgcgtgaggacctgaagaacgtgttcccacctgaggtggccgtgttcgagcctagcgaggccgagatcagccacacccagaaagccaccctcgtgtgcctggctaccggcttctaccccgaccatgtggaactgtcttggtgggtcaacggcaaagaggtgcacagcggcgtgtctaccgacccccagccactgaaagaacagcccgccctgaacgacagccggtactgcctgagcagcagactgagagtgtccgccaccttctggcagaacccccggaaccacttcagatgccaggtgcagttctacggcctgagcgagaacgacgagtggacccaggacagagccaagcccgtgacccagatcgtgtctgccgaagcctggggcagagccgatgatgtgattaagatccactggcaggaaaagaagtccaacaccatcctgggcagccaggaaggcaacaccatgaagaccaacgacacctacatgaagttcagctggctgaccgtgcccgagaagtccctggacaaagaacacagatgcatcgtgcggcacgaaaacaacaagaacggcgtggaccaggaaatcatcttcccacccatcaagaccgatgtgattacaatggaccccaaggacaactgctccaaggacgccaacgataccctgctgctccagctgaccaacaccagcgcctactacatgtacttgttgctgctgctgaagtccgtggtgtacttcgccatcatcacatgctgcctgctgcggagaaccgccttctgctgcaacggcgagaagtctcgcgccaagagaagcggatctggcgtgaagcagaccctgaatttcgacctgctgaagctggctggcgacgtggaatccaacccaggcccttctagaggccatatgaccgagtacaagcccacggtgcgcctcgccacccgcgacgacgtccccagggccgtacgcaccctcgccgccgcgttcgccgactaccccgccacgcgccacaccgtcgatccggaccgccacatcgagcgggtcaccgagctgcaagaactcttcctcacgcgcgtcgggctcgacatcggcaaggtgtgggtcgcggacgacggcgccgcggtggcggtctggaccacgccggagagcgtcgaagcgggggcggtgttcgccgagatcggcccgcgcatggccgagttgagcggttcccggctggccgcgcagcaacagatggaaggcctcctggcgccgcaccggcccaaggagcccgcgtggttcctggccaccgtcggcgtctcgcccgaccaccagggcaagggtctgggcagcgccgtcgtgctccccggagtggaggcggccgagcgcgccggggtgcccgccttcctggagacctccgcgccccgcaacctccccttctacgagcggctcggcttcaccgtcaccgccgacgtcgaggtgcccgaaggaccgcgcacctggtgcatgacccgcaagcccggtgcctga

SEQ ID NO: 39469 - DNA, 2619 bp, synthetic construct
  source 1..2619: mol_type = other DNA
atggccttaccagtgaccgccttgctcctgccgctggccttgctgctccacgccgccaggccgctcgaggaggacctgaagaacgtgttcccacctgaggtggccgtgttcgagcctagcaaggccgagatcgcccacacccagaaagccaccctcgtgtgcctggctaccggcttctaccccgaccatgtggaactgtcttggtgggtcaacggcaaagaggtgcacagcggcgtgtgtaccgacccccagccactgaaagaacagcccgccctgaacgacagccggtactgcctgagcagcagactgagagtgtccgccaccttctggcagaacccccggaaccacttcagatgccaggtgcagttctacggcctgagcgagaacgacgagtggacccaggacagagccaagcccgtgacccagatcgtgtctgccgaagcctggggcagagccgattgcggcatcaccagcgccagctaccaccagggcgtgctgagcgccaccatcctgtacgagatcctgctgggcaaggccaccctgtacgccgtgctggtgtctgccctggtgctgatggctatggtcaagcggaaggacagccggggaagggccaagcgatctggatctggagcaacaaacttctcactactcaaacaagcaggtgacgtggaggagaatcccgggcctactagcatggccttaccagtgaccgccttgctcctgccgctggccttgctgctccacgccgccaggccggacatccagatgacacagagccctagcagcctgtctgccagcgtgggagacagagtgaccatcacctgtagagccagccaggacgtgaacacagccgtggcttggtatcagcagaagcctggcaaggcccctaagctgctgatctacagcgcctacttcctgtacagcggcgtgcccagcagattcagcggaagcagaagcggcaccgacttcaccctgacaatatccagcctccagcctgaggacttcgccacctactactgccagcagtacagcagatacagccccgtgacctttggacagggcaccaaggtggaaatcaagagaggcggaggcggaagtggaggcggaggatctggcggcggaggctctgaagttcagctggttgaaagtggtggcggcctggttcaacctggcggatctctgagactgagctgtgccgccagcggcttcaatgtgtacgcctctggaatgcactgggtccgacaggcccctggcaaaggacttgagtgggtcgccaaaatctaccccgacagcgactacacctattacgccgacagcgtgaagggcagattcaccatcagcgccgacaccagcaagaacaccgcctacctccagatgaactccctgagagccgaggacaccgccgtgtactactgtagcagagacagcagcttctactacgtgtacgctatggactactggggccagggcacactggtcacagtctcttctacgcgtatccagaaccctgatcctgccgtgtaccagctgcgggatagcaagagcagcgacaagagcgtgtgtctgttcaccgacttcgacagccagaccaacgtgtcccagagcaaggactccgacgtgtacatcaccgataagtgcgtgctggacatgcggagcatggacttcaagagcaactccgccgtggcctggtccaacaagtccgatttcgcctgcgccaacgccttcaacaacagcattatccccgaggacacattcttcccaagcagcgacgtgccctgcgacgtgaagctggtggaaaagagcttcgagacagacaccaacctgaacttccagaacctgagcgtgatcggcttcagaatcctgctgctgaaagtggccggctttaacctgctgatgaccctgcggctgtggtccagccgcgccaagagaagcggatctggcgtgaagcagaccctgaatttcgacctgctgaagctggctggcgacgtggaatccaacccaggcccttctagaggccatatgaccgagtacaagcccacggtgcgcctcgccacccgcgacgacgtccccagggccgtacgcaccctcgccgccgcgttcgccgactaccccgccacgcgccacaccgtcgatccggaccgccacatcgagcgggtcaccgagctgcaagaactcttcctcacgcgcgtcgggctcgacatcggcaaggtgtgggtcgcggacgacggcgccgcggtggcggtctggaccacgccggagagcgtcgaagcgggggcggtgttcgccgagatcggcccgcgcatggccgagttgagcggttcccggctggccgcgcagcaacagatggaaggcctcctggcgccgcaccggcccaaggagcccgcgtggttcctggccaccgtcggcgtctcgcccgaccaccagggcaagggtctgggcagcgccgtcgtgctccccggagtggaggcggccgagcgcgccggggtgcccgccttcctggagacctccgcgccccgcaacctccccttctacgagcggctcggcttcaccgtcaccgccgacgtcgaggtgcccgaaggaccgcgcacctggtgcatgacccgcaagcccggtgcctga

SEQ ID NO: 39470 - DNA, 2619 bp, synthetic construct
  source 1..2619: mol_type = other DNA
atggccttaccagtgaccgccttgctcctgccgctggccttgctgctccacgccgccaggccgctcgagatccagaaccctgatcctgccgtgtaccagctgcgggatagcaagagcagcgacaagagcgtgtgtctgttcaccgacttcgacagccagaccaacgtgtcccagagcaaggactccgacgtgtacatcaccgataagtgcgtgctggacatgcggagcatggacttcaagagcaactccgccgtggcctggtccaacaagtccgatttcgcctgcgccaacgccttcaacaacagcattatccccgaggacacattcttcccaagcagcgacgtgccctgcgacgtgaagctggtggaaaagagcttcgagacagacaccaacctgaacttccagaacctgagcgtgatcggcttcagaatcctgctgctgaaagtggccggctttaacctgctgatgaccctgcggctgtggtccagcagggccaagcgatctggatctggagcaacaaacttctcactactcaaacaagcaggtgacgtggaggagaatcccgggcctactagcatggccttaccagtgaccgccttgctcctgccgctggccttgctgctccacgccgccaggccggacatccagatgacacagagccctagcagcctgtctgccagcgtgggagacagagtgaccatcacctgtagagccagccaggacgtgaacacagccgtggcttggtatcagcagaagcctggcaaggcccctaagctgctgatctacagcgcctacttcctgtacagcggcgtgcccagcagattcagcggaagcagaagcggcaccgacttcaccctgacaatatccagcctccagcctgaggacttcgccacctactactgccagcagtacagcagatacagccccgtgacctttggacagggcaccaaggtggaaatcaagagaggcggaggcggaagtggaggcggaggatctggcggcggaggctctgaagttcagctggttgaaagtggtggcggcctggttcaacctggcggatctctgagactgagctgtgccgccagcggcttcaatgtgtacgcctctggaatgcactgggtccgacaggcccctggcaaaggacttgagtgggtcgccaaaatctaccccgacagcgactacacctattacgccgacagcgtgaagggcagattcaccatcagcgccgacaccagcaagaacaccgcctacctccagatgaactccctgagagccgaggacaccgccgtgtactactgtagcagagacagcagcttctactacgtgtacgctatggactactggggccagggcacactggtcacagtctcttctacgcgtgaggacctgaagaacgtgttcccacctgaggtggccgtgttcgagcctagcaaggccgagatcgcccacacccagaaagccaccctcgtgtgcctggctaccggcttctaccccgaccatgtggaactgtcttggtgggtcaacggcaaagaggtgcacagcggcgtgtgtaccgacccccagccactgaaagaacagcccgccctgaacgacagccggtactgcctgagcagcagactgagagtgtccgccaccttctggcagaacccccggaaccacttcagatgccaggtgcagttctacggcctgagcgagaacgacgagtggacccaggacagagccaagcccgtgacccagatcgtgtctgccgaagcctggggcagagccgattgcggcatcaccagcgccagctaccaccagggcgtgctgagcgccaccatcctgtacgagatcctgctgggcaaggccaccctgtacgccgtgctggtgtctgccctggtgctgatggctatggtcaagcggaaggacagccggggacgcgccaagagaagcggatctggcgtgaagcagaccctgaatttcgacctgctgaagctggctggcgacgtggaatccaacccaggcccttctagaggccatatgaccgagtacaagcccacggtgcgcctcgccacccgcgacgacgtccccagggccgtacgcaccctcgccgccgcgttcgccgactaccccgccacgcgccacaccgtcgatccggaccgccacatcgagcgggtcaccgagctgcaagaactcttcctcacgcgcgtcgggctcgacatcggcaaggtgtgggtcgcggacgacggcgccgcggtggcggtctggaccacgccggagagcgtcgaagcgggggcggtgttcgccgagatcggcccgcgcatggccgagttgagcggttcccggctggccgcgcagcaacagatggaaggcctcctggcgccgcaccggcccaaggagcccgcgtggttcctggccaccgtcggcgtctcgcccgaccaccagggcaagggtctgggcagcgccgtcgtgctccccggagtggaggcggccgagcgcgccggggtgcccgccttcctggagacctccgcgccccgcaacctccccttctacgagcggctcggcttcaccgtcaccgccgacgtcgaggtgcccgaaggaccgcgcacctggtgcatgacccgcaagcccggtgcctga

SEQ ID NO: 39471 - DNA, 2298 bp, synthetic construct
  source 1..2298: mol_type = other DNA
atggccttaccagtgaccgccttgctcctgccgctggccttgctgctccacgccgccaggccgctcgagcagagttttgggttgttggaccctaaattgtgctatctgttggacggaatcctgttcatttacggagtgatcctgaccgcattgttcctgcgggttaagttttccagatccgcagacgcacccgcttaccaacaagggcagaaccaactctacaatgaacttaatttggggcggagggaagagtacgacgttctggacaaaaggaggggacgagatcccgagatgggcggaaagcctcagcgaaggaagaatccgcaagaggggctttataacgaactccagaaagataaaatggcagaagcctatagtgagattgggatgaagggagaaaggaggaggggtaaaggtcacgatgggttgtaccaaggattgagcacagccactaaagatacctatgatgcgctccacatgcaggccctgccgccaagaagggccaagcgatctggatctggagcaacaaacttctcactactcaaacaagcaggtgacgtggaggagaatcccgggcctactagcatggccttaccagtgaccgccttgctcctgccgctggccttgctgctccacgccgccaggccggacatccagatgacacagagccctagcagcctgtctgccagcgtgggagacagagtgaccatcacctgtagagccagccaggacgtgaacacagccgtggcttggtatcagcagaagcctggcaaggcccctaagctgctgatctacagcgcctacttcctgtacagcggcgtgcccagcagattcagcggaagcagaagcggcaccgacttcaccctgacaatatccagcctccagcctgaggacttcgccacctactactgccagcagtacagcagatacagccccgtgacctttggacagggcaccaaggtggaaatcaagagaggcggaggcggaagtggaggcggaggatctggcggcggaggctctgaagttcagctggttgaaagtggtggcggcctggttcaacctggcggatctctgagactgagctgtgccgccagcggcttcaatgtgtacgcctctggaatgcactgggtccgacaggcccctggcaaaggacttgagtgggtcgccaaaatctaccccgacagcgactacacctattacgccgacagcgtgaagggcagattcaccatcagcgccgacaccagcaagaacaccgcctacctccagatgaactccctgagagccgaggacaccgccgtgtactactgtagcagagacagcagcttctactacgtgtacgctatggactactggggccagggcacactggtcacagtctcttctacgcgtgagctgggagagcctcagctgtgctatatcctggacgccatcctgtttctgtacggcatcgtgctgaccctgctgtactgccggctgaagatccaagtgcggaaggccgccatcaccagctacgagaaatccgacggcgtgtacaccggcctgagcaccagaaatcaagagacatacgagacactgaagcacgaaaagcctccacaacgcgccaagagaagcggatctggcgtgaagcagaccctgaatttcgacctgctgaagctggctggcgacgtggaatccaacccaggcccttctagaggccatatgaccgagtacaagcccacggtgcgcctcgccacccgcgacgacgtccccagggccgtacgcaccctcgccgccgcgttcgccgactaccccgccacgcgccacaccgtcgatccggaccgccacatcgagcgggtcaccgagctgcaagaactcttcctcacgcgcgtcgggctcgacatcggcaaggtgtgggtcgcggacgacggcgccgcggtggcggtctggaccacgccggagagcgtcgaagcgggggcggtgttcgccgagatcggcccgcgcatggccgagttgagcggttcccggctggccgcgcagcaacagatggaaggcctcctggcgccgcaccggcccaaggagcccgcgtggttcctggccaccgtcggcgtctcgcccgaccaccagggcaagggtctgggcagcgccgtcgtgctccccggagtggaggcggccgagcgcgccggggtgcccgccttcctggagacctccgcgccccgcaacctccccttctacgagcggctcggcttcaccgtcaccgccgacgtcgaggtgcccgaaggaccgcgcacctggtgcatgacccgcaagcccggtgcctga

SEQ ID NO: 39472 - DNA, 2931 bp, synthetic construct; identical to SEQ ID NO: 39463
  source 1..2931: mol_type = other DNA

SEQ ID NO: 39473 - DNA, 2931 bp, synthetic construct; identical to SEQ ID NO: 39464
  source 1..2931: mol_type = other DNA

SEQ ID NO: 39474 - DNA, 2928 bp, synthetic construct
  source 1..2928: mol_type = other DNA
atggccttaccagtgaccgccttgctcctgccgctggccttgctgctccacgccgccaggccgctcgaggaggaggacctgaagaacgtgttcccacctgaggtggccgtgttcgagcctagcgaggccgagatcagccacacccagaaagccaccctcgtgtgcctggctaccggcttctaccccgaccatgtggaactgtcttggtgggtcaacggcaaagaggtgcacagcggcgtgtgtaccgacccccagccactgaaagaacagcccgccctgaacgacagccggtactgcctgagcagcagactgagagtgtccgccaccttctggcagaacccccggaaccacttcagatgccaggtgcagttctacggcctgagcgagaacgacgagtggacccaggacagagccaagcccgtgacccagatcgtgtctgccgaagcctggggcagagccgatgatgtgattaagatccactggcaggaaaagaagtccaacaccatcctgggcagccaggaaggcaacaccatgaagaccaacgacacctacatgaagttcagctggctgaccgtgcccgagaagtccctggacaaagaacacagatgcatcgtgcggcacgaaaacaacaagaacggcgtggaccaggaaatcatcttcccacccatcaagaccgatgtgattacaatggaccccaaggacaactgctccaaggacgccaacgataccctgctgctccagctgaccaacaccagcgcctactacatgtacttgttgctgctgctgaagtccgtggtgtacttcgccatcatcacatgctgcctgctgcggagaaccgccttctgctgcaacggcgagaagtctagggccaagcgatctggatctggagcaacaaacttctcactactcaaacaagcaggtgacgtggaggagaatcccgggcctactagcatggccttaccagtgaccgccttgctcctgccgctggccttgctgctccacgccgccaggccggacatccagatgacacagagccctagcagcctgtctgccagcgtgggagacagagtgaccatcacctgtagagccagccaggacgtgaacacagccgtggcttggtatcagcagaagcctggcaaggcccctaagctgctgatctacagcgcctacttcctgtacagcggcgtgcccagcagattcagcggaagcagaagcggcaccgacttcaccctgacaatatccagcctccagcctgaggacttcgccacctactactgccagcagtacagcagatacagccccgtgacctttggacagggcaccaaggtggaaatcaagagaggcggaggcggaagtggaggcggaggatctggcggcggaggctctgaagttcagctggttgaaagtggtggcggcctggttcaacctggcggatctctgagactgagctgtgccgccagcggcttcaatgtgtacgcctctggaatgcactgggtccgacaggcccctggcaaaggacttgagtgggtcgccaaaatctaccccgacagcgactacacctattacgccgacagcgtgaagggcagattcaccatcagcgccgacaccagcaagaacaccgcctacctccagatgaactccctgagagccgaggacaccgccgtgtactactgtagcagagacagcagcttctactacgtgtacgctatggactactggggccagggcacactggtcacagtctcttctacgcgtatccagaaccctgatcctgccgtgtaccagctgcgggatagcaagagcagcgacaagagcgtgtgtctgttcaccgacttcgacagccagaccaacgtgtcccagagcaaggactccgacgtgtacatcaccgataagtgcgtgctggacatgcggagcatggacttcaagagcaactccgccgtggcctggtccaacaagtccgatttcgcctgcgccaacgccttcaacaacagcattatccccgaggacacattcttcccaagccccgagagcagcgactccaccgaccacgtgaagcccaaagagacagagaacaccaagcagcccagcaagagctgccacaagcccaaggccatcgtgcacaccgagaaagtgaacatgatgagcctgaccgtgctgggcctgcggatgctgttcgccaaaaccgtggccgtgaacttcctgctgaccgccaagctgttcttcctccgcgccaagagaagcggatctggcgtgaagcagaccctgaatttcgacctgctgaagctggctggcgacgtggaatccaacccaggcccttctagaggccatatgaccgagtacaagcccacggtgcgcctcgccacccgcgacgacgtccccagggccgtacgcaccctcgccgccgcgttcgccgactaccccgccacgcgccacaccgtcgatccggaccgccacatcgagcgggtcaccgagctgcaagaactcttcctcacgcgcgtcgggctcgacatcggcaaggtgtgggtcgcggacgacggcgccgcggtggcggtctggaccacgccggagagcgtcgaagcgggggcggtgttcgccgagatcggcccgcgcatggccgagttgagcggttcccggctggccgcgcagcaacagatggaaggcctcctggcgccgcaccggcccaaggagcccgcgtggttcctggccaccgtcggcgtctcgcccgaccaccagggcaagggtctgggcagcgccgtcgtgctccccggagtggaggcggccgagcgcgccggggtgcccgccttcctggagacctccgcgccccgcaacctccccttctacgagcggctcggcttcaccgtcaccgccgacgtcgaggtgcccgaaggaccgcgcacctggtgcatgacccgcaagcccggtgcctga

SEQ ID NO: 39475 - DNA, 2928 bp, synthetic construct
  source 1..2928: mol_type = other DNA
atggccttaccagtgaccgccttgctcctgccgctggccttgctgctccacgccgccaggccgctcgagatccagaaccctgatcctgccgtgtaccagctgcgggatagcaagagcagcgacaagagcgtgtgtctgttcaccgacttcgacagccagaccaacgtgtcccagagcaaggactccgacgtgtacatcaccgataagtgcgtgctggacatgcggagcatggacttcaagagcaactccgccgtggcctggtccaacaagtccgatttcgcctgcgccaacgccttcaacaacagcattatccccgaggacacattcttcccaagccccgagagcagcgactccaccgaccacgtgaagcccaaagagacagagaacaccaagcagcccagcaagagctgccacaagcccaaggccatcgtgcacaccgagaaagtgaacatgatgagcctgaccgtgctgggcctgcggatgctgttcgccaaaaccgtggccgtgaacttcctgctgaccgccaagctgttcttcctcagggccaagcgatctggatctggagcaacaaacttctcactactcaaacaagcaggtgacgtggaggagaatcccgggcctactagcatggccttaccagtgaccgccttgctcctgccgctggccttgctgctccacgccgccaggccggacatccagatgacacagagccctagcagcctgtctgccagcgtgggagacagagtgaccatcacctgtagagccagccaggacgtgaacacagccgtggcttggtatcagcagaagcctggcaaggcccctaagctgctgatctacagcgcctacttcctgtacagcggcgtgcccagcagattcagcggaagcagaagcggcaccgacttcaccctgacaatatccagcctccagcctgaggacttcgccacctactactgccagcagtacagcagatacagccccgtgacctttggacagggcaccaaggtggaaatcaagagaggcggaggcggaagtggaggcggaggatctggcggcggaggctctgaagttcagctggttgaaagtggtggcggcctggttcaacctggcggatctctgagactgagctgtgccgccagcggcttcaatgtgtacgcctctggaatgcactgggtccgacaggcccctggcaaaggacttgagtgggtcgccaaaatctaccccgacagcgactacacctattacgccgacagcgtgaagggcagattcaccatcagcgccgacaccagcaagaacaccgcctacctccagatgaactccctgagagccgaggacaccgccgtgtactactgtagcagagacagcagcttctactacgtgtacgctatggactactggggccagggcacactggtcacagtctcttctacgcgtgaggaggacctgaagaacgtgttcccacctgaggtggccgtgttcgagcctagcgaggccgagatcagccacacccagaaagccaccctcgtgtgcctggctaccggcttctaccccgaccatgtggaactgtcttggtgggtcaacggcaaagaggtgcacagcggcgtgtgtaccgacccccagccactgaaagaacagcccgccctgaacgacagccggtactgcctgagcagcagactgagagtgtccgccaccttctggcagaacccccggaaccacttcagatgccaggtgcagttctacggcctgagcgagaacgacgagtggacccaggacagagccaagcccgtgacccagatcgtgtctgccgaagcctggggcagagccgatgatgtgattaagatccactggcaggaaaagaagtccaacaccatcctgggcagccaggaaggcaacaccatgaagaccaacgacacctacatgaagttcagctggctgaccgtgcccgagaagtccctggacaaagaacacagatgcatcgtgcggcacgaaaacaacaagaacggcgtggaccaggaaatcatcttcccacccatcaagaccgatgtgattacaatggaccccaaggacaactgctccaaggacgccaacgataccctgctgctccagctgaccaacaccagcgcctactacatgtacttgttgctgctgctgaagtccgtggtgtacttcgccatcatcacatgctgcctgctgcggagaaccgccttctgctgcaacggcgagaagtctcgcgccaagagaagcggatctggcgtgaagcagaccctgaatttcgacctgctgaagctggctggcgacgtggaatccaacccaggcccttctagaggccatatgaccgagtacaagcccacggtgcgcctcgccacccgcgacgacgtccccagggccgtacgcaccctcgccgccgcgttcgccgactaccccgccacgcgccacaccgtcgatccggaccgccacatcgagcgggtcaccgagctgcaagaactcttcctcacgcgcgtcgggctcgacatcggcaaggtgtgggtcgcggacgacggcgccgcggtggcggtctggaccacgccggagagcgtcgaagcgggggcggtgttcgccgagatcggcccgcgcatggccgagttgagcggttcccggctggccgcgcagcaacagatggaaggcctcctggcgccgcaccggcccaaggagcccgcgtggttcctggccaccgtcggcgtctcgcccgaccaccagggcaagggtctgggcagcgccgtcgtgctccccggagtggaggcggccgagcgcgccggggtgcccgccttcctggagacctccgcgccccgcaacctccccttctacgagcggctcggcttcaccgtcaccgccgacgtcgaggtgcccgaaggaccgcgcacctggtgcatgacccgcaagcccggtgcctga

SEQ ID NO: 39476 - DNA, 2619 bp, synthetic construct
  source 1..2619: mol_type = other DNA
atggccttaccagtgaccgccttgctcctgccgctggccttgctgctccacgccgccaggccgctcgaggaggacctgaagaacgtgttcccacctgaggtggccgtgttcgagcctagcgaggccgagatcagccacacccagaaagccaccctcgtgtgcctggctaccggcttctaccccgaccatgtggaactgtcttggtgggtcaacggcaaagaggtgcacagcggcgtgtctaccgacccccagccactgaaagaacagcccgccctgaacgacagccggtactgcctgagcagcagactgagagtgtccgccaccttctggcagaacccccggaaccacttcagatgccaggtgcagttctacggcctgagcgagaacgacgagtggacccaggacagagccaagcccgtgacccagatcgtgtctgccgaagcctggggcagagccgattgcggctttaccagcgagagctaccagcagggcgtgctgagcgccaccaacctgagcgtgatcggcttcagaatcctgctgctgaaagtggccggctttaacctgctgatgaccctgcggctgtggtccagcagggccaagcgatctggatctggagcaacaaacttctcactactcaaacaagcaggtgacgtggaggagaatcccgggcctactagcatggccttaccagtgaccgccttgctcctgccgctggccttgctgctccacgccgccaggccggacatccagatgacacagagccctagcagcctgtctgccagcgtgggagacagagtgaccatcacctgtagagccagccaggacgtgaacacagccgtggcttggtatcagcagaagcctggcaaggcccctaagctgctgatctacagcgcctacttcctgtacagcggcgtgcccagcagattcagcggaagcagaagcggcaccgacttcaccctgacaatatccagcctccagcctgaggacttcgccacctactactgccagcagtacagcagatacagccccgtgacctttggacagggcaccaaggtggaaatcaagagaggcggaggcggaagtggaggcggaggatctggcggcggaggctctgaagttcagctggttgaaagtggtggcggcctggttcaacctggcggatctctgagactgagctgtgccgccagcggcttcaatgtgtacgcctctggaatgcactgggtccgacaggcccctggcaaaggacttgagtgggtcgccaaaatctaccccgacagcgactacacctattacgccgacagcgtgaagggcagattcaccatcagcgccgacaccagcaagaacaccgcctacctccagatgaactccctgagagccgaggacaccgccgtgtactactgtagcagagacagcagcttctactacgtgtacgctatggactactggggccagggcacactggtcacagtctcttctacgcgtatccagaaccctgatcctgccgtgtaccagctgcgggatagcaagagcagcgacaagagcgtgtgtctgttcaccgacttcgacagccagaccaacgtgtcccagagcaaggactccgacgtgtacatcaccgataagaccgtgctggacatgcggagcatggacttcaagagcaactccgccgtggcctggtccaacaagtccgatttcgcctgcgccaacgccttcaacaacagcattatccccgaggacacattcttcccaagccccgagagcagctgcgacgtgaagctggtggaaaagagcttcgagacagacaccaacctgaacttccagatcctgtacgagatcctgctgggcaaggccaccctgtacgccgtgctggtgtctgccctggtgctgatggctatggtcaagcggaaggacagccggggacgcgccaagagaagcggatctggcgtgaagcagaccctgaatttcgacctgctgaagctggctggcgacgtggaatccaacccaggcccttctagaggccatatgaccgagtacaagcccacggtgcgcctcgccacccgcgacgacgtccccagggccgtacgcaccctcgccgccgcgttcgccgactaccccgccacgcgccacaccgtcgatccggaccgccacatcgagcgggtcaccgagctgcaagaactcttcctcacgcgcgtcgggctcgacatcggcaaggtgtgggtcgcggacgacggcgccgcggtggcggtctggaccacgccggagagcgtcgaagcgggggcggtgttcgccgagatcggcccgcgcatggccgagttgagcggttcccggctggccgcgcagcaacagatggaaggcctcctggcgccgcaccggcccaaggagcccgcgtggttcctggccaccgtcggcgtctcgcccgaccaccagggcaagggtctgggcagcgccgtcgtgctccccggagtggaggcggccgagcgcgccggggtgcccgccttcctggagacctccgcgccccgcaacctccccttctacgagcggctcggcttcaccgtcaccgccgacgtcgaggtgcccgaaggaccgcgcacctggtgcatgacccgcaagcccggtgcctga

SEQ ID NO: 39477 - DNA, 2619 bp, synthetic construct
  source 1..2619: mol_type = other DNA
atggccttaccagtgaccgccttgctcctgccgctggccttgctgctccacgccgccaggccgctcgagatccagaaccctgatcctgccgtgtaccagctgcgggatagcaagagcagcgacaagagcgtgtgtctgttcaccgacttcgacagccagaccaacgtgtcccagagcaaggactccgacgtgtacatcaccgataagaccgtgctggacatgcggagcatggacttcaagagcaactccgccgtggcctggtccaacaagtccgatttcgcctgcgccaacgccttcaacaacagcattatccccgaggacacattcttcccaagccccgagagcagctgcgacgtgaagctggtggaaaagagcttcgagacagacaccaacctgaacttccagatcctgtacgagatcctgctgggcaaggccaccctgtacgccgtgctggtgtctgccctggtgctgatggctatggtcaagcggaaggacagccggggaagggccaagcgatctggatctggagcaacaaacttctcactactcaaacaagcaggtgacgtggaggagaatcccgggcctactagcatggccttaccagtgaccgccttgctcctgccgctggccttgctgctccacgccgccaggccggacatccagatgacacagagccctagcagcctgtctgccagcgtgggagacagagtgaccatcacctgtagagccagccaggacgtgaacacagccgtggcttggtatcagcagaagcctggcaaggcccctaagctgctgatctacagcgcctacttcctgtacagcggcgtgcccagcagattcagcggaagcagaagcggcaccgacttcaccctgacaatatccagcctccagcctgaggacttcgccacctactactgccagcagtacagcagatacagccccgtgacctttggacagggcaccaaggtggaaatcaagagaggcggaggcggaagtggaggcggaggatctggcggcggaggctctgaagttcagctggttgaaagtggtggcggcctggttcaacctggcggatctctgagactgagctgtgccgccagcggcttcaatgtgtacgcctctggaatgcactgggtccgacaggcccctggcaaaggacttgagtgggtcgccaaaatctaccccgacagcgactacacctattacgccgacagcgtgaagggcagattcaccatcagcgccgacaccagcaagaacaccgcctacctccagatgaactccctgagagccgaggacaccgccgtgtactactgtagcagagacagcagcttctactacgtgtacgctatggactactggggccagggcacactggtcacagtctcttctacgcgtgaggacctgaagaacgtgttcccacctgaggtggccgtgttcgagcctagcgaggccgagatcagccacacccagaaagccaccctcgtgtgcctggctaccggcttctaccccgaccatgtggaactgtcttggtgggtcaacggcaaagaggtgcacagcggcgtgtctaccgacccccagccactgaaagaacagcccgccctgaacgacagccggtactgcctgagcagcagactgagagtgtccgccaccttctggcagaacccccggaaccacttcagatgccaggtgcagttctacggcctgagcgagaacgacgagtggacccaggacagagccaagcccgtgacccagatcgtgtctgccgaagcctggggcagagccgattgcggctttaccagcgagagctaccagcagggcgtgctgagcgccaccaacctgagcgtgatcggcttcagaatcctgctgctgaaagtggccggctttaacctgctgatgaccctgcggctgtggtccagccgcgccaagagaagcggatctggcgtgaagcagaccctgaatttcgacctgctgaagctggctggcgacgtggaatccaacccaggcccttctagaggccatatgaccgagtacaagcccacggtgcgcctcgccacccgcgacgacgtccccagggccgtacgcaccctcgccgccgcgttcgccgactaccccgccacgcgccacaccgtcgatccggaccgccacatcgagcgggtcaccgagctgcaagaactcttcctcacgcgcgtcgggctcgacatcggcaaggtgtgggtcgcggacgacggcgccgcggtggcggtctggaccacgccggagagcgtcgaagcgggggcggtgttcgccgagatcggcccgcgcatggccgagttgagcggttcccggctggccgcgcagcaacagatggaaggcctcctggcgccgcaccggcccaaggagcccgcgtggttcctggccaccgtcggcgtctcgcccgaccaccagggcaagggtctgggcagcgccgtcgtgctccccggagtggaggcggccgagcgcgccggggtgcccgccttcctggagacctccgcgccccgcaacctccccttctacgagcggctcggcttcaccgtcaccgccgacgtcgaggtgcccgaaggaccgcgcacctggtgcatgacccgcaagcccggtgcctga

SEQ ID NO: 39478 - DNA, 2619 bp, synthetic construct
  source 1..2619: mol_type = other DNA
atggccttaccagtgaccgccttgctcctgccgctggccttgctgctccacgccgccaggccgctcgaggaggacctgaagaacgtgttcccacctgaggtggccgtgttcgagcctagcgaggccgagatcagccacacccagaaagccaccctcgtgtgcctggctaccggcttctaccccgaccatgtggaactgtcttggtgggtcaacggcaaagaggtgcacagcggcgtgtgtaccgacccccagccactgaaagaacagcccgccctgaacgacagccggtactgcctgagcagcagactgagagtgtccgccaccttctggcagaacccccggaaccacttcagatgccaggtgcagttctacggcctgagcgagaacgacgagtggacccaggacagagccaagcccgtgacccagatcgtgtctgccgaagcctggggcagagccgattgcgacgtgaagctggtggaaaagagcttcgagacagacaccaacctgaacttccagaacctgagcgtgatcggcttcagaatcctgctgctgaaagtggccggctttaacctgctgatgaccctgcggctgtggtccagcagggccaagcgatctggatctggagcaacaaacttctcactactcaaacaagcaggtgacgtggaggagaatcccgggcctactagcatggccttaccagtgaccgccttgctcctgccgctggccttgctgctccacgccgccaggccggacatccagatgacacagagccctagcagcctgtctgccagcgtgggagacagagtgaccatcacctgtagagccagccaggacgtgaacacagccgtggcttggtatcagcagaagcctggcaaggcccctaagctgctgatctacagcgcctacttcctgtacagcggcgtgcccagcagattcagcggaagcagaagcggcaccgacttcaccctgacaatatccagcctccagcctgaggacttcgccacctactactgccagcagtacagcagatacagccccgtgacctttggacagggcaccaaggtggaaatcaagagaggcggaggcggaagtggaggcggaggatctggcggcggaggctctgaagttcagctggttgaaagtggtggcggcctggttcaacctggcggatctctgagactgagctgtgccgccagcggcttcaatgtgtacgcctctggaatgcactgggtccgacaggcccctggcaaaggacttgagtgggtcgccaaaatctaccccgacagcgactacacctattacgccgacagcgtgaagggcagattcaccatcagcgccgacaccagcaagaacaccgcctacctccagatgaactccctgagagccgaggacaccgccgtgtactactgtagcagagacagcagcttctactacgtgtacgctatggactactggggccagggcacactggtcacagtctcttctacgcgtatccagaaccctgatcctgccgtgtaccagctgcgggatagcaagagcagcgacaagagcgtgtgtctgttcaccgacttcgacagccagaccaacgtgtcccagagcaaggactccgacgtgtacatcaccgataagtgcgtgctggacatgcggagcatggacttcaagagcaactccgccgtggcctggtccaacaagtccgatttcgcctgcgccaacgccttcaacaacagcattatccccgaggacacattcttcccaagccccgagagcagctgcggctttaccagcgagagctaccagcagggcgtgctgagcgccaccatcctgtacgagatcctgctgggcaaggccaccctgtacgccgtgctggtgtctgccctggtgctgatggctatggtcaagcggaaggacagccggggacgcgccaagagaagcggatctggcgtgaagcagaccctgaatttcgacctgctgaagctggctggcgacgtggaatccaacccaggcccttctagaggccatatgaccgagtacaagcccacggtgcgcctcgccacccgcgacgacgtccccagggccgtacgcaccctcgccgccgcgttcgccgactaccccgccacgcgccacaccgtcgatccggaccgccacatcgagcgggtcaccgagctgcaagaactcttcctcacgcgcgtcgggctcgacatcggcaaggtgtgggtcgcggacgacggcgccgcggtggcggtctggaccacgccggagagcgtcgaagcgggggcggtgttcgccgagatcggcccgcgcatggccgagttgagcggttcccggctggccgcgcagcaacagatggaaggcctcctggcgccgcaccggcccaaggagcccgcgtggttcctggccaccgtcggcgtctcgcccgaccaccagggcaagggtctgggcagcgccgtcgtgctccccggagtggaggcggccgagcgcgccggggtgcccgccttcctggagacctccgcgccccgcaacctccccttctacgagcggctcggcttcaccgtcaccgccgacgtcgaggtgcccgaaggaccgcgcacctggtgcatgacccgcaagcccggtgcctga

SEQ ID NO: 39479 - DNA, 2619 bp, synthetic construct
  source 1..2619: mol_type = other DNA
atggccttaccagtgaccgccttgctcctgccgctggccttgctgctccacgccgccaggccgctcgaggaggacctgaagaacgtgttcccacctgaggtggccgtgttcgagcctagcgaggccgagatcagccacacccagaaagccaccctcgtgtgcctggctaccggcttctaccccgaccatgtggaactgtcttggtgggtcaacggcaaagaggtgcacagcggcgtgtctaccgacccccagccactgaaagaacagcccgccctgaacgacagccggtactgcctgagcagcagactgagagtgtccgccaccttctggcagaacccccggaaccacttcagatgccaggtgcagttctacggcctgagcgagaacgacgagtggacccaggacagagccaagcccgtgacccagatcgtgtctgccgaagcctggggcagagccgattgcgacgtgaagctggtggaaaagagcttcgagacagacaccaacctgaacttccagaacctgagcgtgatcggcttcagaatcctgctgctgaaagtggccggctttaacctgctgatgaccctgcggctgtggtccagcagggccaagcgatctggatctggagcaacaaacttctcactactcaaacaagcaggtgacgtggaggagaatcccgggcctactagcatggccttaccagtgaccgccttgctcctgccgctggccttgctgctccacgccgccaggccggacatccagatgacacagagccctagcagcctgtctgccagcgtgggagacagagtgaccatcacctgtagagccagccaggacgtgaacacagccgtggcttggtatcagcagaagcctggcaaggcccctaagctgctgatctacagcgcctacttcctgtacagcggcgtgcccagcagattcagcggaagcagaagcggcaccgacttcaccctgacaatatccagcctccagcctgaggacttcgccacctactactgccagcagtacagcagatacagccccgtgacctttggacagggcaccaaggtggaaatcaagagaggcggaggcggaagtggaggcggaggatctggcggcggaggctctgaagttcagctggttgaaagtggtggcggcctggttcaacctggcggatctctgagactgagctgtgccgccagcggcttcaatgtgtacgcctctggaatgcactgggtccgacaggcccctggcaaaggacttgagtgggtcgccaaaatctaccccgacagcgactacacctattacgccgacagcgtgaagggcagattcaccatcagcgccgacaccagcaagaacaccgcctacctccagatgaactccctgagagccgaggacaccgccgtgtactactgtagcagagacagcagcttctactacgtgtacgctatggactactggggccagggcacactggtcacagtctcttctacgcgtatccagaaccctgatcctgccgtgtaccagctgcgggatagcaagagcagcgacaagagcgtgtgtctgttcaccgacttcgacagccagaccaacgtgtcccagagcaaggactccgacgtgtacatcaccgataagaccgtgctggacatgcggagcatggacttcaagagcaactccgccgtggcctggtccaacaagtccgatttcgcctgcgccaacgccttcaacaacagcattatccccgaggacacattcttcccaagccccgagagcagctgcggctttaccagcgagagctaccagcagggcgtgctgagcgccaccatcctgtacgagatcctgctgggcaaggccaccctgtacgccgtgctggtgtctgccctggtgctgatggctatggtcaagcggaaggacagccggggacgcgccaagagaagcggatctggcgtgaagcagaccctgaatttcgacctgctgaagctggctggcgacgtggaatccaacccaggcccttctagaggccatatgaccgagtacaagcccacggtgcgcctcgccacccgcgacgacgtccccagggccgtacgcaccctcgccgccgcgttcgccgactaccccgccacgcgccacaccgtcgatccggaccgccacatcgagcgggtcaccgagctgcaagaactcttcctcacgcgcgtcgggctcgacatcggcaaggtgtgggtcgcggacgacggcgccgcggtggcggtctggaccacgccggagagcgtcgaagcgggggcggtgttcgccgagatcggcccgcgcatggccgagttgagcggttcccggctggccgcgcagcaacagatggaaggcctcctggcgccgcaccggcccaaggagcccgcgtggttcctggccaccgtcggcgtctcgcccgaccaccagggcaagggtctgggcagcgccgtcgtgctccccggagtggaggcggccgagcgcgccggggtgcccgccttcctggagacctccgcgccccgcaacctccccttctacgagcggctcggcttcaccgtcaccgccgacgtcgaggtgcccgaaggaccgcgcacctggtgcatgacccgcaagcccggtgcctga

SEQ ID NO: 39480 - DNA, 2928 bp, synthetic construct
  source 1..2928: mol_type = other DNA
atggccttaccagtgaccgccttgctcctgccgctggccttgctgctccacgccgccaggccgctcgaggaggaggacctgaagaacgtgttcccacctgaggtggccgtgttcgagcctagcgaggccgagatcagccacacccagaaagccaccctcgtgtgcctggctaccggcttctaccccgaccatgtggaactgtcttggtgggtcaacggcaaagaggtgcacagcggcgtgtctaccgacccccagccactgaaagaacagcccgccctgaacgacagccggtactgcctgagcagcagactgagagtgtccgccaccttctggcagaacccccggaaccacttcagatgccaggtgcagttctacggcctgagcgagaacgacgagtggacccaggacagagccaagcccgtgacccagatcgtgtctgccgaagcctggggcagagccgatgatgtgattaagatccactggcaggaaaagaagtccaacaccatcctgggcagccaggaaggcaacaccatgaagaccaacgacacctacatgaagttcagctggctgaccgtgcccgagaagtccctggacaaagaacacagatgcatcgtgcggcacgaaaacaacaagaacggcgtggaccaggaaatcatcttcccacccatcaagaccgatgtgattacaatggaccccaaggacaactgctccaaggacgccaacgataccctgctgctccagctgaccaacaccagcgcctactacatgtacttgttgctgctgctgaagtccgtggtgtacttcgccatcatcacatgctgcctgctgcggagaaccgccttctgctgcaacggcgagaagtctagggccaagcgatctggatctggagcaacaaacttctcactactcaaacaagcaggtgacgtggaggagaatcccgggcctactagcatggccttaccagtgaccgccttgctcctgccgctggccttgctgctccacgccgccaggccggacatccagatgacacagagccctagcagcctgtctgccagcgtgggagacagagtgaccatcacctgtagagccagccaggacgtgaacacagccgtggcttggtatcagcagaagcctggcaaggcccctaagctgctgatctacagcgcctacttcctgtacagcggcgtgcccagcagattcagcggaagcagaagcggcaccgacttcaccctgacaatatccagcctccagcctgaggacttcgccacctactactgccagcagtacagcagatacagccccgtgacctttggacagggcaccaaggtggaaatcaagagaggcggaggcggaagtggaggcggaggatctggcggcggaggctctgaagttcagctggttgaaagtggtggcggcctggttcaacctggcggatctctgagactgagctgtgccgccagcggcttcaatgtgtacgcctctggaatgcactgggtccgacaggcccctggcaaaggacttgagtgggtcgccaaaatctaccccgacagcgactacacctattacgccgacagcgtgaagggcagattcaccatcagcgccgacaccagcaagaacaccgcctacctccagatgaactccctgagagccgaggacaccgccgtgtactactgtagcagagacagcagcttctactacgtgtacgctatggactactggggccagggcacactggtcacagtctcttctacgcgtatccagaaccctgatcctgccgtgtaccagctgcgggatagcaagagcagcgacaagagcgtgtgtctgttcaccgacttcgacagccagaccaacgtgtcccagagcaaggactccgacgtgtacatcaccgataagaccgtgctggacatgcggagcatggacttcaagagcaactccgccgtggcctggtccaacaagtccgatttcgcctgcgccaacgccttcaacaacagcattatccccgaggacacattcttcccaagccccgagagcagcgactccaccgaccacgtgaagcccaaagagacagagaacaccaagcagcccagcaagagctgccacaagcccaaggccatcgtgcacaccgagaaagtgaacatgatgagcctgaccgtgctgggcctgcggatgctgttcgccaaaaccgtggccgtgaacttcctgctgaccgccaagctgttcttcctccgcgccaagagaagcggatctggcgtgaagcagaccctgaatttcgacctgctgaagctggctggcgacgtggaatccaacccaggcccttctagaggccatatgaccgagtacaagcccacggtgcgcctcgccacccgcgacgacgtccccagggccgtacgcaccctcgccgccgcgttcgccgactaccccgccacgcgccacaccgtcgatccggaccgccacatcgagcgggtcaccgagctgcaagaactcttcctcacgcgcgtcgggctcgacatcggcaaggtgtgggtcgcggacgacggcgccgcggtggcggtctggaccacgccggagagcgtcgaagcgggggcggtgttcgccgagatcggcccgcgcatggccgagttgagcggttcccggctggccgcgcagcaacagatggaaggcctcctggcgccgcaccggcccaaggagcccgcgtggttcctggccaccgtcggcgtctcgcccgaccaccagggcaagggtctgggcagcgccgtcgtgctccccggagtggaggcggccgagcgcgccggggtgcccgccttcctggagacctccgcgccccgcaacctccccttctacgagcggctcggcttcaccgtcaccgccgacgtcgaggtgcccgaaggaccgcgcacctggtgcatgacccgcaagcccggtgcctga

SEQ ID NO: 39481 - DNA, 2619 bp, synthetic construct
  source 1..2619: mol_type = other DNA
atggccttaccagtgaccgccttgctcctgccgctggccttgctgctccacgccgccaggccgctcgaggaggacctgaagaacgtgttcccacctgaggtggccgtgttcgagcctagcgaggccgagatcagccacacccagaaagccaccctcgtgtgcctggctaccggcttctaccccgaccatgtggaactgtcttggtgggtcaacggcaaagaggtgcacagcggcgtgtgtaccgacccccagccactgaaagaacagcccgccctgaacgacagccggtactgcctgagcagcagactgagagtgtccgccaccttctggcagaacccccggaaccacttcagatgccaggtgcagttctacggcctgagcgagaacgacgagtggacccaggacagagccaagcccgtgacccagatcgtgtctgccgaagcctggggcagagccgattgcggctttaccagcgagagctaccagcagggcgtgctgagcgccaccaacctgagcgtgatcggcttcagaatcctgctgctgaaagtggccggctttaacctgctgatgaccctgcggctgtggtccagcagggccaagcgatctggatctggagcaacaaacttctcactactcaaacaagcaggtgacgtggaggagaatcccgggcctactagcatggccttaccagtgaccgccttgctcctgccgctggccttgctgctccacgccgccaggccggacatccagatgacacagagccctagcagcctgtctgccagcgtgggagacagagtgaccatcacctgtagagccagccaggacgtgaacacagccgtggcttggtatcagcagaagcctggcaaggcccctaagctgctgatctacagcgcctacttcctgtacagcggcgtgcccagcagattcagcggaagcagaagcggcaccgacttcaccctgacaatatccagcctccagcctgaggacttcgccacctactactgccagcagtacagcagatacagccccgtgacctttggacagggcaccaaggtggaaatcaagagaggcggaggcggaagtggaggcggaggatctggcggcggaggctctgaagttcagctggttgaaagtggtggcggcctggttcaacctggcggatctctgagactgagctgtgccgccagcggcttcaatgtgtacgcctctggaatgcactgggtccgacaggcccctggcaaaggacttgagtgggtcgccaaaatctaccccgacagcgactacacctattacgccgacagcgtgaagggcagattcaccatcagcgccgacaccagcaagaacaccgcctacctccagatgaactccctgagagccgaggacaccgccgtgtactactgtagcagagacagcagcttctactacgtgtacgctatggactactggggccagggcacactggtcacagtctcttctacgcgtatccagaaccctgatcctgccgtgtaccagctgcgggatagcaagagcagcgacaagagcgtgtgtctgttcaccgacttcgacagccagaccaacgtgtcccagagcaaggactccgacgtgtacatcaccgataagtgcgtgctggacatgcggagcatggacttcaagagcaactccgccgtggcctggtccaacaagtccgatttcgcctgcgccaacgccttcaacaacagcattatccccgaggacacattcttcccaagccccgagagcagctgcgacgtgaagctggtggaaaagagcttcgagacagacaccaacctgaacttccagatcctgtacgagatcctgctgggcaaggccaccctgtacgccgtgctggtgtctgccctggtgctgatggctatggtcaagcggaaggacagccggggacgcgccaagagaagcggatctggcgtgaagcagaccctgaatttcgacctgctgaagctggctggcgacgtggaatccaacccaggcccttctagaggccatatgaccgagtacaagcccacggtgcgcctcgccacccgcgacgacgtccccagggccgtacgcaccctcgccgccgcgttcgccgactaccccgccacgcgccacaccgtcgatccggaccgccacatcgagcgggtcaccgagctgcaagaactcttcctcacgcgcgtcgggctcgacatcggcaaggtgtgggtcgcggacgacggcgccgcggtggcggtctggaccacgccggagagcgtcgaagcgggggcggtgttcgccgagatcggcccgcgcatggccgagttgagcggttcccggctggccgcgcagcaacagatggaaggcctcctggcgccgcaccggcccaaggagcccgcgtggttcctggccaccgtcggcgtctcgcccgaccaccagggcaagggtctgggcagcgccgtcgtgctccccggagtggaggcggccgagcgcgccggggtgcccgccttcctggagacctccgcgccccgcaacctccccttctacgagcggctcggcttcaccgtcaccgccgacgtcgaggtgcccgaaggaccgcgcacctggtgcatgacccgcaagcccggtgcctga

SEQ ID NO: 39482 - DNA, 2706 bp, synthetic construct
  source 1..2706: mol_type = other DNA
atggccttaccagtgaccgccttgctcctgccgctggccttgctgctccacgccgccaggccgctcgaggaggaggacctgaagaacgtgttcccacctgaggtggccgtgttcgagcctagcgaggccgagatcagccacacccagaaagccaccctcgtgtgcctggctaccggcttctaccccgaccatgtggaactgtcttggtgggtcaacggcaaagaggtgcacagcggcgtgtgtaccgacccccagccactgaaagaacagcccgccctgaacgacagccggtactgcctgagcagcagactgagagtgtccgccaccttctggcagaacccccggaaccacttcagatgccaggtgcagttctacggcctgagcgagaacgacgagtggacccaggacagagccaagcccgtgacccagatcgtgtctgccgaagcctggggcagagccgattgcggctttaccagcgagagctaccagcagggcgtgctgagcgccaccaacctgagcgtgatcggcttcagaatcctgctgctgaaagtggccggctttaacctgctgatgaccctgcggctgtggtccagcagggccaagcgatctggatctggagcaacaaacttctcactactcaaacaagcaggtgacgtggaggagaatcccgggcctactagcatggccttaccagtgaccgccttgctcctgccgctggccttgctgctccacgccgccaggccggacatccagatgacacagagccctagcagcctgtctgccagcgtgggagacagagtgaccatcacctgtagagccagccaggacgtgaacacagccgtggcttggtatcagcagaagcctggcaaggcccctaagctgctgatctacagcgcctacttcctgtacagcggcgtgcccagcagattcagcggaagcagaagcggcaccgacttcaccctgacaatatccagcctccagcctgaggacttcgccacctactactgccagcagtacagcagatacagccccgtgacctttggacagggcaccaaggtggaaatcaagagaggcggaggcggaagtggaggcggaggatctggcggcggaggctctgaagttcagctggttgaaagtggtggcggcctggttcaacctggcggatctctgagactgagctgtgccgccagcggcttcaatgtgtacgcctctggaatgcactgggtccgacaggcccctggcaaaggacttgagtgggtcgccaaaatctaccccgacagcgactacacctattacgccgacagcgtgaagggcagattcaccatcagcgccgacaccagcaagaacaccgcctacctccagatgaactccctgagagccgaggacaccgccgtgtactactgtagcagagacagcagcttctactacgtgtacgctatggactactggggccagggcacactggtcacagtctcttctacgcgtggacagcctaaggccaatcctaccgtgacactgttccctccaagcagcgaagaactccaggccaacaaggccacacttgtgtgcctgatctccgacttctaccctggggctgtgacagtggcttggaaggccgatggatctcctgtgaaagccggcgtggaaaccaccaagccatccaagcagagcaacaacaaatacgccgccagctcctacctgagcctgacacctgagcagtggaagtcccacagatcctacagctgccaagtgacccacgaaggcagcaccgtggaaaagacagtggcccctacagagtgcagccccatcaagaccgatgtgattacaatggaccccaaggacaactgctccaaggacgccaacgataccctgctgctccagctgaccaacaccagcgcctactacatgtacttgttgctgctgctgaagtccgtggtgtacttcgccatcatcacatgctgcctgctgcggagaaccgccttctgctgcaacggcgagaagtctcgcgccaagagaagcggatctggcgtgaagcagaccctgaatttcgacctgctgaagctggctggcgacgtggaatccaacccaggcccttctagaggccatatgaccgagtacaagcccacggtgcgcctcgccacccgcgacgacgtccccagggccgtacgcaccctcgccgccgcgttcgccgactaccccgccacgcgccacaccgtcgatccggaccgccacatcgagcgggtcaccgagctgcaagaactcttcctcacgcgcgtcgggctcgacatcggcaaggtgtgggtcgcggacgacggcgccgcggtggcggtctggaccacgccggagagcgtcgaagcgggggcggtgttcgccgagatcggcccgcgcatggccgagttgagcggttcccggctggccgcgcagcaacagatggaaggcctcctggcgccgcaccggcccaaggagcccgcgtggttcctggccaccgtcggcgtctcgcccgaccaccagggcaagggtctgggcagcgccgtcgtgctccccggagtggaggcggccgagcgcgccggggtgcccgccttcctggagacctccgcgccccgcaacctccccttctacgagcggctcggcttcaccgtcaccgccgacgtcgaggtgcccgaaggaccgcgcacctggtgcatgacccgcaagcccggtgcctga

SEQ ID NO: 39483 - DNA, 2706 bp, synthetic construct
  source 1..2706: mol_type = other DNA
atggccttaccagtgaccgccttgctcctgccgctggccttgctgctccacgccgccaggccgctcgagggacagcctaaggccaatcctaccgtgacactgttccctccaagcagcgaagaactccaggccaacaaggccacacttgtgtgcctgatctccgacttctaccctggggctgtgacagtggcttggaaggccgatggatctcctgtgaaagccggcgtggaaaccaccaagccatccaagcagagcaacaacaaatacgccgccagctcctacctgagcctgacacctgagcagtggaagtcccacagatcctacagctgccaagtgacccacgaaggcagcaccgtggaaaagacagtggcccctacagagtgcagccccatcaagaccgatgtgattacaatggaccccaaggacaactgctccaaggacgccaacgataccctgctgctccagctgaccaacaccagcgcctactacatgtacttgttgctgctgctgaagtccgtggtgtacttcgccatcatcacatgctgcctgctgcggagaaccgccttctgctgcaacggcgagaagtctagggccaagcgatctggatctggagcaacaaacttctcactactcaaacaagcaggtgacgtggaggagaatcccgggcctactagcatggccttaccagtgaccgccttgctcctgccgctggccttgctgctccacgccgccaggccggacatccagatgacacagagccctagcagcctgtctgccagcgtgggagacagagtgaccatcacctgtagagccagccaggacgtgaacacagccgtggcttggtatcagcagaagcctggcaaggcccctaagctgctgatctacagcgcctacttcctgtacagcggcgtgcccagcagattcagcggaagcagaagcggcaccgacttcaccctgacaatatccagcctccagcctgaggacttcgccacctactactgccagcagtacagcagatacagccccgtgacctttggacagggcaccaaggtggaaatcaagagaggcggaggcggaagtggaggcggaggatctggcggcggaggctctgaagttcagctggttgaaagtggtggcggcctggttcaacctggcggatctctgagactgagctgtgccgccagcggcttcaatgtgtacgcctctggaatgcactgggtccgacaggcccctggcaaaggacttgagtgggtcgccaaaatctaccccgacagcgactacacctattacgccgacagcgtgaagggcagattcaccatcagcgccgacaccagcaagaacaccgcctacctccagatgaactccctgagagccgaggacaccgccgtgtactactgtagcagagacagcagcttctactacgtgtacgctatggactactggggccagggcacactggtcacagtctcttctacgcgtgaggaggacctgaagaacgtgttcccacctgaggtggccgtgttcgagcctagcgaggccgagatcagccacacccagaaagccaccctcgtgtgcctggctaccggcttctaccccgaccatgtggaactgtcttggtgggtcaacggcaaagaggtgcacagcggcgtgtgtaccgacccccagccactgaaagaacagcccgccctgaacgacagccggtactgcctgagcagcagactgagagtgtccgccaccttctggcagaacccccggaaccacttcagatgccaggtgcagttctacggcctgagcgagaacgacgagtggacccaggacagagccaagcccgtgacccagatcgtgtctgccgaagcctggggcagagccgattgcggctttaccagcgagagctaccagcagggcgtgctgagcgccaccaacctgagcgtgatcggcttcagaatcctgctgctgaaagtggccggctttaacctgctgatgaccctgcggctgtggtccagccgcgccaagagaagcggatctggcgtgaagcagaccctgaatttcgacctgctgaagctggctggcgacgtggaatccaacccaggcccttctagaggccatatgaccgagtacaagcccacggtgcgcctcgccacccgcgacgacgtccccagggccgtacgcaccctcgccgccgcgttcgccgactaccccgccacgcgccacaccgtcgatccggaccgccacatcgagcgggtcaccgagctgcaagaactcttcctcacgcgcgtcgggctcgacatcggcaaggtgtgggtcgcggacgacggcgccgcggtggcggtctggaccacgccggagagcgtcgaagcgggggcggtgttcgccgagatcggcccgcgcatggccgagttgagcggttcccggctggccgcgcagcaacagatggaaggcctcctggcgccgcaccggcccaaggagcccgcgtggttcctggccaccgtcggcgtctcgcccgaccaccagggcaagggtctgggcagcgccgtcgtgctccccggagtggaggcggccgagcgcgccggggtgcccgccttcctggagacctccgcgccccgcaacctccccttctacgagcggctcggcttcaccgtcaccgccgacgtcgaggtgcccgaaggaccgcgcacctggtgcatgacccgcaagcccggtgcctga

SEQ ID NO: 39484 - DNA, 2697 bp, synthetic construct
  source 1..2697: mol_type = other DNA
atggccttaccagtgaccgccttgctcctgccgctggccttgctgctccacgccgccaggccgctcgaggaggcctctacaaagggaccctccgtgtttcctctggctcccagcagcaagtctacaagcggaggaacagccgctctgggctgcctggtcaaggattactttcccgagcctgtgaccgtgtcctggaatagcggagcactgacaagcggcgtgcacacctttccagccgtgctgcaaagcagcggcctgtactctctgagcagcgtggtcacagtgcctagctctagcctgggcacccagacctacatctgcaatgtgaaccacaagcctagcaacaccaaggtggacaagagagtggaacccaagagctgtcccatcaagaccgatgtgattacaatggaccccaaggacaactgctccaaggacgccaacgataccctgctgctccagctgaccaacaccagcgcctactacatgtacttgttgctgctgctgaagtccgtggtgtacttcgccatcatcacatgctgcctgctgcggagaaccgccttctgctgcaacggcgagaagtctagggccaagcgatctggatctggagcaacaaacttctcactactcaaacaagcaggtgacgtggaggagaatcccgggcctactagcatggccttaccagtgaccgccttgctcctgccgctggccttgctgctccacgccgccaggccggacatccagatgacacagagccctagcagcctgtctgccagcgtgggagacagagtgaccatcacctgtagagccagccaggacgtgaacacagccgtggcttggtatcagcagaagcctggcaaggcccctaagctgctgatctacagcgcctacttcctgtacagcggcgtgcccagcagattcagcggaagcagaagcggcaccgacttcaccctgacaatatccagcctccagcctgaggacttcgccacctactactgccagcagtacagcagatacagccccgtgacctttggacagggcaccaaggtggaaatcaagagaggcggaggcggaagtggaggcggaggatctggcggcggaggctctgaagttcagctggttgaaagtggtggcggcctggttcaacctggcggatctctgagactgagctgtgccgccagcggcttcaatgtgtacgcctctggaatgcactgggtccgacaggcccctggcaaaggacttgagtgggtcgccaaaatctaccccgacagcgactacacctattacgccgacagcgtgaagggcagattcaccatcagcgccgacaccagcaagaacaccgcctacctccagatgaactccctgagagccgaggacaccgccgtgtactactgtagcagagacagcagcttctactacgtgtacgctatggactactggggccagggcacactggtcacagtctcttctacgcgtggacagcctaaggccaatcctaccgtgacactgttccctccaagcagcgaagaactccaggccaacaaggccacacttgtgtgcctgatctccgacttctaccctggggctgtgacagtggcttggaaggccgatggatctcctgtgaaagccggcgtggaaaccaccaagccatccaagcagagcaacaacaaatacgccgccagctcctacctgagcctgacacctgagcagtggaagtcccacagatcctacagctgccaagtgacccacgaaggcagcaccgtggaaaagacagtggcccctacagagtgcagcgaagtgaaaaccgactccaccgaccacgtgaagcccaaagagacagagaacaccaagcagcccagcaagagctgccacaagcccaaggccatcgtgcacaccgagaaagtgaacatgatgagcctgaccgtgctgggcctgcggatgctgttcgccaaaaccgtggccgtgaacttcctgctgaccgccaagctgttcttcctccgcgccaagagaagcggatctggcgtgaagcagaccctgaatttcgacctgctgaagctggctggcgacgtggaatccaacccaggcccttctagaggccatatgaccgagtacaagcccacggtgcgcctcgccacccgcgacgacgtccccagggccgtacgcaccctcgccgccgcgttcgccgactaccccgccacgcgccacaccgtcgatccggaccgccacatcgagcgggtcaccgagctgcaagaactcttcctcacgcgcgtcgggctcgacatcggcaaggtgtgggtcgcggacgacggcgccgcggtggcggtctggaccacgccggagagcgtcgaagcgggggcggtgttcgccgagatcggcccgcgcatggccgagttgagcggttcccggctggccgcgcagcaacagatggaaggcctcctggcgccgcaccggcccaaggagcccgcgtggttcctggccaccgtcggcgtctcgcccgaccaccagggcaagggtctgggcagcgccgtcgtgctccccggagtggaggcggccgagcgcgccggggtgcccgccttcctggagacctccgcgccccgcaacctccccttctacgagcggctcggcttcaccgtcaccgccgacgtcgaggtgcccgaaggaccgcgcacctggtgcatgacccgcaagcccggtgcctga

SEQ ID NO: 39485 - DNA, 2631 bp, synthetic construct
  source 1..2631: mol_type = other DNA
atggccttaccagtgaccgccttgctcctgccgctggccttgctgctccacgccgccaggccgctcgaggaggcctctacaaagggaccctccgtgtttcctctggctcccagcagcaagtctacaagcggaggaacagccgctctgggctgcctggtcaaggattactttcccgagcctgtgaccgtgtcctggaatagcggagcactgacaagcggcgtgcacacctttccagccgtgctgcaaagcagcggcctgtactctctgagcagcgtggtcacagtgcctagctctagcctgggcacccagacctacatctgcaatgtgaaccacaagcctagcaacaccaaggtggacaagagagtggaacccaagagctgtggcagagccgattgcggctttaccagcgagagctaccagcagggcgtgctgagcgccaccatcctgtacgagatcctgctgggcaaggccaccctgtacgccgtgctggtgtctgccctggtgctgatggctatggtcaagcggaaggacagccggggaagggccaagcgatctggatctggagcaacaaacttctcactactcaaacaagcaggtgacgtggaggagaatcccgggcctactagcatggccttaccagtgaccgccttgctcctgccgctggccttgctgctccacgccgccaggccggacatccagatgacacagagccctagcagcctgtctgccagcgtgggagacagagtgaccatcacctgtagagccagccaggacgtgaacacagccgtggcttggtatcagcagaagcctggcaaggcccctaagctgctgatctacagcgcctacttcctgtacagcggcgtgcccagcagattcagcggaagcagaagcggcaccgacttcaccctgacaatatccagcctccagcctgaggacttcgccacctactactgccagcagtacagcagatacagccccgtgacctttggacagggcaccaaggtggaaatcaagagaggcggaggcggaagtggaggcggaggatctggcggcggaggctctgaagttcagctggttgaaagtggtggcggcctggttcaacctggcggatctctgagactgagctgtgccgccagcggcttcaatgtgtacgcctctggaatgcactgggtccgacaggcccctggcaaaggacttgagtgggtcgccaaaatctaccccgacagcgactacacctattacgccgacagcgtgaagggcagattcaccatcagcgccgacaccagcaagaacaccgcctacctccagatgaactccctgagagccgaggacaccgccgtgtactactgtagcagagacagcagcttctactacgtgtacgctatggactactggggccagggcacactggtcacagtctcttctacgcgtggacagcctaaggccaatcctaccgtgacactgttccctccaagcagcgaagaactccaggccaacaaggccacacttgtgtgcctgatctccgacttctaccctggggctgtgacagtggcttggaaggccgatggatctcctgtgaaagccggcgtggaaaccaccaagccatccaagcagagcaacaacaaatacgccgccagctcctacctgagcctgacacctgagcagtggaagtcccacagatcctacagctgccaagtgacccacgaaggcagcaccgtggaaaagacagtggcccctacagagtgcagcatccccgaggacacattcttcccaagccccgagagcagctgcgacgtgaagctggtggaaaagagcttcgagacagacaccaacctgaacttccagaacctgagcgtgatcggcttcagaatcctgctgctgaaagtggccggctttaacctgctgatgaccctgcggctgtggtccagccgcgccaagagaagcggatctggcgtgaagcagaccctgaatttcgacctgctgaagctggctggcgacgtggaatccaacccaggcccttctagaggccatatgaccgagtacaagcccacggtgcgcctcgccacccgcgacgacgtccccagggccgtacgcaccctcgccgccgcgttcgccgactaccccgccacgcgccacaccgtcgatccggaccgccacatcgagcgggtcaccgagctgcaagaactcttcctcacgcgcgtcgggctcgacatcggcaaggtgtgggtcgcggacgacggcgccgcggtggcggtctggaccacgccggagagcgtcgaagcgggggcggtgttcgccgagatcggcccgcgcatggccgagttgagcggttcccggctggccgcgcagcaacagatggaaggcctcctggcgccgcaccggcccaaggagcccgcgtggttcctggccaccgtcggcgtctcgcccgaccaccagggcaagggtctgggcagcgccgtcgtgctccccggagtggaggcggccgagcgcgccggggtgcccgccttcctggagacctccgcgccccgcaacctccccttctacgagcggctcggcttcaccgtcaccgccgacgtcgaggtgcccgaaggaccgcgcacctggtgcatgacccgcaagcccggtgcctga

SEQ ID NO: 39486 - DNA, 2631 bp, synthetic construct
  source 1..2631: mol_type = other DNA
atggccttaccagtgaccgccttgctcctgccgctggccttgctgctccacgccgccaggccgctcgaggaggcctctacaaagggaccctccgtgtttcctctggctcccagcagcaagtctacaagcggaggaacagccgctctgggctgcctggtcaaggattactttcccgagcctgtgaccgtgtcctggaatagcggagcactgacaagcggcgtgcacacctttccagccgtgctgcaaagcagcggcctgtactctctgagcagcgtggtcacagtgcctagctctagcctgggcacccagacctacatctgcaatgtgaaccacaagcctagcaacaccaaggtggacaagagagtggaacccaagagctgtatccccgaggacacattcttcccaagccccgagagcagctgcgacgtgaagctggtggaaaagagcttcgagacagacaccaacctgaacttccagaacctgagcgtgatcggcttcagaatcctgctgctgaaagtggccggctttaacctgctgatgaccctgcggctgtggtccagcagggccaagcgatctggatctggagcaacaaacttctcactactcaaacaagcaggtgacgtggaggagaatcccgggcctactagcatggccttaccagtgaccgccttgctcctgccgctggccttgctgctccacgccgccaggccggacatccagatgacacagagccctagcagcctgtctgccagcgtgggagacagagtgaccatcacctgtagagccagccaggacgtgaacacagccgtggcttggtatcagcagaagcctggcaaggcccctaagctgctgatctacagcgcctacttcctgtacagcggcgtgcccagcagattcagcggaagcagaagcggcaccgacttcaccctgacaatatccagcctccagcctgaggacttcgccacctactactgccagcagtacagcagatacagccccgtgacctttggacagggcaccaaggtggaaatcaagagaggcggaggcggaagtggaggcggaggatctggcggcggaggctctgaagttcagctggttgaaagtggtggcggcctggttcaacctggcggatctctgagactgagctgtgccgccagcggcttcaatgtgtacgcctctggaatgcactgggtccgacaggcccctggcaaaggacttgagtgggtcgccaaaatctaccccgacagcgactacacctattacgccgacagcgtgaagggcagattcaccatcagcgccgacaccagcaagaacaccgcctacctccagatgaactccctgagagccgaggacaccgccgtgtactactgtagcagagacagcagcttctactacgtgtacgctatggactactggggccagggcacactggtcacagtctcttctacgcgtggacagcctaaggccaatcctaccgtgacactgttccctccaagcagcgaagaactccaggccaacaaggccacacttgtgtgcctgatctccgacttctaccctggggctgtgacagtggcttggaaggccgatggatctcctgtgaaagccggcgtggaaaccaccaagccatccaagcagagcaacaacaaatacgccgccagctcctacctgagcctgacacctgagcagtggaagtcccacagatcctacagctgccaagtgacccacgaaggcagcaccgtggaaaagacagtggcccctacagagtgcagcggcagagccgattgcggctttaccagcgagagctaccagcagggcgtgctgagcgccaccatcctgtacgagatcctgctgggcaaggccaccctgtacgccgtgctggtgtctgccctggtgctgatggctatggtcaagcggaaggacagccggggacgcgccaagagaagcggatctggcgtgaagcagaccctgaatttcgacctgctgaagctggctggcgacgtggaatccaacccaggcccttctagaggccatatgaccgagtacaagcccacggtgcgcctcgccacccgcgacgacgtccccagggccgtacgcaccctcgccgccgcgttcgccgactaccccgccacgcgccacaccgtcgatccggaccgccacatcgagcgggtcaccgagctgcaagaactcttcctcacgcgcgtcgggctcgacatcggcaaggtgtgggtcgcggacgacggcgccgcggtggcggtctggaccacgccggagagcgtcgaagcgggggcggtgttcgccgagatcggcccgcgcatggccgagttgagcggttcccggctggccgcgcagcaacagatggaaggcctcctggcgccgcaccggcccaaggagcccgcgtggttcctggccaccgtcggcgtctcgcccgaccaccagggcaagggtctgggcagcgccgtcgtgctccccggagtggaggcggccgagcgcgccggggtgcccgccttcctggagacctccgcgccccgcaacctccccttctacgagcggctcggcttcaccgtcaccgccgacgtcgaggtgcccgaaggaccgcgcacctggtgcatgacccgcaagcccggtgcctga

SEQ ID NO: 39487 - DNA, 1869 bp, synthetic construct
  source 1..1869: mol_type = other DNA
atggccttaccagtgaccgccttgctcctgccgctggccttgctgctccacgccgccaggccggacatccagatgacacagagccctagcagcctgtctgccagcgtgggagacagagtgaccatcacctgtagagccagccaggacgtgaacacagccgtggcttggtatcagcagaagcctggcaaggcccctaagctgctgatctacagcgcctacttcctgtacagcggcgtgcccagcagattcagcggaagcagaagcggcaccgacttcaccctgacaatatccagcctccagcctgaggacttcgccacctactactgccagcagtacagcagatacagccccgtgacctttggacagggcaccaaggtggaaatcaagagactcgaggacctgaagaacgtgttcccacctgaggtggccgtgttcgagcctagcgaggccgagatcagccacacccagaaagccaccctcgtgtgcctggctaccggcttctaccccgaccatgtggaactgtcttggtgggtcaacggcaaagaggtgcacagcggcgtgtgtaccgacccccagccactgaaagaacagcccgccctgaacgacagccggtactgcctgagcagcagactgagagtgtccgccaccttctggcagaacccccggaaccacttcagatgccaggtgcagttctacggcctgagcgagaacgacgagtggacccaggacagagccaagcccgtgacccagatcgtgtctgccgaagcctggggcagagccgatagcggctttaccagcgagagctaccagcagggcgtgctgagcgccaccatcctgtacgagatcctgctgggcaaggccaccctgtacgccgtgctggtgtctgccctggtgctgatggctatggtcaagcggaaggacagccggggaagggccaagcgatctggatctggagcaacaaacttctcactactcaaacaagcaggtgacgtggaggagaatcccgggcctactagtatggactggatttggcgcatccttttccttgtcggcgctgctaccggcgcgcattccttcgaagaagttcagctggttgaaagtggtggcggcctggttcaacctggcggatctctgagactgagctgtgccgccagcggcttcaatgtgtacgcctctggaatgcactgggtccgacaggcccctggcaaaggacttgagtgggtcgccaaaatctaccccgacagcgactacacctattacgccgacagcgtgaagggcagattcaccatcagcgccgacaccagcaagaacaccgcctacctccagatgaactccctgagagccgaggacaccgccgtgtactactgtagcagagacagcagcttctactacgtgtacgctatggactactggggccagggcacactggtcacagtctcttctacgcgtatccagaaccctgatcctgccgtgtaccagctgcgggatagcaagagcagcgacaagagcgtgtgtctgttcaccgacttcgacagccagaccaacgtgtcccagagcaaggactccgacgtgtacatcaccgataagtgcgtgctggacatgcggagcatggacttcaagagcaactccgccgtggcctggtccaacaagtccgatttcgcctgcgccaacgccttcaacaacagcattatccccgaggacacattcttcccaagccccgagagcagcagcgacgtgaagctggtggaaaagagcttcgagacagacaccaacctgaacttccagaacctgagcgtgatcggcttcagaatcctgctgctgaaagtggccggctttaacctgctgatgaccctgcggctgtggtccagc

SEQ ID NO: 39488 - DNA, 2709 bp, synthetic construct
  source 1..2709: mol_type = other DNA
atggccttaccagtgaccgccttgctcctgccgctggccttgctgctccacgccgccaggccggaggttcagctgcttgagtctggcggaggactggttcaacctggcggaagcctgagactgtcttgtgccgcctctggcagaaccttcagcatgggctggtatagacaggcccctggcaagggcctcgaatttgtgtctgccatcacatacagcggcggcagcccttactacgccgattctgtgaagggcagattcaccatcagccgggacaacagcaagaacaccgtgtacctccagatgaacagcctgagagccgaggacaccgccgtgtactactgtgccgccaatccaacctacggcagcgactggaatgccgagaattggggccagggcacactggtcacagtgtctagtggtaccggcggaggcggatctggcggcggaggtagcggtggcggaggatctgaattcgacatccagatgacacagagccctagcagcctgtctgccagcgtgggagacagagtgaccatcacctgtagagccagccaggacgtgaacacagccgtggcttggtatcagcagaagcctggcaaggcccctaagctgctgatctacagcgcctacttcctgtacagcggcgtgcccagcagattcagcggaagcagaagcggcaccgacttcaccctgacaatatccagcctccagcctgaggacttcgccacctactactgccagcagtacagcagatacagccccgtgacctttggacagggcaccaaggtggaaatcaagagactcgagatccagaaccctgatcctgccgtgtaccagctgcgggatagcaagagcagcgacaagagcgtgtgtctgttcaccgacttcgacagccagaccaacgtgtcccagagcaaggactccgacgtgtacatcaccgataagtgcgtgctggacatgcggagcatggacttcaagagcaactccgccgtggcctggtccaacaagtccgatttcgcctgcgccaacgccttcaacaacagcattatccccgaggacacattcttcccaagcagcgacgtgccctgcgacgtgaagctggtggaaaagagcttcgagacagacaccaacctgaacttccagaacctgagcgtgatcggcttcagaatcctgctgctgaaagtggccggctttaacctgctgatgaccctgcggctgtggtccagccgcgccaagagaagcggatctggcgtgaagcagaccctgaatttcgacctgctgaagctggctggcgacgtggaatccaacccaggccctactagtaccatggactggatttggcgcatccttttccttgtcggcgctgctaccggcacccattccgggcccgaagtgcaactggttgaatccggtggcggcctggtgcaacccggcggatctctcagacttagctgtgccgcctccggcagaaccttcacaatgggatggtacaggcaggctccagggaaagagagagagttcgtcgccgccatctctctgtctcccacactggcctactacgccgactctgtgaaaggccggttcaccatctccagagataatagcaagaacaccgtggtgctgcaaatgaactctctgagagccgaggatacagccctgtactattgtgccgctgaccggaagtccgtgatgagcatcagacccgattactggggacagggcacactggtcacagtgtctagtggatccggcggcggaggatctggcggaggcggatctgggggcggaggctctttcgaagaagttcagctggttgaaagtggtggcggcctggttcaacctggcggatctctgagactgagctgtgccgccagcggcttcaatgtgtacgcctctggaatgcactgggtccgacaggcccctggcaaaggacttgagtgggtcgccaaaatctaccccgacagcgactacacctattacgccgacagcgtgaagggcagattcaccatcagcgccgacaccagcaagaacaccgcctacctccagatgaactccctgagagccgaggacaccgccgtgtactactgtagcagagacagcagcttctactacgtgtacgctatggactactggggccagggcacactggtcacagtctcttctacgcgtgaggacctgaagaacgtgttcccacctgaggtggccgtgttcgagcctagcaaggccgagatcgcccacacccagaaagccaccctcgtgtgcctggctaccggcttctaccccgaccatgtggaactgtcttggtgggtcaacggcaaagaggtgcacagcggcgtgtgtaccgacccccagccactgaaagaacagcccgccctgaacgacagccggtactgcctgagcagcagactgagagtgtccgccaccttctggcagaacccccggaaccacttcagatgccaggtgcagttctacggcctgagcgagaacgacgagtggacccaggacagagccaagcccgtgacccagatcgtgtctgccgaagcctggggcagagccgattgcggcatcaccagcgccagctaccaccagggcgtgctgagcgccaccatcctgtacgagatcctgctgggcaaggccaccctgtacgccgtgctggtgtctgccctggtgctgatggctatggtcaagcggaaggacagccggggataa

SEQ ID NO: 39489 - DNA, 2709 bp, synthetic construct
  source 1..2709: mol_type = other DNA
atggccttaccagtgaccgccttgctcctgccgctggccttgctgctccacgccgccaggccggaagtgcagctggttgaatctggcggaggactggttcaggctggcggatctctgagactgtcttgtgccgccagcggcagaacctttagcatgggctggtttagacaggcccctggcaaagagagagagttcgtcgccgccatcacatactctggcggcagcccttactacgccgactctgtgaagggcagattcaccatcagccgggacaacgccaagaacaccgtgtacctccagatgaacagcctgaagcctgaggacaccgccgtgtactactgcgccgccaatccaacatacggcagcgactggaacgccgagaattggggccagggaacccaagtgacagtgtctagcggtaccggcggaggcggatctggcggcggaggtagcggtggcggaggatctgaattcgacatccagatgacacagagccctagcagcctgtctgccagcgtgggagacagagtgaccatcacctgtagagccagccaggacgtgaacacagccgtggcttggtatcagcagaagcctggcaaggcccctaagctgctgatctacagcgcctacttcctgtacagcggcgtgcccagcagattcagcggaagcagaagcggcaccgacttcaccctgacaatatccagcctccagcctgaggacttcgccacctactactgccagcagtacagcagatacagccccgtgacctttggacagggcaccaaggtggaaatcaagagactcgagatccagaaccctgatcctgccgtgtaccagctgcgggatagcaagagcagcgacaagagcgtgtgtctgttcaccgacttcgacagccagaccaacgtgtcccagagcaaggactccgacgtgtacatcaccgataagtgcgtgctggacatgcggagcatggacttcaagagcaactccgccgtggcctggtccaacaagtccgatttcgcctgcgccaacgccttcaacaacagcattatccccgaggacacattcttcccaagcagcgacgtgccctgcgacgtgaagctggtggaaaagagcttcgagacagacaccaacctgaacttccagaacctgagcgtgatcggcttcagaatcctgctgctgaaagtggccggctttaacctgctgatgaccctgcggctgtggtccagccgcgccaagagaagcggatctggcgtgaagcagaccctgaatttcgacctgctgaagctggctggcgacgtggaatccaacccaggccctactagtaccatggactggatttggcgcatccttttccttgtcggcgctgctaccggcgcccattccgggcccgaagtgcaactggttgaatccggtggcggcctggtgcaacccggcggatctctcagacttagctgtgccgcctccggcagaaccttcacaatgggatggtacaggcaggctccagggaaagagagagagttcgtcgccgccatctctctgtctcccacactggcctactacgccgactctgtgaaaggccggttcaccatctccagagataatagcaagaacaccgtggtgctgcaaatgaactctctgagagccgaggatacagccctgtactattgtgccgctgaccggaagtccgtgatgagcatcagacccgattactggggacagggcacactggtcacagtgtctagtggatccggcggcggaggatctggcggaggcggatctgggggcggaggctctttcgaagaagttcagctggttgaaagtggtggcggcctggttcaacctggcggatctctgagactgagctgtgccgccagcggcttcaatgtgtacgcctctggaatgcactgggtccgacaggcccctggcaaaggacttgagtgggtcgccaaaatctaccccgacagcgactacacctattacgccgacagcgtgaagggcagattcaccatcagcgccgacaccagcaagaacaccgcctacctccagatgaactccctgagagccgaggacaccgccgtgtactactgtagcagagacagcagcttctactacgtgtacgctatggactactggggccagggcacactggtcacagtctcttctacgcgtgaggacctgaagaacgtgttcccacctgaggtggccgtgttcgagcctagcaaggccgagatcgcccacacccagaaagccaccctcgtgtgcctggctaccggcttctaccccgaccatgtggaactgtcttggtgggtcaacggcaaagaggtgcacagcggcgtgtgtaccgacccccagccactgaaagaacagcccgccctgaacgacagccggtactgcctgagcagcagactgagagtgtccgccaccttctggcagaacccccggaaccacttcagatgccaggtgcagttctacggcctgagcgagaacgacgagtggacccaggacagagccaagcccgtgacccagatcgtgtctgccgaagcctggggcagagccgattgcggcatcaccagcgccagctaccaccagggcgtgctgagcgccaccatcctgtacgagatcctgctgggcaaggccaccctgtacgccgtgctggtgtctgccctggtgctgatggctatggtcaagcggaaggacagccggggataa

SEQ ID NO: 39490 - DNA, 2700 bp, synthetic construct
  source 1..2700: mol_type = other DNA
atggccttaccagtgaccgccttgctcctgccgctggccttgctgctccacgccgccaggccggaagtgcagctggttgaatctggcggaggactggttcaggctggcggatctctgagactgtcttgtgccgccagcggcagaacctttagcatgggctggtttagacaggcccctggcaaagagagagagttcgtcgccgccatcacatactctggcggcagcccttactacgccgactctgtgaagggcagattcaccatcagccgggacaacgccaagaacaccgtgtacctccagatgaacagcctgaagcctgaggacaccgccgtgtactactgcgccgccaatccaacatacggcagcgactggaacgccgagaattggggccagggaacccaagtgacagtgtctagcggtaccggcggaggcggatctggcggcggaggtagcggtggcggaggatctgaattcgacatccagatgacacagagccctagcagcctgtctgccagcgtgggagacagagtgaccatcacctgtagagccagccaggacgtgaacacagccgtggcttggtatcagcagaagcctggcaaggcccctaagctgctgatctacagcgcctacttcctgtacagcggcgtgcccagcagattcagcggaagcagaagcggcaccgacttcaccctgacaatatccagcctccagcctgaggacttcgccacctactactgccagcagtacagcagatacagccccgtgacctttggacagggcaccaaggtggaaatcaagagactcgaggacctgaagaacgtgttcccacctgaggtggccgtgttcgagcctagcgaggccgagatcagccacacccagaaagccaccctcgtgtgcctggctaccggcttctaccccgaccatgtggaactgtcttggtgggtcaacggcaaagaggtgcacagcggcgtgtgtaccgacccccagccactgaaagaacagcccgccctgaacgacagccggtactgcctgagcagcagactgagagtgtccgccaccttctggcagaacccccggaaccacttcagatgccaggtgcagttctacggcctgagcgagaacgacgagtggacccaggacagagccaagcccgtgacccagatcgtgtctgccgaagcctggggcagagccgattgcggctttaccagcgagagctaccagcagggcgtgctgagcgccaccatcctgtacgagatcctgctgggcaaggccaccctgtacgccgtgctggtgtctgccctggtgctgatggctatggtcaagcggaaggacagccggggaagggccaagcgatctggatctggagcaacaaacttctcactactcaaacaagcaggtgacgtggaggagaatcccgggcctactagtgccaccatggactggatttggcgcatccttttccttgtcggcgctgctaccggcgcccattccgggcccgaagtgcaactggttgaatccggtggcggcctggtgcaagcaggcggatctctcagacttagctgtgccgcctccggcagaaccttcacaatgggatggtttaggcaggctccagggaaagagagagagttcgtcgccgccatctctctgtctcccacactggcctactacgccgactctgtgaaaggccggttcaccatctccagagataatgccaagaacaccgtggtgctgcaaatgaactctctgaaacccgaggatacagccctgtactattgtgccgctgaccggaagtccgtgatgagcatcagacccgattactggggacagggcacacaagtcacagtgtcctctggatccggcggcggaggatctggcggaggcggatctgggggcggaggctctttcgaagaagttcagctggttgaaagtggtggcggcctggttcaacctggcggatctctgagactgagctgtgccgccagcggcttcaatgtgtacgcctctggaatgcactgggtccgacaggcccctggcaaaggacttgagtgggtcgccaaaatctaccccgacagcgactacacctattacgccgacagcgtgaagggcagattcaccatcagcgccgacaccagcaagaacaccgcctacctccagatgaactccctgagagccgaggacaccgccgtgtactactgtagcagagacagcagcttctactacgtgtacgctatggactactggggccagggcacactggtcacagtctcttctacgcgtatccagaaccctgatcctgccgtgtaccagctgcgggatagcaagagcagcgacaagagcgtgtgtctgttcaccgacttcgacagccagaccaacgtgtcccagagcaaggactccgacgtgtacatcaccgataagtgcgtgctggacatgcggagcatggacttcaagagcaactccgccgtggcctggtccaacaagtccgatttcgcctgcgccaacgccttcaacaacagcattatccccgaggacacattcttcccaagccccgagagcagctgcgacgtgaagctggtggaaaagagcttcgagacagacaccaacctgaacttccagaacctgagcgtgatcggcttcagaatcctgctgctgaaagtggccggctttaacctgctgatgaccctgcggctgtggtccagctaa

SEQ ID NO: 39491 - DNA, 2313 bp, synthetic construct
  source 1..2313: mol_type = other DNA
atggccttaccagtgaccgccttgctcctgccgctggccttgctgctccacgccgccaggccggaagtgcagctggttgaatctggcggaggactggttcagcctggcggatctctgagactgagctgtgaagccagcggcttcgccagcgacgattacatcatcggctggttcagacaggcccctggcaaagagagagagggcgtcagctgcatcagctctaagtacgccaacaccgtgtacaccgacagcgtgaagggcagattcagactgagcagaggcaccgccaagaataccgtgtacctccagatgagcgccctgaagcctgaggataccgccgtgtactactgcgctatggacagccgcagagtgacatgccctgagatcagcaccatgcaccggaacttcgattcttggggccagggcacactggtcacagtgtcatctggtaccggcggaggcggatctggcggcggaggtagcggtggcggaggatctgaattcgacatccagatgacacagagccctagcagcctgtctgccagcgtgggagacagagtgaccatcacctgtagagccagccaggacgtgaacacagccgtggcttggtatcagcagaagcctggcaaggcccctaagctgctgatctacagcgcctacttcctgtacagcggcgtgcccagcagattcagcggaagcagaagcggcaccgacttcaccctgacaatatccagcctccagcctgaggacttcgccacctactactgccagcagtacagcagatacagccccgtgacctttggacagggcaccaaggtggaaatcaagagactcgaggacctgaagaacgtgttcccacctgaggtggccgtgttcgagcctagcaaggccgagatcgcccacacccagaaagccaccctcgtgtgcctggctaccggcttctaccccgaccatgtggaactgtcttggtgggtcaacggcaaagaggtgcacagcggcgtgtgtaccgacccccagccactgaaagaacagcccgccctgaacgacagccggtactgcctgagcagcagactgagagtgtccgccaccttctggcagaacccccggaaccacttcagatgccaggtgcagttctacggcctgagcgagaacgacgagtggacccaggacagagccaagcccgtgacccagatcgtgtctgccgaagcctggggcagagccgattgcggcatcaccagcgccagctaccaccagggcgtgctgagcgccaccatcctgtacgagatcctgctgggcaaggccaccctgtacgccgtgctggtgtctgccctggtgctgatggctatggtcaagcggaaggacagccggggaagggccaagcgatctggatctggagcaacaaacttctcactactcaaacaagcaggtgacgtggaggagaatcccgggcctactagtatggactggatttggcgcatccttttccttgtcggcgctgctaccggcgcgcattccttcgaagaagttcagctggttgaaagtggtggcggcctggttcaacctggcggatctctgagactgagctgtgccgccagcggcttcaatgtgtacgcctctggaatgcactgggtccgacaggcccctggcaaaggacttgagtgggtcgccaaaatctaccccgacagcgactacacctattacgccgacagcgtgaagggcagattcaccatcagcgccgacaccagcaagaacaccgcctacctccagatgaactccctgagagccgaggacaccgccgtgtactactgtagcagagacagcagcttctactacgtgtacgctatggactactggggccagggcacactggtcacagtctcttctacgcgtatccagaaccctgatcctgccgtgtaccagctgcgggatagcaagagcagcgacaagagcgtgtgtctgttcaccgacttcgacagccagaccaacgtgtcccagagcaaggactccgacgtgtacatcaccgataagtgcgtgctggacatgcggagcatggacttcaagagcaactccgccgtggcctggtccaacaagtccgatttcgcctgcgccaacgccttcaacaacagcattatccccgaggacacattcttcccaagcagcgacgtgccctgcgacgtgaagctggtggaaaagagcttcgagacagacaccaacctgaacttccagaacctgagcgtgatcggcttcagaatcctgctgctgaaagtggccggctttaacctgctgatgaccctgcggctgtggtccagctaa

SEQ ID NO: 39492 - DNA, 2286 bp, synthetic construct
  source 1..2286: mol_type = other DNA
atggccttaccagtgaccgccttgctcctgccgctggccttgctgctccacgccgccaggccggacatccagatgacacagagccctagcagcctgtctgccagcgtgggagacagagtgaccatcacctgtagagccagccaggacgtgaacacagccgtggcttggtatcagcagaagcctggcaaggcccctaagctgctgatctacagcgcctacttcctgtacagcggcgtgcccagcagattcagcggaagcagaagcggcaccgacttcaccctgacaatatccagcctccagcctgaggacttcgccacctactactgccagcagtacagcagatacagccccgtgacctttggacagggcaccaaggtggaaatcaagagactcgaggacctgaagaacgtgttcccacctgaggtggccgtgttcgagcctagcgaggccgagatcagccacacccagaaagccaccctcgtgtgcctggctaccggcttctaccccgaccatgtggaactgtcttggtgggtcaacggcaaagaggtgcacagcggcgtgtgtaccgacccccagccactgaaagaacagcccgccctgaacgacagccggtactgcctgagcagcagactgagagtgtccgccaccttctggcagaacccccggaaccacttcagatgccaggtgcagttctacggcctgagcgagaacgacgagtggacccaggacagagccaagcccgtgacccagatcgtgtctgccgaagcctggggcagagccgattgcggctttaccagcgagagctaccagcagggcgtgctgagcgccaccatcctgtacgagatcctgctgggcaaggccaccctgtacgccgtgctggtgtctgccctggtgctgatggctatggtcaagcggaaggacagccggggaagggccaagcgatctggatctggagcaacaaacttctcactactcaaacaagcaggtgacgtggaggagaatcccgggcctactagtaccatggactggatttggcgcatccttttccttgtcggcgctgctaccggcgcccattccgggcccgaagtgcaactggttgaatccggtggcggcctggtgcaacccggcggatctctcagacttagctgtgccgcctccggcagaaccttcacaatgggatggtacaggcaggctccagggaaagagagagagttcgtcgccgccatctctctgtctcccacactggcctactacgccgactctgtgaaaggccggttcaccatctccagagataatagcaagaacaccgtggtgctgcaaatgaactctctgagagccgaggatacagccctgtactattgtgccgctgaccggaagtccgtgatgagcatcagacccgattactggggacagggcacactggtcacagtgtctagtggatccggcggcggaggatctggcggaggcggatctgggggcggaggctctttcgaagaagttcagctggttgaaagtggtggcggcctggttcaacctggcggatctctgagactgagctgtgccgccagcggcttcaatgtgtacgcctctggaatgcactgggtccgacaggcccctggcaaaggacttgagtgggtcgccaaaatctaccccgacagcgactacacctattacgccgacagcgtgaagggcagattcaccatcagcgccgacaccagcaagaacaccgcctacctccagatgaactccctgagagccgaggacaccgccgtgtactactgtagcagagacagcagcttctactacgtgtacgctatggactactggggccagggcacactggtcacagtctcttctacgcgtatccagaaccctgatcctgccgtgtaccagctgcgggatagcaagagcagcgacaagagcgtgtgtctgttcaccgacttcgacagccagaccaacgtgtcccagagcaaggactccgacgtgtacatcaccgataagtgcgtgctggacatgcggagcatggacttcaagagcaactccgccgtggcctggtccaacaagtccgatttcgcctgcgccaacgccttcaacaacagcattatccccgaggacacattcttcccaagccccgagagcagctgcgacgtgaagctggtggaaaagagcttcgagacagacaccaacctgaacttccagaacctgagcgtgatcggcttcagaatcctgctgctgaaagtggccggctttaacctgctgatgaccctgcggctgtggtccagctaa

SEQ ID NO: 39493 - DNA, 2304 bp, synthetic construct
  source 1..2304: mol_type = other DNA
atggccttaccagtgaccgccttgctcctgccgctggccttgctgctccacgccgccaggccggacatccagatgacacagagccctagcagcctgtctgccagcgtgggagacagagtgaccatcacctgtagagccagccaggacgtgaacacagccgtggcttggtatcagcagaagcctggcaaggcccctaagctgctgatctacagcgcctacttcctgtacagcggcgtgcccagcagattcagcggaagcagaagcggcaccgacttcaccctgacaatatccagcctccagcctgaggacttcgccacctactactgccagcagtacagcagatacagccccgtgacctttggacagggcaccaaggtggaaatcaagagactcgaggacctgaagaacgtgttcccacctgaggtggccgtgttcgagcctagcgaggccgagatcagccacacccagaaagccaccctcgtgtgcctggctaccggcttctaccccgaccatgtggaactgtcttggtgggtcaacggcaaagaggtgcacagcggcgtgtgtaccgacccccagccactgaaagaacagcccgccctgaacgacagccggtactgcctgagcagcagactgagagtgtccgccaccttctggcagaacccccggaaccacttcagatgccaggtgcagttctacggcctgagcgagaacgacgagtggacccaggacagagccaagcccgtgacccagatcgtgtctgccgaagcctggggcagagccgattgcggctttaccagcgagagctaccagcagggcgtgctgagcgccaccatcctgtacgagatcctgctgggcaaggccaccctgtacgccgtgctggtgtctgccctggtgctgatggctatggtcaagcggaaggacagccggggaagggccaagcgatctggatctggagcaacaaacttctcactactcaaacaagcaggtgacgtggaggagaatcccgggcctactagtaccatggactggatttggcgcatccttttccttgtcggcgctgctaccggcgcccattccgggccccaggtgcagctggttgaatctggcggaggactggttcagcctggcggatctctgagactgtcttgtgccgccagcggcaacatcaacagcagaaactgcatgggctggttcagacaggcccctggcaagggaagagaaggcgtggcagctatcggccaagtgaccggcagaacctactacgtggacagcgtgaagggcagattcaccatcagcctggacaacagcaagaacaccctgtacctccagatgaacagcctgagagccgaggacaccgccgtgtactattgtgctgctgcccctggctgtctgctgtctgcacttagaagcgccgactacagaaactggggccagggcacactggtcaccgtttcttctggatccggcggcggaggatctggcggaggcggatctgggggcggaggctctttcgaagaagttcagctggttgaaagtggtggcggcctggttcaacctggcggatctctgagactgagctgtgccgccagcggcttcaatgtgtacgcctctggaatgcactgggtccgacaggcccctggcaaaggacttgagtgggtcgccaaaatctaccccgacagcgactacacctattacgccgacagcgtgaagggcagattcaccatcagcgccgacaccagcaagaacaccgcctacctccagatgaactccctgagagccgaggacaccgccgtgtactactgtagcagagacagcagcttctactacgtgtacgctatggactactggggccagggcacactggtcacagtctcttctacgcgtatccagaaccctgatcctgccgtgtaccagctgcgggatagcaagagcagcgacaagagcgtgtgtctgttcaccgacttcgacagccagaccaacgtgtcccagagcaaggactccgacgtgtacatcaccgataagtgcgtgctggacatgcggagcatggacttcaagagcaactccgccgtggcctggtccaacaagtccgatttcgcctgcgccaacgccttcaacaacagcattatccccgaggacacattcttcccaagccccgagagcagctgcgacgtgaagctggtggaaaagagcttcgagacagacaccaacctgaacttccagaacctgagcgtgatcggcttcagaatcctgctgctgaaagtggccggctttaacctgctgatgaccctgcggctgtggtccagc

SEQ ID NO: 39494 - DNA, 2307 bp, synthetic construct
  source 1..2307: mol_type = other DNA
atggccttaccagtgaccgccttgctcctgccgctggccttgctgctccacgccgccaggccggacatccagatgacacagagccctagcagcctgtctgccagcgtgggagacagagtgaccatcacctgtagagccagccaggacgtgaacacagccgtggcttggtatcagcagaagcctggcaaggcccctaagctgctgatctacagcgcctacttcctgtacagcggcgtgcccagcagattcagcggaagcagaagcggcaccgacttcaccctgacaatatccagcctccagcctgaggacttcgccacctactactgccagcagtacagcagatacagccccgtgacctttggacagggcaccaaggtggaaatcaagagactcgaggacctgaagaacgtgttcccacctgaggtggccgtgttcgagcctagcgaggccgagatcagccacacccagaaagccaccctcgtgtgcctggctaccggcttctaccccgaccatgtggaactgtcttggtgggtcaacggcaaagaggtgcacagcggcgtgtgtaccgacccccagccactgaaagaacagcccgccctgaacgacagccggtactgcctgagcagcagactgagagtgtccgccaccttctggcagaacccccggaaccacttcagatgccaggtgcagttctacggcctgagcgagaacgacgagtggacccaggacagagccaagcccgtgacccagatcgtgtctgccgaagcctggggcagagccgattgcggctttaccagcgagagctaccagcagggcgtgctgagcgccaccatcctgtacgagatcctgctgggcaaggccaccctgtacgccgtgctggtgtctgccctggtgctgatggctatggtcaagcggaaggacagccggggaagggccaagcgatctggatctggagcaacaaacttctcactactcaaacaagcaggtgacgtggaggagaatcccgggcctactagtaccatggactggatttggcgcatccttttccttgtcggcgctgctaccggcgcccattccgggccccaggtgcagctggttgaatctggcggaggatctgttcaggctggcggctctctgagactgtcttgtggcgcttccggcaacatcagcagcagaaactgcatgggctggttcagacaggcccctggcaaagagagagaaggcgttgccgccatcggacaagtgaccggcagatcctactacgtggacagcgtgaagggcagattcaccatcagcctggacaacgccaagaacaccctgtacctccagatgaacacactgaagcccgaggacaccgccatgtactactgtgctgctgcccctggctgtctgctgtctgcacttagaagcgccgactacagaaactggggccagggaacccaagtgacagtgtctagtggatccggcggcggaggatctggcggaggcggatctgggggcggaggctctttcgaagaagttcagctggttgaaagtggtggcggcctggttcaacctggcggatctctgagactgagctgtgccgccagcggcttcaatgtgtacgcctctggaatgcactgggtccgacaggcccctggcaaaggacttgagtgggtcgccaaaatctaccccgacagcgactacacctattacgccgacagcgtgaagggcagattcaccatcagcgccgacaccagcaagaacaccgcctacctccagatgaactccctgagagccgaggacaccgccgtgtactactgtagcagagacagcagcttctactacgtgtacgctatggactactggggccagggcacactggtcacagtctcttctacgcgtatccagaaccctgatcctgccgtgtaccagctgcgggatagcaagagcagcgacaagagcgtgtgtctgttcaccgacttcgacagccagaccaacgtgtcccagagcaaggactccgacgtgtacatcaccgataagtgcgtgctggacatgcggagcatggacttcaagagcaactccgccgtggcctggtccaacaagtccgatttcgcctgcgccaacgccttcaacaacagcattatccccgaggacacattcttcccaagccccgagagcagctgcgacgtgaagctggtggaaaagagcttcgagacagacaccaacctgaacttccagaacctgagcgtgatcggcttcagaatcctgctgctgaaagtggccggctttaacctgctgatgaccctgcggctgtggtccagctaa

SEQ ID NO: 39495 - DNA, 2730 bp, synthetic construct
  source 1..2730: mol_type = other DNA
atggccttaccagtgaccgccttgctcctgccgctggccttgctgctccacgccgccaggccggaagtgcagctggttgaatctggcggaggactggttcaggctggcggatctctgagactgtcttgtgccgccagcggcagaacctttagcatgggctggtttagacaggcccctggcaaagagagagagttcgtcgccgccatcacatactctggcggcagcccttactacgccgactctgtgaagggcagattcaccatcagccgggacaacgccaagaacaccgtgtacctccagatgaacagcctgaagcctgaggacaccgccgtgtactactgcgccgccaatccaacatacggcagcgactggaacgccgagaattggggccagggaacccaagtgacagtgtctagcggtaccggcggaggcggatctggcggcggaggtagcggtggcggaggatctgaattcgacatccagatgacacagagccctagcagcctgtctgccagcgtgggagacagagtgaccatcacctgtagagccagccaggacgtgaacacagccgtggcttggtatcagcagaagcctggcaaggcccctaagctgctgatctacagcgcctacttcctgtacagcggcgtgcccagcagattcagcggaagcagaagcggcaccgacttcaccctgacaatatccagcctccagcctgaggacttcgccacctactactgccagcagtacagcagatacagccccgtgacctttggacagggcaccaaggtggaaatcaagagactcgagatccagaaccctgatcctgccgtgtaccagctgcgggatagcaagagcagcgacaagagcgtgtgtctgttcaccgacttcgacagccagaccaacgtgtcccagagcaaggactccgacgtgtacatcaccgataagtgcgtgctggacatgcggagcatggacttcaagagcaactccgccgtggcctggtccaacaagtccgatttcgcctgcgccaacgccttcaacaacagcattatccccgaggacacattcttcccaagcagcgacgtgccctgcgacgtgaagctggtggaaaagagcttcgagacagacaccaacctgaacttccagaacctgagcgtgatcggcttcagaatcctgctgctgaaagtggccggctttaacctgctgatgaccctgcggctgtggtccagccgcgccaagagaagcggatctggcgtgaagcagaccctgaatttcgacctgctgaagctggctggcgacgtggaatccaacccaggccctactagtaccatggactggatttggcgcatccttttccttgtcggcgctgctaccggcgcccattccgggccccaggtgcagctggttgaatctggcggaggatctgttcaggctggcggctctctgagactgtcttgtggcgcttccggcaacatcagcagcagaaactgcatgggctggttcagacaggcccctggcaaagagagagaaggcgttgccgccatcggacaagtgaccggcagatcctactacgtggacagcgtgaagggcagattcaccatcagcctggacaacgccaagaacaccctgtacctccagatgaacacactgaagcccgaggacaccgccatgtactactgtgctgctgcccctggctgtctgctgtctgcacttagaagcgccgactacagaaactggggccagggaacccaagtgacagtgtctagtggatccggcggcggaggatctggcggaggcggatctgggggcggaggctctttcgaagaagttcagctggttgaaagtggtggcggcctggttcaacctggcggatctctgagactgagctgtgccgccagcggcttcaatgtgtacgcctctggaatgcactgggtccgacaggcccctggcaaaggacttgagtgggtcgccaaaatctaccccgacagcgactacacctattacgccgacagcgtgaagggcagattcaccatcagcgccgacaccagcaagaacaccgcctacctccagatgaactccctgagagccgaggacaccgccgtgtactactgtagcagagacagcagcttctactacgtgtacgctatggactactggggccagggcacactggtcacagtctcttctacgcgtgaggacctgaagaacgtgttcccacctgaggtggccgtgttcgagcctagcaaggccgagatcgcccacacccagaaagccaccctcgtgtgcctggctaccggcttctaccccgaccatgtggaactgtcttggtgggtcaacggcaaagaggtgcacagcggcgtgtgtaccgacccccagccactgaaagaacagcccgccctgaacgacagccggtactgcctgagcagcagactgagagtgtccgccaccttctggcagaacccccggaaccacttcagatgccaggtgcagttctacggcctgagcgagaacgacgagtggacccaggacagagccaagcccgtgacccagatcgtgtctgccgaagcctggggcagagccgattgcggcatcaccagcgccagctaccaccagggcgtgctgagcgccaccatcctgtacgagatcctgctgggcaaggccaccctgtacgccgtgctggtgtctgccctggtgctgatggctatggtcaagcggaaggacagccggggataa

SEQ ID NO: 39496 - DNA, 2721 bp, synthetic construct
  source 1..2721: mol_type = other DNA
atggccttaccagtgaccgccttgctcctgccgctggccttgctgctccacgccgccaggccgcaggtgcagctggttgaatctggcggaggatctgttcaggctggcggctctctgagactgtcttgtggcgcttccggcaacatcagcagcagaaactgcatgggctggttcagacaggcccctggcaaagagagagaaggcgttgccgccatcggacaagtgaccggcagatcctactacgtggacagcgtgaagggcagattcaccatcagcctggacaacgccaagaacaccctgtacctccagatgaacacactgaagcccgaggacaccgccatgtactactgtgctgctgcccctggctgtctgctgtctgcacttagaagcgccgactacagaaactggggccagggaacccaagtgacagtgtctagtggtaccggcggaggcggatctggcggcggaggtagcggtggcggaggatctgaattcgacatccagatgacacagagccctagcagcctgtctgccagcgtgggagacagagtgaccatcacctgtagagccagccaggacgtgaacacagccgtggcttggtatcagcagaagcctggcaaggcccctaagctgctgatctacagcgcctacttcctgtacagcggcgtgcccagcagattcagcggaagcagaagcggcaccgacttcaccctgacaatatccagcctccagcctgaggacttcgccacctactactgccagcagtacagcagatacagccccgtgacctttggacagggcaccaaggtggaaatcaagagactcgaggacctgaagaacgtgttcccacctgaggtggccgtgttcgagcctagcgaggccgagatcagccacacccagaaagccaccctcgtgtgcctggctaccggcttctaccccgaccatgtggaactgtcttggtgggtcaacggcaaagaggtgcacagcggcgtgtgtaccgacccccagccactgaaagaacagcccgccctgaacgacagccggtactgcctgagcagcagactgagagtgtccgccaccttctggcagaacccccggaaccacttcagatgccaggtgcagttctacggcctgagcgagaacgacgagtggacccaggacagagccaagcccgtgacccagatcgtgtctgccgaagcctggggcagagccgattgcggctttaccagcgagagctaccagcagggcgtgctgagcgccaccatcctgtacgagatcctgctgggcaaggccaccctgtacgccgtgctggtgtctgccctggtgctgatggctatggtcaagcggaaggacagccggggaagggccaagcgatctggatctggagcaacaaacttctcactactcaaacaagcaggtgacgtggaggagaatcccgggcctactagtgccaccatggactggatttggcgcatccttttccttgtcggcgctgctaccggcgcccattccgggcccgaagtgcaactggttgaatccggtggcggcctggtgcaagcaggcggatctctcagacttagctgtgccgcctccggcagaaccttcacaatgggatggtttaggcaggctccagggaaagagagagagttcgtcgccgccatctctctgtctcccacactggcctactacgccgactctgtgaaaggccggttcaccatctccagagataatgccaagaacaccgtggtgctgcaaatgaactctctgaaacccgaggatacagccctgtactattgtgccgctgaccggaagtccgtgatgagcatcagacccgattactggggacagggcacacaagtcacagtgtcctctggatccggcggcggaggatctggcggaggcggatctgggggcggaggctctttcgaagaagttcagctggttgaaagtggtggcggcctggttcaacctggcggatctctgagactgagctgtgccgccagcggcttcaatgtgtacgcctctggaatgcactgggtccgacaggcccctggcaaaggacttgagtgggtcgccaaaatctaccccgacagcgactacacctattacgccgacagcgtgaagggcagattcaccatcagcgccgacaccagcaagaacaccgcctacctccagatgaactccctgagagccgaggacaccgccgtgtactactgtagcagagacagcagcttctactacgtgtacgctatggactactggggccagggcacactggtcacagtctcttctacgcgtatccagaaccctgatcctgccgtgtaccagctgcgggatagcaagagcagcgacaagagcgtgtgtctgttcaccgacttcgacagccagaccaacgtgtcccagagcaaggactccgacgtgtacatcaccgataagtgcgtgctggacatgcggagcatggacttcaagagcaactccgccgtggcctggtccaacaagtccgatttcgcctgcgccaacgccttcaacaacagcattatccccgaggacacattcttcccaagccccgagagcagctgcgacgtgaagctggtggaaaagagcttcgagacagacaccaacctgaacttccagaacctgagcgtgatcggcttcagaatcctgctgctgaaagtggccggctttaacctgctgatgaccctgcggctgtggtccagctaa

SEQ ID NO: 39497 - DNA, 2310 bp, synthetic construct
  source 1..2310: mol_type = other DNA
atggccttaccagtgaccgccttgctcctgccgctggccttgctgctccacgccgccaggccgcaggtgcagctggttgaatctggcggaggatctgttcaggctggcggctctctgagactgtcttgtggcgcttccggcaacatcagcagcagaaactgcatgggctggttcagacaggcccctggcaaagagagagaaggcgttgccgccatcggacaagtgaccggcagatcctactacgtggacagcgtgaagggcagattcaccatcagcctggacaacgccaagaacaccctgtacctccagatgaacacactgaagcccgaggacaccgccatgtactactgtgctgctgcccctggctgtctgctgtctgcacttagaagcgccgactacagaaactggggccagggaacccaagtgacagtgtctagtggtaccggcggaggcggatctggcggcggaggtagcggtggcggaggatctgaattcgacatccagatgacacagagccctagcagcctgtctgccagcgtgggagacagagtgaccatcacctgtagagccagccaggacgtgaacacagccgtggcttggtatcagcagaagcctggcaaggcccctaagctgctgatctacagcgcctacttcctgtacagcggcgtgcccagcagattcagcggaagcagaagcggcaccgacttcaccctgacaatatccagcctccagcctgaggacttcgccacctactactgccagcagtacagcagatacagccccgtgacctttggacagggcaccaaggtggaaatcaagagactcgaggacctgaagaacgtgttcccacctgaggtggccgtgttcgagcctagcgaggccgagatcagccacacccagaaagccaccctcgtgtgcctggctaccggcttctaccccgaccatgtggaactgtcttggtgggtcaacggcaaagaggtgcacagcggcgtgtgtaccgacccccagccactgaaagaacagcccgccctgaacgacagccggtactgcctgagcagcagactgagagtgtccgccaccttctggcagaacccccggaaccacttcagatgccaggtgcagttctacggcctgagcgagaacgacgagtggacccaggacagagccaagcccgtgacccagatcgtgtctgccgaagcctggggcagagccgattgcggctttaccagcgagagctaccagcagggcgtgctgagcgccaccatcctgtacgagatcctgctgggcaaggccaccctgtacgccgtgctggtgtctgccctggtgctgatggctatggtcaagcggaaggacagccggggaagggccaagcgatctggatctggagcaacaaacttctcactactcaaacaagcaggtgacgtggaggagaatcccgggcctactagtgccaccatggactggatttggcgcatccttttccttgtcggcgctgctaccggcgcccattccttcgaagaagttcagctggttgaaagtggtggcggcctggttcaacctggcggatctctgagactgagctgtgccgccagcggcttcaatgtgtacgcctctggaatgcactgggtccgacaggcccctggcaaaggacttgagtgggtcgccaaaatctaccccgacagcgactacacctattacgccgacagcgtgaagggcagattcaccatcagcgccgacaccagcaagaacaccgcctacctccagatgaactccctgagagccgaggacaccgccgtgtactactgtagcagagacagcagcttctactacgtgtacgctatggactactggggccagggcacactggtcacagtctcttctacgcgtatccagaaccctgatcctgccgtgtaccagctgcgggatagcaagagcagcgacaagagcgtgtgtctgttcaccgacttcgacagccagaccaacgtgtcccagagcaaggactccgacgtgtacatcaccgataagtgcgtgctggacatgcggagcatggacttcaagagcaactccgccgtggcctggtccaacaagtccgatttcgcctgcgccaacgccttcaacaacagcattatccccgaggacacattcttcccaagccccgagagcagctgcgacgtgaagctggtggaaaagagcttcgagacagacaccaacctgaacttccagaacctgagcgtgatcggcttcagaatcctgctgctgaaagtggccggctttaacctgctgatgaccctgcggctgtggtccagctaa

SEQ ID NO: 39498 - DNA, 2310 bp, synthetic construct
  source 1..2310: mol_type = other DNA
atggccttaccagtgaccgccttgctcctgccgctggccttgctgctccacgccgccaggccgcaagttcagctggtggaaagcggtggtggcgttgtgcaacctggtggaagtctgaggctgagctgtgccgcttctggcctgagctttagcacctacactgtggcctggttcaggcaggctcccggaaagggtcttgaaggcgtggccgccattccttacaccagccagcacatggtgtacacagacagcgtcagaggccggttcaccatcagcagagacaactccaagaatacgctctatctccagatgaactctctgcgcgccgaagatacagccgtgtattactgcgccaccgacagacggcctggcacctctatgctggctatcaacggctacaacagatggggacagggaaccaccgtgaccgtgtcatctggtaccggcggaggcggatctggcggcggaggtagcggtggcggaggatctgaattcgacatccagatgacacagagccctagcagcctgtctgccagcgtgggagacagagtgaccatcacctgtagagccagccaggacgtgaacacagccgtggcttggtatcagcagaagcctggcaaggcccctaagctgctgatctacagcgcctacttcctgtacagcggcgtgcccagcagattcagcggaagcagaagcggcaccgacttcaccctgacaatatccagcctccagcctgaggacttcgccacctactactgccagcagtacagcagatacagccccgtgacctttggacagggcaccaaggtggaaatcaagagactcgaggacctgaagaacgtgttcccacctgaggtggccgtgttcgagcctagcgaggccgagatcagccacacccagaaagccaccctcgtgtgcctggctaccggcttctaccccgaccatgtggaactgtcttggtgggtcaacggcaaagaggtgcacagcggcgtgtgtaccgacccccagccactgaaagaacagcccgccctgaacgacagccggtactgcctgagcagcagactgagagtgtccgccaccttctggcagaacccccggaaccacttcagatgccaggtgcagttctacggcctgagcgagaacgacgagtggacccaggacagagccaagcccgtgacccagatcgtgtctgccgaagcctggggcagagccgattgcggctttaccagcgagagctaccagcagggcgtgctgagcgccaccatcctgtacgagatcctgctgggcaaggccaccctgtacgccgtgctggtgtctgccctggtgctgatggctatggtcaagcggaaggacagccggggaagggccaagcgatctggatctggagcaacaaacttctcactactcaaacaagcaggtgacgtggaggagaatcccgggcctactagtgccaccatggactggatttggcgcatccttttccttgtcggcgctgctaccggcgcccattccttcgaagaagttcagctggttgaaagtggtggcggcctggttcaacctggcggatctctgagactgagctgtgccgccagcggcttcaatgtgtacgcctctggaatgcactgggtccgacaggcccctggcaaaggacttgagtgggtcgccaaaatctaccccgacagcgactacacctattacgccgacagcgtgaagggcagattcaccatcagcgccgacaccagcaagaacaccgcctacctccagatgaactccctgagagccgaggacaccgccgtgtactactgtagcagagacagcagcttctactacgtgtacgctatggactactggggccagggcacactggtcacagtctcttctacgcgtatccagaaccctgatcctgccgtgtaccagctgcgggatagcaagagcagcgacaagagcgtgtgtctgttcaccgacttcgacagccagaccaacgtgtcccagagcaaggactccgacgtgtacatcaccgataagtgcgtgctggacatgcggagcatggacttcaagagcaactccgccgtggcctggtccaacaagtccgatttcgcctgcgccaacgccttcaacaacagcattatccccgaggacacattcttcccaagccccgagagcagctgcgacgtgaagctggtggaaaagagcttcgagacagacaccaacctgaacttccagaacctgagcgtgatcggcttcagaatcctgctgctgaaagtggccggctttaacctgctgatgaccctgcggctgtggtccagctaa

SEQ ID NO: 39499 - DNA, 2307 bp, synthetic construct
  source 1..2307: mol_type = other DNA
atggccttaccagtgaccgccttgctcctgccgctggccttgctgctccacgccgccaggccggacatccagatgacacagagccctagcagcctgtctgccagcgtgggagacagagtgaccatcacctgtagagccagccaggacgtgaacacagccgtggcttggtatcagcagaagcctggcaaggcccctaagctgctgatctacagcgcctacttcctgtacagcggcgtgcccagcagattcagcggaagcagaagcggcaccgacttcaccctgacaatatccagcctccagcctgaggacttcgccacctactactgccagcagtacagcagatacagccccgtgacctttggacagggcaccaaggtggaaatcaagagactcgaggacctgaagaacgtgttcccacctgaggtggccgtgttcgagcctagcgaggccgagatcagccacacccagaaagccaccctcgtgtgcctggctaccggcttctaccccgaccatgtggaactgtcttggtgggtcaacggcaaagaggtgcacagcggcgtgtgtaccgacccccagccactgaaagaacagcccgccctgaacgacagccggtactgcctgagcagcagactgagagtgtccgccaccttctggcagaacccccggaaccacttcagatgccaggtgcagttctacggcctgagcgagaacgacgagtggacccaggacagagccaagcccgtgacccagatcgtgtctgccgaagcctggggcagagccgattgcggctttaccagcgagagctaccagcagggcgtgctgagcgccaccatcctgtacgagatcctgctgggcaaggccaccctgtacgccgtgctggtgtctgccctggtgctgatggctatggtcaagcggaaggacagccggggaagggccaagcgatctggatctggagcaacaaacttctcactactcaaacaagcaggtgacgtggaggagaatcccgggcctactagtaccatggactggatttggcgcatccttttccttgtcggcgctgctaccggcgcccattccgggccccaagttcagctggtggaaagcggtggtggcgttgtgcaacctggtggaagtctgaggctgagctgtgccgcttctggcctgagctttagcacctacactgtggcctggttcaggcaggctcccggaaagggtcttgaaggcgtggccgccattccttacaccagccagcacatggtgtacacagacagcgtcagaggccggttcaccatcagcagagacaactccaagaatacgctctatctccagatgaactctctgcgcgccgaagatacagccgtgtattactgcgccaccgacagacggcctggcacctctatgctggctatcaacggctacaacagatggggacagggaaccaccgtgaccgtgtcatctggatccggcggcggaggatctggcggaggcggatctgggggcggaggctctttcgaagaagttcagctggttgaaagtggtggcggcctggttcaacctggcggatctctgagactgagctgtgccgccagcggcttcaatgtgtacgcctctggaatgcactgggtccgacaggcccctggcaaaggacttgagtgggtcgccaaaatctaccccgacagcgactacacctattacgccgacagcgtgaagggcagattcaccatcagcgccgacaccagcaagaacaccgcctacctccagatgaactccctgagagccgaggacaccgccgtgtactactgtagcagagacagcagcttctactacgtgtacgctatggactactggggccagggcacactggtcacagtctcttctacgcgtatccagaaccctgatcctgccgtgtaccagctgcgggatagcaagagcagcgacaagagcgtgtgtctgttcaccgacttcgacagccagaccaacgtgtcccagagcaaggactccgacgtgtacatcaccgataagtgcgtgctggacatgcggagcatggacttcaagagcaactccgccgtggcctggtccaacaagtccgatttcgcctgcgccaacgccttcaacaacagcattatccccgaggacacattcttcccaagccccgagagcagctgcgacgtgaagctggtggaaaagagcttcgagacagacaccaacctgaacttccagaacctgagcgtgatcggcttcagaatcctgctgctgaaagtggccggctttaacctgctgatgaccctgcggctgtggtccagctaa

SEQ ID NO: 39500 - DNA, 2313 bp, synthetic construct
  source 1..2313: mol_type = other DNA
atggccttaccagtgaccgccttgctcctgccgctggccttgctgctccacgccgccaggccggacatccagatgacacagagccctagcagcctgtctgccagcgtgggagacagagtgaccatcacctgtagagccagccaggacgtgaacacagccgtggcttggtatcagcagaagcctggcaaggcccctaagctgctgatctacagcgcctacttcctgtacagcggcgtgcccagcagattcagcggaagcagaagcggcaccgacttcaccctgacaatatccagcctccagcctgaggacttcgccacctactactgccagcagtacagcagatacagccccgtgacctttggacagggcaccaaggtggaaatcaagagactcgaggacctgaagaacgtgttcccacctgaggtggccgtgttcgagcctagcgaggccgagatcagccacacccagaaagccaccctcgtgtgcctggctaccggcttctaccccgaccatgtggaactgtcttggtgggtcaacggcaaagaggtgcacagcggcgtgtgtaccgacccccagccactgaaagaacagcccgccctgaacgacagccggtactgcctgagcagcagactgagagtgtccgccaccttctggcagaacccccggaaccacttcagatgccaggtgcagttctacggcctgagcgagaacgacgagtggacccaggacagagccaagcccgtgacccagatcgtgtctgccgaagcctggggcagagccgattgcggctttaccagcgagagctaccagcagggcgtgctgagcgccaccatcctgtacgagatcctgctgggcaaggccaccctgtacgccgtgctggtgtctgccctggtgctgatggctatggtcaagcggaaggacagccggggaagggccaagcgatctggatctggagcaacaaacttctcactactcaaacaagcaggtgacgtggaggagaatcccgggcctactagtaccatggactggatttggcgcatccttttccttgtcggcgctgctaccggcgcccattccgggcccgaggtgcagctggttgaatctggcggaggatctgttcaggctggcggctctctgagactgtcttgtgccgccagcggctacacctacagcatcaactgcatgggctggttcagacaggcccctggcaaagagagagaaggcgttgccgccatctctaccggcggaggcagaaccgattaccgggattctgtgaagggcagattcaccatcagccaggacaacgccaagaacaccgtgtacctccagatgaacagcctgaagcctgaggacaccgccatgtactactgtgccggcaagaccacctatcctggctacggatgtggcctgggcagaagcgcctacaattattggggccagggcacccaagtgaccgtgtcatctggatccggcggcggaggatctggcggaggcggatctgggggcggaggctctttcgaagaagttcagctggttgaaagtggtggcggcctggttcaacctggcggatctctgagactgagctgtgccgccagcggcttcaatgtgtacgcctctggaatgcactgggtccgacaggcccctggcaaaggacttgagtgggtcgccaaaatctaccccgacagcgactacacctattacgccgacagcgtgaagggcagattcaccatcagcgccgacaccagcaagaacaccgcctacctccagatgaactccctgagagccgaggacaccgccgtgtactactgtagcagagacagcagcttctactacgtgtacgctatggactactggggccagggcacactggtcacagtctcttctacgcgtatccagaaccctgatcctgccgtgtaccagctgcgggatagcaagagcagcgacaagagcgtgtgtctgttcaccgacttcgacagccagaccaacgtgtcccagagcaaggactccgacgtgtacatcaccgataagtgcgtgctggacatgcggagcatggacttcaagagcaactccgccgtggcctggtccaacaagtccgatttcgcctgcgccaacgccttcaacaacagcattatccccgaggacacattcttcccaagccccgagagcagctgcgacgtgaagctggtggaaaagagcttcgagacagacaccaacctgaacttccagaacctgagcgtgatcggcttcagaatcctgctgctgaaagtggccggctttaacctgctgatgaccctgcggctgtggtccagctaa

SEQ ID NO: 39501 - DNA, 1869 bp, synthetic construct
  source 1..1869: mol_type = other DNA
atggccttaccagtgaccgccttgctcctgccgctggccttgctgctccacgccgccaggccggacatccagatgacacagagccctagcagcctgtctgccagcgtgggagacagagtgaccatcacctgtagagccagccaggacgtgaacacagccgtggcttggtatcagcagaagcctggcaaggcccctaagctgctgatctacagcgcctacttcctgtacagcggcgtgcccagcagattcagcggaagcagaagcggcaccgacttcaccctgacaatatccagcctccagcctgaggacttcgccacctactactgccagcagtacagcagatacagccccgtgacctttggacagggcaccaaggtggaaatcaagagactcgaggacctgaagcacgtgttcccacctgaggtggccgtgttcgagcctagcgacgccgagatctggcacacccagaaagccaccctcgtgtgcctggctaccggcttctaccccgaccatgtggaactgtcttggtgggtcaacggcaaagaggtgcacagcggcgtgtctaccgacccccagccactgaaagaacagcccgccctgaacgacagccggtactgcctgagcagcagactgagagtgtccgccaccttctggcagaacccccggaaccacttcagatgccaggtgcagttctacggcctgagcgagaacgacgagtggacccaggacagagccaagcccgtgacccagatcgtgtctgccgaagcctggggcagagccgattgcggctttaccagcgagagctaccagcagggcgtgctgagcgccaccatcctgtacgagatcctgctgggcaaggccaccctgtacgccgtgctggtgtctgccctggtgctgatggctatggtcaagcggaaggacagccggggaagggccaagcgatctggatctggagcaacaaacttctcactactcaaacaagcaggtgacgtggaggagaatcccgggcctactagtatggactggatttggcgcatccttttccttgtcggcgctgctaccggcgcgcattccttcgaagaagttcagctggttgaaagtggtggcggcctggttcaacctggcggatctctgagactgagctgtgccgccagcggcttcaatgtgtacgcctctggaatgcactgggtccgacaggcccctggcaaaggacttgagtgggtcgccaaaatctaccccgacagcgactacacctattacgccgacagcgtgaagggcagattcaccatcagcgccgacaccagcaagaacaccgcctacctccagatgaactccctgagagccgaggacaccgccgtgtactactgtagcagagacagcagcttctactacgtgtacgctatggactactggggccagggcacactggtcacagtctcttctacgcgtatccagaaccctgatcctgccgtgtaccagctgcgggatagcaagagcagcgacaagagcgtgtgtctgttcaccgacttcgacagccagaccaacgtgtcccagagcaaggactccgacgtgtacatcaccgataagaccgtgctggacatgcggagcatggacttcaagagcaactccgccgtggcctggtccagcaagtccgatttcgcctgcgccaacgccttcaacaacagcattatccccgaggacacattcttcccaagccccgagatggcctgcgacgtgaagctggtggaaaagagcttcgagacagacaccaacctgaacttccagaacctgctcgtgatctggctgagaatcctgctgctgaaagtggccggctttaacctgctgatgaccctgcggctgtggtccagc

SEQ ID NO: 39502 - DNA, 1869 bp, synthetic construct
  source 1..1869: mol_type = other DNA
atggccttaccagtgaccgccttgctcctgccgctggccttgctgctccacgccgccaggccggacatccagatgacacagagccctagcagcctgtctgccagcgtgggagacagagtgaccatcacctgtagagccagccaggacgtgaacacagccgtggcttggtatcagcagaagcctggcaaggcccctaagctgctgatctacagcgcctacttcctgtacagcggcgtgcccagcagattcagcggaagcagaagcggcaccgacttcaccctgacaatatccagcctccagcctgaggacttcgccacctactactgccagcagtacagcagatacagccccgtgacctttggacagggcaccaaggtggaaatcaagagactcgaggacctgaagcacgtgttcccacctgaggtggccgtgttcgagcctagcgacgccgagatctggcacacccagaaagccaccctcgtgtgcctggctaccggcttctaccccgaccatgtggaactgtcttggtgggtcaacggcaaagaggtgcacagcggcgtgtctaccgacccccagccactgaaagaacagcccgccctgaacgacagccggtactgcctgagcagcagactgagagtgtccgccaccttctggcagaacccccggaaccacttcagatgccaggtgcagttctacggcctgagcgagaacgacgagtggacccaggacagagccaagcccgtgacccagatcgtgtctgccgaagcctggggcagagccgattgcggctttaccagcgagagctaccagcagggcgtgctgagcgccaccatcctgtacgagatcctgctgggcaaggccaccctgtacgccgtgctggtgtctgccctggtgctgatggctatggtcaagcggaaggacagccggggaagggccaagcgatctggatctggagcaacaaacttctcactactcaaacaagcaggtgacgtggaggagaatcccgggcctactagtatggactggatttggcgcatccttttccttgtcggcgctgctaccggcgcgcattccttcgaagaagttcagctggttgaaagtggtggcggcctggttcaacctggcggatctctgagactgagctgtgccgccagcggcttcaatgtgtacgcctctggaatgcactgggtccgacaggcccctggcaaaggacttgagtgggtcgccaaaatctaccccgacagcgactacacctattacgccgacagcgtgaagggcagattcaccatcagcgccgacaccagcaagaacaccgcctacctccagatgaactccctgagagccgaggacaccgccgtgtactactgtagcagagacagcagcttctactacgtgtacgctatggactactggggccagggcacactggtcacagtctcttctacgcgtatccagaaccctgatcctgccgtgtaccagctgcgggatagcaagagcagcgacaagagcgtgtgtctgttcaccgacttcgacagccagaccaacgtgtcccagagcaaggactccgacgtgtacatcaccgataagaccgtgctggacatgcggagcatggacttcaagagcaactccgccgtggcctggtccaccaagtccgatttcgcctgcgccaacgccttcaacaacagcattatccccgaggacacattcttcccaagccccgaggtggtgtgcgacgtgaagctggtggaaaagagcttcgagacagacaccaacctgaacttccagaacctggtggtgatcggcgccagaatcctgctgctgaaagtggccggctttaacctgctgatgaccctgcggctgtggtccagc

SEQ ID NO: 39503 - DNA, 1869 bp, synthetic construct
  source 1..1869: mol_type = other DNA
atggccttaccagtgaccgccttgctcctgccgctggccttgctgctccacgccgccaggccggacatccagatgacacagagccctagcagcctgtctgccagcgtgggagacagagtgaccatcacctgtagagccagccaggacgtgaacacagccgtggcttggtatcagcagaagcctggcaaggcccctaagctgctgatctacagcgcctacttcctgtacagcggcgtgcccagcagattcagcggaagcagaagcggcaccgacttcaccctgacaatatccagcctccagcctgaggacttcgccacctactactgccagcagtacagcagatacagccccgtgacctttggacagggcaccaaggtggaaatcaagagactcgaggacctgaagaacgtgttcccacctgaggtggccgtgttcgagcctagcaaggccgagatcagcagaacccagaaagccaccctcgtgtgcctggctaccggcttctaccctcctcatgtggaactgtcttggtgggtcaacggcaaagaggtgcacgacggcgtgtgtaccgacccccagccactgaaagaacagcccgccctgaacgacagccggtactgcctgagcagcagactgagagtgtccgccaccttctggcagaacccccggaaccacttcagatgccaggtgcagttctacggcctgagcgagaacgacgagtggacccaggacagagccaagcccgtgacccagatcgtgtctgccgaagcctggggcagagccgattgcggctttaccagcgagagctaccagcagggcgtgctgagcgccaccatcctgtacgagatcctgctgggcaaggccaccctgtacgccgtgctggtgtctgccctggtgctgatggctatggtcaagcggaaggacagccggggaagggccaagcgatctggatctggagcaacaaacttctcactactcaaacaagcaggtgacgtggaggagaatcccgggcctactagtatggactggatttggcgcatccttttccttgtcggcgctgctaccggcgcgcattccttcgaagaagttcagctggttgaaagtggtggcggcctggttcaacctggcggatctctgagactgagctgtgccgccagcggcttcaatgtgtacgcctctggaatgcactgggtccgacaggcccctggcaaaggacttgagtgggtcgccaaaatctaccccgacagcgactacacctattacgccgacagcgtgaagggcagattcaccatcagcgccgacaccagcaagaacaccgcctacctccagatgaactccctgagagccgaggacaccgccgtgtactactgtagcagagacagcagcttctactacgtgtacgctatggactactggggccagggcacactggtcacagtctcttctacgcgtatccagaaccctgatcctgccgtgtaccagctgcgggatagcaagagcagcgacaagttcgtgtgtctgttcaccgacttcgacagccagatcaacgtgtcccagagcaaggactccgacgtgtacatcaccgataagtgcgtgctggacatgcggagcatggacttcaagagcaactccgccgtggcctggtccaacaagtccgatttcacctgcgccaacgccttcaacaacagcattatccccgaggacacattcttcccaagccccgagagcagctgcgacgtgaagctggtggaaaagagcttcgagacagacaccaacctgaacttccagaacctgagcgtgatcggcttcagaatcctgctgctgaaagtggccggctttaacctgctgatgaccctgcggctgtggtccagc

SEQ ID NO: 39504 - DNA, 2295 bp, synthetic construct
  source 1..2295: mol_type = other DNA
atggccttaccagtgaccgccttgctcctgccgctggccttgctgctccacgccgccaggccggacatccagatgacacagagccctagcagcctgtctgccagcgtgggagacagagtgaccatcacctgtagagccagccaggacgtgaacacagccgtggcttggtatcagcagaagcctggcaaggcccctaagctgctgatctacagcgcctacttcctgtacagcggcgtgcccagcagattcagcggaagcagaagcggcaccgacttcaccctgacaatatccagcctccagcctgaggacttcgccacctactactgccagcagtacagcagatacagccccgtgacctttggacagggcaccaaggtggaaatcaagagactcgaggacctgaagaacgtgttcccacctgaggtggccgtgttcgagcctagcgaggccgagatcagccacacccagaaagccaccctcgtgtgcctggctaccggcttctaccccgaccatgtggaactgtcttggtgggtcaacggcaaagaggtgcacagcggcgtgtgtaccgacccccagccactgaaagaacagcccgccctgaacgacagccggtactgcctgagcagcagactgagagtgtccgccaccttctggcagaacccccggaaccacttcagatgccaggtgcagttctacggcctgagcgagaacgacgagtggacccaggacagagccaagcccgtgacccagatcgtgtctgccgaagcctggggcagagccgattgcggctttaccagcgagagctaccagcagggcgtgctgagcgccaccatcctgtacgagatcctgctgggcaaggccaccctgtacgccgtgctggtgtctgccctggtgctgatggctatggtcaagcggaaggacagccggggaagggccaagcgatctggatctggagcaacaaacttctcactactcaaacaagcaggtgacgtggaggagaatcccgggcctactagtaccatggactggatttggcgcatccttttccttgtcggcgctgctaccggcgcccattccgggccccaggtgcagctccaagaaagcggacccggactggttaagccctctcagaccctgtctctgacctgcacagttagcggagccagcattaccacaggcgagtattattggaattggtttcggcagccaccaggcaaggggcttgagtggatgggtgctattgctgcctctggcagcaccacctactctcccagctttgagagcagaacctccatcagccgggacacctccaaaaaccagttctctctgaagctgtcctccgtgaccgctgctgacaccgccgtctattattgtggccggtctttcggcgtggcagctgtgaccacaggacagaacagaggccagggaacacttgtgaccgtgtcctctggatccggcggcggaggatctggcggaggcggatctgggggcggaggctctttcgaagaagttcagctggttgaaagtggtggcggcctggttcaacctggcggatctctgagactgagctgtgccgccagcggcttcaatgtgtacgcctctggaatgcactgggtccgacaggcccctggcaaaggacttgagtgggtcgccaaaatctaccccgacagcgactacacctattacgccgacagcgtgaagggcagattcaccatcagcgccgacaccagcaagaacaccgcctacctccagatgaactccctgagagccgaggacaccgccgtgtactactgtagcagagacagcagcttctactacgtgtacgctatggactactggggccagggcacactggtcacagtctcttctacgcgtatccagaaccctgatcctgccgtgtaccagctgcgggatagcaagagcagcgacaagagcgtgtgtctgttcaccgacttcgacagccagaccaacgtgtcccagagcaaggactccgacgtgtacatcaccgataagtgcgtgctggacatgcggagcatggacttcaagagcaactccgccgtggcctggtccaacaagtccgatttcgcctgcgccaacgccttcaacaacagcattatccccgaggacacattcttcccaagccccgagagcagctgcgacgtgaagctggtggaaaagagcttcgagacagacaccaacctgaacttccagaacctgagcgtgatcggcttcagaatcctgctgctgaaagtggccggctttaacctgctgatgaccctgcggctgtggtccagc

SEQ ID NO: 39505 - DNA, 2718 bp, synthetic construct
  source 1..2718: mol_type = other DNA
atggccttaccagtgaccgccttgctcctgccgctggccttgctgctccacgccgccaggccgcaggttcagctgcaagagtctggccctggcctggtcaagcctagccaaacactgagcctgacctgtaccgtgtctggcggctctatcaccaccggcgagttctactggaactggttcagacagcctcctggcaaaggactggaatggatgggagccattgccgccagcggcagcacaacatacagccctagcttcgagagccggaccagcatcagcagagacaccagcaagaatcagttcagcctgaagctgagcagcgtgacagccgccgatacagccgtgtattactgcggcagatcctttggagtggccgccgtgacaaccggccagaatagaggacagggcaccctggtcacagtgtctagcggtaccggcggaggcggatctggcggcggaggtagcggtggcggaggatctgaattcgacatccagatgacacagagccctagcagcctgtctgccagcgtgggagacagagtgaccatcacctgtagagccagccaggacgtgaacacagccgtggcttggtatcagcagaagcctggcaaggcccctaagctgctgatctacagcgcctacttcctgtacagcggcgtgcccagcagattcagcggaagcagaagcggcaccgacttcaccctgacaatatccagcctccagcctgaggacttcgccacctactactgccagcagtacagcagatacagccccgtgacctttggacagggcaccaaggtggaaatcaagagactcgagatccagaaccctgatcctgccgtgtaccagctgcgggatagcaagagcagcgacaagagcgtgtgtctgttcaccgacttcgacagccagaccaacgtgtcccagagcaaggactccgacgtgtacatcaccgataagtgcgtgctggacatgcggagcatggacttcaagagcaactccgccgtggcctggtccaacaagtccgatttcgcctgcgccaacgccttcaacaacagcattatccccgaggacacattcttcccaagcagcgacgtgccctgcgacgtgaagctggtggaaaagagcttcgagacagacaccaacctgaacttccagaacctgagcgtgatcggcttcagaatcctgctgctgaaagtggccggctttaacctgctgatgaccctgcggctgtggtccagccgcgccaagagaagcggatctggcgtgaagcagaccctgaatttcgacctgctgaagctggctggcgacgtggaatccaacccaggccctactagtaccatggactggatttggcgcatccttttccttgtcggcgctgctaccggcgcccattccgggcccgaagtgcaactggttgaatccggtggcggcctggtgcaacccggcggatctctcagacttagctgtgccgcctccggcagaaccttcacaatgggatggtacaggcaggctccagggaaagagagagagttcgtcgccgccatctctctgtctcccacactggcctactacgccgactctgtgaaaggccggttcaccatctccagagataatagcaagaacaccgtggtgctgcaaatgaactctctgagagccgaggatacagccctgtactattgtgccgctgaccggaagtccgtgatgagcatcagacccgattactggggacagggcacactggtcacagtgtctagtggatccggcggcggaggatctggcggaggcggatctgggggcggaggctctttcgaagaagttcagctggttgaaagtggtggcggcctggttcaacctggcggatctctgagactgagctgtgccgccagcggcttcaatgtgtacgcctctggaatgcactgggtccgacaggcccctggcaaaggacttgagtgggtcgccaaaatctaccccgacagcgactacacctattacgccgacagcgtgaagggcagattcaccatcagcgccgacaccagcaagaacaccgcctacctccagatgaactccctgagagccgaggacaccgccgtgtactactgtagcagagacagcagcttctactacgtgtacgctatggactactggggccagggcacactggtcacagtctcttctacgcgtgaggacctgaagaacgtgttcccacctgaggtggccgtgttcgagcctagcaaggccgagatcgcccacacccagaaagccaccctcgtgtgcctggctaccggcttctaccccgaccatgtggaactgtcttggtgggtcaacggcaaagaggtgcacagcggcgtgtgtaccgacccccagccactgaaagaacagcccgccctgaacgacagccggtactgcctgagcagcagactgagagtgtccgccaccttctggcagaacccccggaaccacttcagatgccaggtgcagttctacggcctgagcgagaacgacgagtggacccaggacagagccaagcccgtgacccagatcgtgtctgccgaagcctggggcagagccgattgcggcatcaccagcgccagctaccaccagggcgtgctgagcgccaccatcctgtacgagatcctgctgggcaaggccaccctgtacgccgtgctggtgtctgccctggtgctgatggctatggtcaagcggaaggacagccgggga

SEQ ID NO: 39506 - DNA, 2307 bp, synthetic construct
  source 1..2307: mol_type = other DNA
atggccttaccagtgaccgccttgctcctgccgctggccttgctgctccacgccgccaggccgcaggttcagctgcaagagtctggccctggcctggtcaagcctagccaaacactgagcctgacctgtaccgtgtctggcggctctatcaccaccggcgagttctactggaactggttcagacagcctcctggcaaaggactggaatggatgggagccattgccgccagcggcagcacaacatacagccctagcttcgagagccggaccagcatcagcagagacaccagcaagaatcagttcagcctgaagctgagcagcgtgacagccgccgatacagccgtgtattactgcggcagatcctttggagtggccgccgtgacaaccggccagaatagaggacagggcaccctggtcacagtgtctagcggtaccggcggaggcggatctggcggcggaggtagcggtggcggaggatctgaattcgacatccagatgacacagagccctagcagcctgtctgccagcgtgggagacagagtgaccatcacctgtagagccagccaggacgtgaacacagccgtggcttggtatcagcagaagcctggcaaggcccctaagctgctgatctacagcgcctacttcctgtacagcggcgtgcccagcagattcagcggaagcagaagcggcaccgacttcaccctgacaatatccagcctccagcctgaggacttcgccacctactactgccagcagtacagcagatacagccccgtgacctttggacagggcaccaaggtggaaatcaagagactcgagatccagaaccctgatcctgccgtgtaccagctgcgggatagcaagagcagcgacaagagcgtgtgtctgttcaccgacttcgacagccagaccaacgtgtcccagagcaaggactccgacgtgtacatcaccgataagtgcgtgctggacatgcggagcatggacttcaagagcaactccgccgtggcctggtccaacaagtccgatttcgcctgcgccaacgccttcaacaacagcattatccccgaggacacattcttcccaagcagcgacgtgccctgcgacgtgaagctggtggaaaagagcttcgagacagacaccaacctgaacttccagaacctgagcgtgatcggcttcagaatcctgctgctgaaagtggccggctttaacctgctgatgaccctgcggctgtggtccagccgcgccaagagaagcggatctggcgtgaagcagaccctgaatttcgacctgctgaagctggctggcgacgtggaatccaacccaggccctactagtaccatggactggatttggcgcatccttttccttgtcggcgctgctaccggcgcccattccttcgaagaagttcagctggttgaaagtggtggcggcctggttcaacctggcggatctctgagactgagctgtgccgccagcggcttcaatgtgtacgcctctggaatgcactgggtccgacaggcccctggcaaaggacttgagtgggtcgccaaaatctaccccgacagcgactacacctattacgccgacagcgtgaagggcagattcaccatcagcgccgacaccagcaagaacaccgcctacctccagatgaactccctgagagccgaggacaccgccgtgtactactgtagcagagacagcagcttctactacgtgtacgctatggactactggggccagggcacactggtcacagtctcttctacgcgtgaggacctgaagaacgtgttcccacctgaggtggccgtgttcgagcctagcaaggccgagatcgcccacacccagaaagccaccctcgtgtgcctggctaccggcttctaccccgaccatgtggaactgtcttggtgggtcaacggcaaagaggtgcacagcggcgtgtgtaccgacccccagccactgaaagaacagcccgccctgaacgacagccggtactgcctgagcagcagactgagagtgtccgccaccttctggcagaacccccggaaccacttcagatgccaggtgcagttctacggcctgagcgagaacgacgagtggacccaggacagagccaagcccgtgacccagatcgtgtctgccgaagcctggggcagagccgattgcggcatcaccagcgccagctaccaccagggcgtgctgagcgccaccatcctgtacgagatcctgctgggcaaggccaccctgtacgccgtgctggtgtctgccctggtgctgatggctatggtcaagcggaaggacagccgggga

SEQ ID NO: 39507 - DNA, 2706 bp, synthetic construct
  source 1..2706: mol_type = other DNA
atggccttaccagtgaccgccttgctcctgccgctggccttgctgctccacgccgccaggccggaagtgcagctggttgaatctggcggaggactggttcaggctggcggatctctgagactgtcttgtgccgccagcggcagaacctttagcatgggctggtttagacaggcccctggcaaagagagagagttcgtcgccgccatcacatactctggcggcagcccttactacgccgactctgtgaagggcagattcaccatcagccgggacaacgccaagaacaccgtgtacctccagatgaacagcctgaagcctgaggacaccgccgtgtactactgcgccgccaatccaacatacggcagcgactggaacgccgagaattggggccagggaacccaagtgacagtgtctagcggtaccggcggaggcggatctggcggcggaggtagcggtggcggaggatctgaattcgacatccagatgacacagagccctagcagcctgtctgccagcgtgggagacagagtgaccatcacctgtagagccagccaggacgtgaacacagccgtggcttggtatcagcagaagcctggcaaggcccctaagctgctgatctacagcgcctacttcctgtacagcggcgtgcccagcagattcagcggaagcagaagcggcaccgacttcaccctgacaatatccagcctccagcctgaggacttcgccacctactactgccagcagtacagcagatacagccccgtgacctttggacagggcaccaaggtggaaatcaagagactcgaggacctgaagaacgtgttcccacctgaggtggccgtgttcgagcctagcgaggccgagatcagccacacccagaaagccaccctcgtgtgcctggctaccggcttctaccccgaccatgtggaactgtcttggtgggtcaacggcaaagaggtgcacagcggcgtgtgtaccgacccccagccactgaaagaacagcccgccctgaacgacagccggtactgcctgagcagcagactgagagtgtccgccaccttctggcagaacccccggaaccacttcagatgccaggtgcagttctacggcctgagcgagaacgacgagtggacccaggacagagccaagcccgtgacccagatcgtgtctgccgaagcctggggcagagccgattgcggctttaccagcgagagctaccagcagggcgtgctgagcgccaccatcctgtacgagatcctgctgggcaaggccaccctgtacgccgtgctggtgtctgccctggtgctgatggctatggtcaagcggaaggacagccggggaagggccaagcgatctggatctggagcaacaaacttctcactactcaaacaagcaggtgacgtggaggagaatcccgggcctactagtaccatggactggatttggcgcatccttttccttgtcggcgctgctaccggcgcccattccgggccccaggtgcagctccaagaaagcggacccggactggttaagccctctcagaccctgtctctgacctgcacagttagcggagccagcattaccacaggcgagtattattggaattggtttcggcagccaccaggcaaggggcttgagtggatgggtgctattgctgcctctggcagcaccacctactctcccagctttgagagcagaacctccatcagccgggacacctccaaaaaccagttctctctgaagctgtcctccgtgaccgctgctgacaccgccgtctattattgtggccggtctttcggcgtggcagctgtgaccacaggacagaacagaggccagggaacacttgtgaccgtgtcctctggatccggcggcggaggatctggcggaggcggatctgggggcggaggctctttcgaagaagttcagctggttgaaagtggtggcggcctggttcaacctggcggatctctgagactgagctgtgccgccagcggcttcaatgtgtacgcctctggaatgcactgggtccgacaggcccctggcaaaggacttgagtgggtcgccaaaatctaccccgacagcgactacacctattacgccgacagcgtgaagggcagattcaccatcagcgccgacaccagcaagaacaccgcctacctccagatgaactccctgagagccgaggacaccgccgtgtactactgtagcagagacagcagcttctactacgtgtacgctatggactactggggccagggcacactggtcacagtctcttctacgcgtatccagaaccctgatcctgccgtgtaccagctgcgggatagcaagagcagcgacaagagcgtgtgtctgttcaccgacttcgacagccagaccaacgtgtcccagagcaaggactccgacgtgtacatcaccgataagtgcgtgctggacatgcggagcatggacttcaagagcaactccgccgtggcctggtccaacaagtccgatttcgcctgcgccaacgccttcaacaacagcattatccccgaggacacattcttcccaagccccgagagcagctgcgacgtgaagctggtggaaaagagcttcgagacagacaccaacctgaacttccagaacctgagcgtgatcggcttcagaatcctgctgctgaaagtggccggctttaacctgctgatgaccctgcggctgtggtccagc

SEQ ID NO: 39508 - DNA, 2727 bp, synthetic construct
  source 1..2727: mol_type = other DNA
atggccttaccagtgaccgccttgctcctgccgctggccttgctgctccacgccgccaggccggaagtgcagctggttgaatctggcggaggactggttcaggctggcggatctctgagactgtcttgtgccgccagcggcagaacctttagcatgggctggtttagacaggcccctggcaaagagagagagttcgtcgccgccatcacatactctggcggcagcccttactacgccgactctgtgaagggcagattcaccatcagccgggacaacgccaagaacaccgtgtacctccagatgaacagcctgaagcctgaggacaccgccgtgtactactgcgccgccaatccaacatacggcagcgactggaacgccgagaattggggccagggaacccaagtgacagtgtctagcggtaccggcggaggcggatctggcggcggaggtagcggtggcggaggatctgaattcgacatccagatgacacagagccctagcagcctgtctgccagcgtgggagacagagtgaccatcacctgtagagccagccaggacgtgaacacagccgtggcttggtatcagcagaagcctggcaaggcccctaagctgctgatctacagcgcctacttcctgtacagcggcgtgcccagcagattcagcggaagcagaagcggcaccgacttcaccctgacaatatccagcctccagcctgaggacttcgccacctactactgccagcagtacagcagatacagccccgtgacctttggacagggcaccaaggtggaaatcaagagactcgagatccagaaccctgatcctgccgtgtaccagctgcgggatagcaagagcagcgacaagagcgtgtgtctgttcaccgacttcgacagccagaccaacgtgtcccagagcaaggactccgacgtgtacatcaccgataagtgcgtgctggacatgcggagcatggacttcaagagcaactccgccgtggcctggtccaacaagtccgatttcgcctgcgccaacgccttcaacaacagcattatccccgaggacacattcttcccaagcagcgacgtgccctgcgacgtgaagctggtggaaaagagcttcgagacagacaccaacctgaacttccagaacctgagcgtgatcggcttcagaatcctgctgctgaaagtggccggctttaacctgctgatgaccctgcggctgtggtccagccgcgccaagagaagcggatctggcgtgaagcagaccctgaatttcgacctgctgaagctggctggcgacgtggaatccaacccaggccctactagtaccatggactggatttggcgcatccttttccttgtcggcgctgctaccggcgcccattccgggccccaggtgcagctggttgaatctggcggaggactggttcagcctggcggatctctgagactgtcttgtgccgccagcggcaacatcaacagcagaaactgcatgggctggttcagacaggcccctggcaagggaagagaaggcgtggcagctatcggccaagtgaccggcagaacctactacgtggacagcgtgaagggcagattcaccatcagcctggacaacagcaagaacaccctgtacctccagatgaacagcctgagagccgaggacaccgccgtgtactattgtgctgctgcccctggctgtctgctgtctgcacttagaagcgccgactacagaaactggggccagggcacactggtcaccgtttcttctggatccggcggcggaggatctggcggaggcggatctgggggcggaggctctttcgaagaagttcagctggttgaaagtggtggcggcctggttcaacctggcggatctctgagactgagctgtgccgccagcggcttcaatgtgtacgcctctggaatgcactgggtccgacaggcccctggcaaaggacttgagtgggtcgccaaaatctaccccgacagcgactacacctattacgccgacagcgtgaagggcagattcaccatcagcgccgacaccagcaagaacaccgcctacctccagatgaactccctgagagccgaggacaccgccgtgtactactgtagcagagacagcagcttctactacgtgtacgctatggactactggggccagggcacactggtcacagtctcttctacgcgtgaggacctgaagaacgtgttcccacctgaggtggccgtgttcgagcctagcaaggccgagatcgcccacacccagaaagccaccctcgtgtgcctggctaccggcttctaccccgaccatgtggaactgtcttggtgggtcaacggcaaagaggtgcacagcggcgtgtgtaccgacccccagccactgaaagaacagcccgccctgaacgacagccggtactgcctgagcagcagactgagagtgtccgccaccttctggcagaacccccggaaccacttcagatgccaggtgcagttctacggcctgagcgagaacgacgagtggacccaggacagagccaagcccgtgacccagatcgtgtctgccgaagcctggggcagagccgattgcggcatcaccagcgccagctaccaccagggcgtgctgagcgccaccatcctgtacgagatcctgctgggcaaggccaccctgtacgccgtgctggtgtctgccctggtgctgatggctatggtcaagcggaaggacagccgggga

SEQ ID NO: 39509 - DNA, 2715 bp, synthetic construct
  source 1..2715: mol_type = other DNA
atggccttaccagtgaccgccttgctcctgccgctggccttgctgctccacgccgccaggccggaagtgcagctggttgaatctggcggaggactggttcaggctggcggatctctgagactgtcttgtgccgccagcggcagaacctttagcatgggctggtttagacaggcccctggcaaagagagagagttcgtcgccgccatcacatactctggcggcagcccttactacgccgactctgtgaagggcagattcaccatcagccgggacaacgccaagaacaccgtgtacctccagatgaacagcctgaagcctgaggacaccgccgtgtactactgcgccgccaatccaacatacggcagcgactggaacgccgagaattggggccagggaacccaagtgacagtgtctagcggtaccggcggaggcggatctggcggcggaggtagcggtggcggaggatctgaattcgacatccagatgacacagagccctagcagcctgtctgccagcgtgggagacagagtgaccatcacctgtagagccagccaggacgtgaacacagccgtggcttggtatcagcagaagcctggcaaggcccctaagctgctgatctacagcgcctacttcctgtacagcggcgtgcccagcagattcagcggaagcagaagcggcaccgacttcaccctgacaatatccagcctccagcctgaggacttcgccacctactactgccagcagtacagcagatacagccccgtgacctttggacagggcaccaaggtggaaatcaagagactcgaggacctgaagaacgtgttcccacctgaggtggccgtgttcgagcctagcgaggccgagatcagccacacccagaaagccaccctcgtgtgcctggctaccggcttctaccccgaccatgtggaactgtcttggtgggtcaacggcaaagaggtgcacagcggcgtgtgtaccgacccccagccactgaaagaacagcccgccctgaacgacagccggtactgcctgagcagcagactgagagtgtccgccaccttctggcagaacccccggaaccacttcagatgccaggtgcagttctacggcctgagcgagaacgacgagtggacccaggacagagccaagcccgtgacccagatcgtgtctgccgaagcctggggcagagccgattgcggctttaccagcgagagctaccagcagggcgtgctgagcgccaccatcctgtacgagatcctgctgggcaaggccaccctgtacgccgtgctggtgtctgccctggtgctgatggctatggtcaagcggaaggacagccggggaagggccaagcgatctggatctggagcaacaaacttctcactactcaaacaagcaggtgacgtggaggagaatcccgggcctactagtaccatggactggatttggcgcatccttttccttgtcggcgctgctaccggcgcccattccgggccccaggtgcagctggttgaatctggcggaggactggttcagcctggcggatctctgagactgtcttgtgccgccagcggcaacatcaacagcagaaactgcatgggctggttcagacaggcccctggcaagggaagagaaggcgtggcagctatcggccaagtgaccggcagaacctactacgtggacagcgtgaagggcagattcaccatcagcctggacaacagcaagaacaccctgtacctccagatgaacagcctgagagccgaggacaccgccgtgtactattgtgctgctgcccctggctgtctgctgtctgcacttagaagcgccgactacagaaactggggccagggcacactggtcaccgtttcttctggatccggcggcggaggatctggcggaggcggatctgggggcggaggctctttcgaagaagttcagctggttgaaagtggtggcggcctggttcaacctggcggatctctgagactgagctgtgccgccagcggcttcaatgtgtacgcctctggaatgcactgggtccgacaggcccctggcaaaggacttgagtgggtcgccaaaatctaccccgacagcgactacacctattacgccgacagcgtgaagggcagattcaccatcagcgccgacaccagcaagaacaccgcctacctccagatgaactccctgagagccgaggacaccgccgtgtactactgtagcagagacagcagcttctactacgtgtacgctatggactactggggccagggcacactggtcacagtctcttctacgcgtatccagaaccctgatcctgccgtgtaccagctgcgggatagcaagagcagcgacaagagcgtgtgtctgttcaccgacttcgacagccagaccaacgtgtcccagagcaaggactccgacgtgtacatcaccgataagtgcgtgctggacatgcggagcatggacttcaagagcaactccgccgtggcctggtccaacaagtccgatttcgcctgcgccaacgccttcaacaacagcattatccccgaggacacattcttcccaagccccgagagcagctgcgacgtgaagctggtggaaaagagcttcgagacagacaccaacctgaacttccagaacctgagcgtgatcggcttcagaatcctgctgctgaaagtggccggctttaacctgctgatgaccctgcggctgtggtccagc

SEQ ID NO: 39510 - DNA, 2715 bp, synthetic construct
  source 1..2715: mol_type = other DNA
atggccttaccagtgaccgccttgctcctgccgctggccttgctgctccacgccgccaggccggaagtgcaactggttgaatccggtggcggcctggtgcaagcaggcggatctctcagacttagctgtgccgcctccggcagaaccttcacaatgggatggtttaggcaggctccagggaaagagagagagttcgtcgccgccatctctctgtctcccacactggcctactacgccgactctgtgaaaggccggttcaccatctccagagataatgccaagaacaccgtggtgctgcaaatgaactctctgaaacccgaggatacagccctgtactattgtgccgctgaccggaagtccgtgatgagcatcagacccgattactggggacagggcacacaagtcacagtgtcctctggtaccggcggaggcggatctggcggcggaggtagcggtggcggaggatctgaattcgacatccagatgacacagagccctagcagcctgtctgccagcgtgggagacagagtgaccatcacctgtagagccagccaggacgtgaacacagccgtggcttggtatcagcagaagcctggcaaggcccctaagctgctgatctacagcgcctacttcctgtacagcggcgtgcccagcagattcagcggaagcagaagcggcaccgacttcaccctgacaatatccagcctccagcctgaggacttcgccacctactactgccagcagtacagcagatacagccccgtgacctttggacagggcaccaaggtggaaatcaagagactcgaggacctgaagaacgtgttcccacctgaggtggccgtgttcgagcctagcgaggccgagatcagccacacccagaaagccaccctcgtgtgcctggctaccggcttctaccccgaccatgtggaactgtcttggtgggtcaacggcaaagaggtgcacagcggcgtgtgtaccgacccccagccactgaaagaacagcccgccctgaacgacagccggtactgcctgagcagcagactgagagtgtccgccaccttctggcagaacccccggaaccacttcagatgccaggtgcagttctacggcctgagcgagaacgacgagtggacccaggacagagccaagcccgtgacccagatcgtgtctgccgaagcctggggcagagccgattgcggctttaccagcgagagctaccagcagggcgtgctgagcgccaccatcctgtacgagatcctgctgggcaaggccaccctgtacgccgtgctggtgtctgccctggtgctgatggctatggtcaagcggaaggacagccggggaagggccaagcgatctggatctggagcaacaaacttctcactactcaaacaagcaggtgacgtggaggagaatcccgggcctactagtaccatggactggatttggcgcatccttttccttgtcggcgctgctaccggcgcccattccgggccccaggtgcagctggttgaatctggcggaggactggttcagcctggcggatctctgagactgtcttgtgccgccagcggcaacatcaacagcagaaactgcatgggctggttcagacaggcccctggcaagggaagagaaggcgtggcagctatcggccaagtgaccggcagaacctactacgtggacagcgtgaagggcagattcaccatcagcctggacaacagcaagaacaccctgtacctccagatgaacagcctgagagccgaggacaccgccgtgtactattgtgctgctgcccctggctgtctgctgtctgcacttagaagcgccgactacagaaactggggccagggcacactggtcaccgtttcttctggatccggcggcggaggatctggcggaggcggatctgggggcggaggctctttcgaagaagttcagctggttgaaagtggtggcggcctggttcaacctggcggatctctgagactgagctgtgccgccagcggcttcaatgtgtacgcctctggaatgcactgggtccgacaggcccctggcaaaggacttgagtgggtcgccaaaatctaccccgacagcgactacacctattacgccgacagcgtgaagggcagattcaccatcagcgccgacaccagcaagaacaccgcctacctccagatgaactccctgagagccgaggacaccgccgtgtactactgtagcagagacagcagcttctactacgtgtacgctatggactactggggccagggcacactggtcacagtctcttctacgcgtatccagaaccctgatcctgccgtgtaccagctgcgggatagcaagagcagcgacaagagcgtgtgtctgttcaccgacttcgacagccagaccaacgtgtcccagagcaaggactccgacgtgtacatcaccgataagtgcgtgctggacatgcggagcatggacttcaagagcaactccgccgtggcctggtccaacaagtccgatttcgcctgcgccaacgccttcaacaacagcattatccccgaggacacattcttcccaagccccgagagcagctgcgacgtgaagctggtggaaaagagcttcgagacagacaccaacctgaacttccagaacctgagcgtgatcggcttcagaatcctgctgctgaaagtggccggctttaacctgctgatgaccctgcggctgtggtccagc

SEQ ID NO: 39511 - DNA, 2727 bp, synthetic construct
  source 1..2727: mol_type = other DNA
atggccttaccagtgaccgccttgctcctgccgctggccttgctgctccacgccgccaggccgcaggttcagctgcaagagtctggccctggcctggtcaagcctagccaaacactgagcctgacctgtaccgtgtctggcggctctatcaccaccggcgagttctactggaactggttcagacagcctcctggcaaaggactggaatggatgggagccattgccgccagcggcagcacaacatacagccctagcttcgagagccggaccagcatcagcagagacaccagcaagaatcagttcagcctgaagctgagcagcgtgacagccgccgatacagccgtgtattactgcggcagatcctttggagtggccgccgtgacaaccggccagaatagaggacagggcaccctggtcacagtgtctagcggtaccggcggaggcggatctggcggcggaggtagcggtggcggaggatctgaattcgacatccagatgacacagagccctagcagcctgtctgccagcgtgggagacagagtgaccatcacctgtagagccagccaggacgtgaacacagccgtggcttggtatcagcagaagcctggcaaggcccctaagctgctgatctacagcgcctacttcctgtacagcggcgtgcccagcagattcagcggaagcagaagcggcaccgacttcaccctgacaatatccagcctccagcctgaggacttcgccacctactactgccagcagtacagcagatacagccccgtgacctttggacagggcaccaaggtggaaatcaagagactcgaggacctgaagaacgtgttcccacctgaggtggccgtgttcgagcctagcgaggccgagatcagccacacccagaaagccaccctcgtgtgcctggctaccggcttctaccccgaccatgtggaactgtcttggtgggtcaacggcaaagaggtgcacagcggcgtgtgtaccgacccccagccactgaaagaacagcccgccctgaacgacagccggtactgcctgagcagcagactgagagtgtccgccaccttctggcagaacccccggaaccacttcagatgccaggtgcagttctacggcctgagcgagaacgacgagtggacccaggacagagccaagcccgtgacccagatcgtgtctgccgaagcctggggcagagccgattgcggctttaccagcgagagctaccagcagggcgtgctgagcgccaccatcctgtacgagatcctgctgggcaaggccaccctgtacgccgtgctggtgtctgccctggtgctgatggctatggtcaagcggaaggacagccggggaagggccaagcgatctggatctggagcaacaaacttctcactactcaaacaagcaggtgacgtggaggagaatcccgggcctactagtaccatggactggatttggcgcatccttttccttgtcggcgctgctaccggcgcccattccgggccccaggtgcagctggttgaatctggcggaggactggttcagcctggcggatctctgagactgtcttgtgccgccagcggcaacatcaacagcagaaactgcatgggctggttcagacaggcccctggcaagggaagagaaggcgtggcagctatcggccaagtgaccggcagaacctactacgtggacagcgtgaagggcagattcaccatcagcctggacaacagcaagaacaccctgtacctccagatgaacagcctgagagccgaggacaccgccgtgtactattgtgctgctgcccctggctgtctgctgtctgcacttagaagcgccgactacagaaactggggccagggcacactggtcaccgtttcttctggatccggcggcggaggatctggcggaggcggatctgggggcggaggctctttcgaagaagttcagctggttgaaagtggtggcggcctggttcaacctggcggatctctgagactgagctgtgccgccagcggcttcaatgtgtacgcctctggaatgcactgggtccgacaggcccctggcaaaggacttgagtgggtcgccaaaatctaccccgacagcgactacacctattacgccgacagcgtgaagggcagattcaccatcagcgccgacaccagcaagaacaccgcctacctccagatgaactccctgagagccgaggacaccgccgtgtactactgtagcagagacagcagcttctactacgtgtacgctatggactactggggccagggcacactggtcacagtctcttctacgcgtatccagaaccctgatcctgccgtgtaccagctgcgggatagcaagagcagcgacaagagcgtgtgtctgttcaccgacttcgacagccagaccaacgtgtcccagagcaaggactccgacgtgtacatcaccgataagtgcgtgctggacatgcggagcatggacttcaagagcaactccgccgtggcctggtccaacaagtccgatttcgcctgcgccaacgccttcaacaacagcattatccccgaggacacattcttcccaagccccgagagcagctgcgacgtgaagctggtggaaaagagcttcgagacagacaccaacctgaacttccagaacctgagcgtgatcggcttcagaatcctgctgctgaaagtggccggctttaacctgctgatgaccctgcggctgtggtccagc

SEQ ID NO: 39512 - DNA, 1449 bp, synthetic construct
  source 1..1449: mol_type = other DNA
atggccttaccagtgaccgccttgctcctgccgctggccttgctgctccacgccgccaggccggacatccagatgacacagagccctagcagcctgtctgccagcgtgggagacagagtgaccatcacctgtagagccagccaggatgtgtctacagccgtggcctggtatcagcagaagcctggaaaggcccctaagctgctgatctacagcgccagctttctgtactccggcgtgcccagcagattcagcggaagcagaagcggcaccgacttcaccctgacaatatccagcctccagcctgaggacttcgccacctactactgccagcagtacctgtaccagccttggacattcggccagggcaccaaggtggaaatcaagagaggcggaggcggaagtggaggcggaggatctggcggcggaggctctgaagttcagctggttgagtctggcggaggactggttcaacctggcggaagcctgagactgtcttgtgccgccagcggcttcaacatcgactactacggaatgcactgggtccgacaggcccctggcaaaggacttgaatgggtcgcctctctgtacggcggcagcgatagcacagattacgccgactctgtgaagggcagattcaccatcagcgccgacaccagcaagaacaccgcctacctccagatgaactccctgagagccgaagataccgccgtgtactactgctccagacagtacagcgcctacttcgactattggggccagggaaccctggtcaccgttagctctacgcgtaaaattgaagttatgtatcctcctccttacctagacaatgagaagagcaatggaaccattatccatgtgaaagggaaacacctttgtccaagtcccctatttcccggaccttctaagcccttttgggtgctggtggtggttgggggagtcctggcttgctatagcttgctagtaacagtggcctttattattttctgggtgaggagtaagaggagcaggctcctgcacagtgactacatgaacatgactccacgccgccccggacccacccgcaagcattaccagccctatgccccaccacgcgacttcgcagcctatcgctccagagtgaagttcagcaggagcgcagacgcccccgcgtaccagcagggccagaaccagctctataacgagctcaatctaggacgaagagaggagtacgatgttttggacaagagacgtggccgggaccctgagatggggggaaagccgagaaggaagaaccctcaggaaggcctgtacaatgaactgcagaaagataagatggcggaggcctacagtgagattgggatgaaaggcgagcgccggaggggcaaggggcacgatggcctttaccagggtctcagtacagccaccaaggacacctacgacgcccttcacatgcaggccctgccccctcgc

SEQ ID NO: 39513 - DNA, 1467 bp, synthetic construct
  source 1..1467: mol_type = other DNA
atggccttaccagtgaccgccttgctcctgccgctggccttgctgctccacgccgccaggccggacatccagatgacacagagccctagcagcctgtctgccagcgtgggagacagagtgaccatcacctgtagagccagccaggatgtgtctacagccgtggcctggtatcagcagaagcctggaaaggcccctaagctgctgatctacagcgccagctttctgtactccggcgtgcccagcagattcagcggaagcagaagcggcaccgacttcaccctgacaatatccagcctccagcctgaggacttcgccacctactactgccagcagtacctgtaccagccttggacattcggccagggcaccaaggtggaaatcaagagaggcggaggcggaagtggaggcggaggatctggcggcggaggctctgaagttcagctggttgagtctggcggaggactggttcaacctggcggaagcctgagactgtcttgtgccgccagcggcttcaacatcgactactacggaatgcactgggtccgacaggcccctggcaaaggacttgaatgggtcgcctctctgtacggcggcagcgatagcacagattacgccgactctgtgaagggcagattcaccatcagcgccgacaccagcaagaacaccgcctacctccagatgaactccctgagagccgaagataccgccgtgtactactgctccagacagtacagcgcctacttcgactattggggccagggaaccctggtcaccgttagctctacgcgtgcgaagcccaccacgacgccagcgccgcgaccaccaacaccggcgcccaccatcgcgtcgcagcccctgtccctgcgcccagaggcgtgccggccagcggcggggggcgcagtgcacacgagggggctggacttcgcctgtgacatctacatctgggcgcccttggccgggacttgtggggtccttctcctgtcactggttatcaccctttactgcaaacggggcagaaagaaactcctgtatatattcaaacaaccatttatgagaccagtacaaactactcaagaggaagatggctgtagctgccgatttccagaagaagaagaaggaggatgtgaactgagagtgaagttcagcaggagcgcagacgcccccgcgtaccagcagggccagaaccagctctataacgagctgaatctaggacgaagagaggagtacgatgttttggacaagagacgtggccgggaccctgagatggggggaaagccgagaaggaagaaccctcaggaaggcctgtacaatgaactgcagaaagataagatggcggaggcctacagtgagattgggatgaaaggcgagcgccggaggggcaaggggcacgatggcctttaccagggtctcagtacagccaccaaggacacctacgacgcccttcacatgcaggccctgccccctcgc

SEQ ID NO: 39514 - DNA, 1467 bp, synthetic construct
  source 1..1467: mol_type = other DNA
atggccttaccagtgaccgccttgctcctgccgctggccttgctgctccacgccgccaggccggaagttcagctggttgagtctggcggaggactggttcaacctggcggaagcctgagactgtcttgtgccgccagcggcttcaacatcgactactacggaatgcactgggtccgacaggcccctggcaaaggacttgaatgggtcgcctctctgtacggcggcagcgatagcacagattacgccgactctgtgaagggcagattcaccatcagcgccgacaccagcaagaacaccgcctacctccagatgaactccctgagagccgaagataccgccgtgtactactgctccagacagtacagcgcctacttcgactattggggccagggaaccctggtcaccgttagctctggcggaggcggaagtggaggcggaggatctggcggcggaggctctgacatccagatgacacagagccctagcagcctgtctgccagcgtgggagacagagtgaccatcacctgtagagccagccaggatgtgtctacagccgtggcctggtatcagcagaagcctggaaaggcccctaagctgctgatctacagcgccagctttctgtactccggcgtgcccagcagattcagcggaagcagaagcggcaccgacttcaccctgacaatatccagcctccagcctgaggacttcgccacctactactgccagcagtacctgtaccagccttggacattcggccagggcaccaaggtggaaatcaagagaacgcgtgcgaagcccaccacgacgccagcgccgcgaccaccaacaccggcgcccaccatcgcgtcgcagcccctgtccctgcgcccagaggcgtgccggccagcggcggggggcgcagtgcacacgagggggctggacttcgcctgtgacatctacatctgggcgcccttggccgggacttgtggggtccttctcctgtcactggttatcaccctttactgcaaacggggcagaaagaaactcctgtatatattcaaacaaccatttatgagaccagtacaaactactcaagaggaagatggctgtagctgccgatttccagaagaagaagaaggaggatgtgaactgagagtgaagttcagcaggagcgcagacgcccccgcgtaccagcagggccagaaccagctctataacgagctgaatctaggacgaagagaggagtacgatgttttggacaagagacgtggccgggaccctgagatggggggaaagccgagaaggaagaaccctcaggaaggcctgtacaatgaactgcagaaagataagatggcggaggcctacagtgagattgggatgaaaggcgagcgccggaggggcaaggggcacgatggcctttaccagggtctcagtacagccaccaaggacacctacgacgcccttcacatgcaggccctgccccctcgc

SEQ ID NO: 39515 - DNA, 1866 bp, synthetic construct
  source 1..1866: mol_type = other DNA
atggccttaccagtgaccgccttgctcctgccgctggccttgctgctccacgccgccaggccggacatccagatgacacagagccctagcagcctgtctgccagcgtgggagacagagtgaccatcacctgtagagccagccaggatgtgtctacagccgtggcctggtatcagcagaagcctggaaaggcccctaagctgctgatctacagcgccagctttctgtactccggcgtgcccagcagattcagcggaagcagaagcggcaccgacttcaccctgacaatatccagcctccagcctgaggacttcgccacctactactgccagcagtacctgtaccagccttggacattcggccagggcaccaaggtggaaatcaagagactcgagatccagaaccctgatcctgccgtgtaccagctgcgggatagcaagagcagcgacaagagcgtgtgtctgttcaccgacttcgacagccagaccaacgtgtcccagagcaaggactccgacgtgtacatcaccgataagtgcgtgctggacatgcggagcatggacttcaagagcaactccgccgtggcctggtccaacaagtccgatttcgcctgcgccaacgccttcaacaacagcattatccccgaggacacattcttcccaagcagcgacgtgccctgcgacgtgaagctggtggaaaagagcttcgagacagacaccaacctgaacttccagaacctgagcgtgatcggcttcagaatcctgctgctgaaagtggccggctttaacctgctgatgaccctgcggctgtggtccagccgcgccaagagaagcggatctggcgtgaagcagaccctgaatttcgacctgctgaagctggctggcgacgtggaatccaacccaggccctactagtatggactggatttggcgcatccttttccttgtcggcgctgctaccggcgcgcattccttcgaagaagttcagctggttgagtctggcggaggactggttcaacctggcggaagcctgagactgtcttgtgccgccagcggcttcaacatcgactactacggaatgcactgggtccgacaggcccctggcaaaggacttgaatgggtcgcctctctgtacggcggcagcgatagcacagattacgccgactctgtgaagggcagattcaccatcagcgccgacaccagcaagaacaccgcctacctccagatgaactccctgagagccgaagataccgccgtgtactactgctccagacagtacagcgcctacttcgactattggggccagggaaccctggtcaccgttagctctacgcgtgaggacctgaagaacgtgttcccacctgaggtggccgtgttcgagcctagcaaggccgagatcgcccacacccagaaagccaccctcgtgtgcctggctaccggcttctaccccgaccatgtggaactgtcttggtgggtcaacggcaaagaggtgcacagcggcgtgtgtaccgacccccagccactgaaagaacagcccgccctgaacgacagccggtactgcctgagcagcagactgagagtgtccgccaccttctggcagaacccccggaaccacttcagatgccaggtgcagttctacggcctgagcgagaacgacgagtggacccaggacagagccaagcccgtgacccagatcgtgtctgccgaagcctggggcagagccgattgcggcatcaccagcgccagctaccaccagggcgtgctgagcgccaccatcctgtacgagatcctgctgggcaaggccaccctgtacgccgtgctggtgtctgccctggtgctgatggctatggtcaagcggaaggacagccgggga

SEQ ID NO: 39516 - DNA, 1854 bp, synthetic construct
  source 1..1854: mol_type = other DNA
atggccttaccagtgaccgccttgctcctgccgctggccttgctgctccacgccgccaggccggacatccagatgacacagagccctagcagcctgtctgccagcgtgggagacagagtgaccatcacctgtagagccagccaggatgtgtctacagccgtggcctggtatcagcagaagcctggaaaggcccctaagctgctgatctacagcgccagctttctgtactccggcgtgcccagcagattcagcggaagcagaagcggcaccgacttcaccctgacaatatccagcctccagcctgaggacttcgccacctactactgccagcagtacctgtaccagccttggacattcggccagggcaccaaggtggaaatcaagagactcgaggacctgaagaacgtgttcccacctgaggtggccgtgttcgagcctagcaaggccgagatcgcccacacccagaaagccaccctcgtgtgcctggctaccggcttctaccccgaccatgtggaactgtcttggtgggtcaacggcaaagaggtgcacagcggcgtgtgtaccgacccccagccactgaaagaacagcccgccctgaacgacagccggtactgcctgagcagcagactgagagtgtccgccaccttctggcagaacccccggaaccacttcagatgccaggtgcagttctacggcctgagcgagaacgacgagtggacccaggacagagccaagcccgtgacccagatcgtgtctgccgaagcctggggcagagccgattgcggcatcaccagcgccagctaccaccagggcgtgctgagcgccaccatcctgtacgagatcctgctgggcaaggccaccctgtacgccgtgctggtgtctgccctggtgctgatggctatggtcaagcggaaggacagccggggaagggccaagcgatctggatctggagcaacaaacttctcactactcaaacaagcaggtgacgtggaggagaatcccgggcctactagtatggactggatttggcgcatccttttccttgtcggcgctgctaccggcgcgcattccttcgaagaagttcagctggttgagtctggcggaggactggttcaacctggcggaagcctgagactgtcttgtgccgccagcggcttcaacatcgactactacggaatgcactgggtccgacaggcccctggcaaaggacttgaatgggtcgcctctctgtacggcggcagcgatagcacagattacgccgactctgtgaagggcagattcaccatcagcgccgacaccagcaagaacaccgcctacctccagatgaactccctgagagccgaagataccgccgtgtactactgctccagacagtacagcgcctacttcgactattggggccagggaaccctggtcaccgttagctctacgcgtatccagaaccctgatcctgccgtgtaccagctgcgggatagcaagagcagcgacaagagcgtgtgtctgttcaccgacttcgacagccagaccaacgtgtcccagagcaaggactccgacgtgtacatcaccgataagtgcgtgctggacatgcggagcatggacttcaagagcaactccgccgtggcctggtccaacaagtccgatttcgcctgcgccaacgccttcaacaacagcattatccccgaggacacattcttcccaagcagcgacgtgccctgcgacgtgaagctggtggaaaagagcttcgagacagacaccaacctgaacttccagaacctgagcgtgatcggcttcagaatcctgctgctgaaagtggccggctttaacctgctgatgaccctgcggctgtggtccagc

SEQ ID NO: 39517 - DNA, 1854 bp, synthetic construct; identical to SEQ ID NO: 3822
  source 1..1854: mol_type = other DNA

SEQ ID NO: 39518 - DNA, 1866 bp, synthetic construct; identical to SEQ ID NO: 3824
  source 1..1866: mol_type = other DNA

SEQ ID NO: 39519 - DNA, 1902 bp, synthetic construct
  source 1..1902: mol_type = other DNA
atggccttaccagtgaccgccttgctcctgccgctggccttgctgctccacgccgccaggccgctcgaggaggacctgaagaacgtgttcccacctgaggtggccgtgttcgagcctagcaaggccgagatcgcccacacccagaaagccaccctcgtgtgcctggctaccggcttctaccccgaccatgtggaactgtcttggtgggtcaacggcaaagaggtgcacagcggcgtgtgtaccgacccccagccactgaaagaacagcccgccctgaacgacagccggtactgcctgagcagcagactgagagtgtccgccaccttctggcagaacccccggaaccacttcagatgccaggtgcagttctacggcctgagcgagaacgacgagtggacccaggacagagccaagcccgtgacccagatcgtgtctgccgaagcctggggcagagccgattgcggcatcaccagcgccagctaccaccagggcgtgctgagcgccaccatcctgtacgagatcctgctgggcaaggccaccctgtacgccgtgctggtgtctgccctggtgctgatggctatggtcaagcggaaggacagccggggaagggccaagcgatctggatctggagcaacaaacttctcactactcaaacaagcaggtgacgtggaggagaatcccgggcctactagcatggccttaccagtgaccgccttgctcctgccgctggccttgctgctccacgccgccaggccggacatccagatgacacagagccctagcagcctgtctgccagcgtgggagacagagtgaccatcacctgtagagccagccaggatgtgtctacagccgtggcctggtatcagcagaagcctggaaaggcccctaagctgctgatctacagcgccagctttctgtactccggcgtgcccagcagattcagcggaagcagaagcggcaccgacttcaccctgacaatatccagcctccagcctgaggacttcgccacctactactgccagcagtacctgtaccagccttggacattcggccagggcaccaaggtggaaatcaagagaggcggaggcggaagtggaggcggaggatctggcggcggaggctctgaagttcagctggttgagtctggcggaggactggttcaacctggcggaagcctgagactgtcttgtgccgccagcggcttcaacatcgactactacggaatgcactgggtccgacaggcccctggcaaaggacttgaatgggtcgcctctctgtacggcggcagcgatagcacagattacgccgactctgtgaagggcagattcaccatcagcgccgacaccagcaagaacaccgcctacctccagatgaactccctgagagccgaagataccgccgtgtactactgctccagacagtacagcgcctacttcgactattggggccagggaaccctggtcaccgttagctctacgcgtatccagaaccctgatcctgccgtgtaccagctgcgggatagcaagagcagcgacaagagcgtgtgtctgttcaccgacttcgacagccagaccaacgtgtcccagagcaaggactccgacgtgtacatcaccgataagtgcgtgctggacatgcggagcatggacttcaagagcaactccgccgtggcctggtccaacaagtccgatttcgcctgcgccaacgccttcaacaacagcattatccccgaggacacattcttcccaagcagcgacgtgccctgcgacgtgaagctggtggaaaagagcttcgagacagacaccaacctgaacttccagaacctgagcgtgatcggcttcagaatcctgctgctgaaagtggccggctttaacctgctgatgaccctgcggctgtggtccagc

SEQ ID NO: 39520 - DNA, 1923 bp, synthetic construct
  source 1..1923: mol_type = other DNA
atggccttaccagtgaccgccttgctcctgccgctggccttgctgctccacgccgccaggccgctcgagggctccggcgatcgccctgatcctgccgtgtaccagctgcgggatagcaagagcagcgacaagagcgtgtgtctgttcaccgacttcgacagccagaccaacgtgtcccagagcaaggactccgacgtgtacatcaccgataagtgcgtgctggacatgcggagcatggacttcaagagcaactccgccgtggcctggtccaacaagtccgatttcgcctgcgccaacgccttcaacaacagcattatccccgaggacacattcttcccaagccccgagagcagctgcgacgtgaagctggtggaaaagagcttcgagacagacaccaacctgaacttccagaacctgagcgtgatcggcttcagaatcctgctgctgaaagtggccggctttaacctgctgatgaccctgcggctgtggtccagctctagtcgcgccaagagaagcggatctggcgtgaagcagaccctgaatttcgacctgctgaagctggctggcgacgtggaatccaacccaggccccactagcatggccttaccagtgaccgccttgctcctgccgctggccttgctgctccacgccgccaggccggacatccagatgacacagagccctagcagcctgtctgccagcgtgggagacagagtgaccatcacctgtagagccagccaggatgtgtctacagccgtggcctggtatcagcagaagcctggaaaggcccctaagctgctgatctacagcgccagctttctgtactccggcgtgcccagcagattcagcggaagcagaagcggcaccgacttcaccctgacaatatccagcctccagcctgaggacttcgccacctactactgccagcagtacctgtaccagccttggacattcggccagggcaccaaggtggaaatcaagagaggcggaggcggaagtggaggcggaggatctggcggcggaggctctgaagttcagctggttgagtctggcggaggactggttcaacctggcggaagcctgagactgtcttgtgccgccagcggcttcaacatcgactactacggaatgcactgggtccgacaggcccctggcaaaggacttgaatgggtcgcctctctgtacggcggcagcgatagcacagattacgccgactctgtgaagggcagattcaccatcagcgccgacaccagcaagaacaccgcctacctccagatgaactccctgagagccgaagataccgccgtgtactactgctccagacagtacagcgcctacttcgactattggggccagggaaccctggtcaccgttagctctacgcgtgaggacctgaagaacgtgttcccacctgaggtggccgtgttcgagcctagcgaggccgagatcagccacacccagaaagccaccctcgtgtgcctggctaccggcttctaccccgaccatgtggaactgtcttggtgggtcaacggcaaagaggtgcacagcggcgtgtgtaccgacccccagccactgaaagaacagcccgccctgaacgacagccggtactgcctgagcagcagactgagagtgtccgccaccttctggcagaacccccggaaccacttcagatgccaggtgcagttctacggcctgagcgagaacgacgagtggacccaggacagagccaagcccgtgacccagatcgtgtctgccgaagcctggggcagagccgattgcggctttaccagcgagagctaccagcagggcgtgctgagcgccaccatcctgtacgagatcctgctgggcaaggccaccctgtacgccgtgctggtgtctgccctggtgctgatggctatggtcaagcggaaggacagccgggga

SEQ ID NO: 39521 - DNA, 1854 bp, synthetic construct
  source 1..1854: mol_type = other DNA
atggccttaccagtgaccgccttgctcctgccgctggccttgctgctccacgccgccaggccggacatccagatgacacagagccctagcagcctgtctgccagcgtgggagacagagtgaccatcacctgtagagccagccaggatgtgtctacagccgtggcctggtatcagcagaagcctggaaaggcccctaagctgctgatctacagcgccagctttctgtactccggcgtgcccagcagattcagcggaagcagaagcggcaccgacttcaccctgacaatatccagcctccagcctgaggacttcgccacctactactgccagcagtacctgtaccagccttggacattcggccagggcaccaaggtggaaatcaagagactcgaggacctgaagaacgtgttcccacctgaggtggccgtgttcgagcctagcgaggccgagatcagccacacccagaaagccaccctcgtgtgcctggctaccggcttctaccccgaccatgtggaactgtcttggtgggtcaacggcaaagaggtgcacagcggcgtgtctaccgacccccagccactgaaagaacagcccgccctgaacgacagccggtactgcctgagcagcagactgagagtgtccgccaccttctggcagaacccccggaaccacttcagatgccaggtgcagttctacggcctgagcgagaacgacgagtggacccaggacagagccaagcccgtgacccagatcgtgtctgccgaagcctggggcagagccgattgcggctttaccagcgagagctaccagcagggcgtgctgagcgccaccatcctgtacgagatcctgctgggcaaggccaccctgtacgccgtgctggtgtctgccctggtgctgatggctatggtcaagcggaaggacagccggggaagggccaagcgatctggatctggagcaacaaacttctcactactcaaacaagcaggtgacgtggaggagaatcccgggcctactagtatggactggatttggcgcatccttttccttgtcggcgctgctaccggcgcgcattccttcgaagaagttcagctggttgagtctggcggaggactggttcaacctggcggaagcctgagactgtcttgtgccgccagcggcttcaacatcgactactacggaatgcactgggtccgacaggcccctggcaaaggacttgaatgggtcgcctctctgtacggcggcagcgatagcacagattacgccgactctgtgaagggcagattcaccatcagcgccgacaccagcaagaacaccgcctacctccagatgaactccctgagagccgaagataccgccgtgtactactgctccagacagtacagcgcctacttcgactattggggccagggaaccctggtcaccgttagctctacgcgtatccagaaccctgatcctgccgtgtaccagctgcgggatagcaagagcagcgacaagagcgtgtgtctgttcaccgacttcgacagccagaccaacgtgtcccagagcaaggactccgacgtgtacatcaccgataagaccgtgctggacatgcggagcatggacttcaagagcaactccgccgtggcctggtccaacaagtccgatttcgcctgcgccaacgccttcaacaacagcattatccccgaggacacattcttcccaagccccgagagcagctgcgacgtgaagctggtggaaaagagcttcgagacagacaccaacctgaacttccagaacctgagcgtgatcggcttcagaatcctgctgctgaaagtggccggctttaacctgctgatgaccctgcggctgtggtccagc

SEQ ID NO: 39522 - DNA, 1878 bp, synthetic construct
  source 1..1878: mol_type = other DNA
atggccttaccagtgaccgccttgctcctgccgctggccttgctgctccacgccgccaggccggacatccagatgacacagagccctagcagcctgtctgccagcgtgggagacagagtgaccatcacctgtagagccagccaggatgtgtctacagccgtggcctggtatcagcagaagcctggaaaggcccctaagctgctgatctacagcgccagctttctgtactccggcgtgcccagcagattcagcggaagcagaagcggcaccgacttcaccctgacaatatccagcctccagcctgaggacttcgccacctactactgccagcagtacctgtaccagccttggacattcggccagggcaccaaggtggaaatcaagagactcgaggacaagcagctggacgccgacgtgtcccccaagcctaccatcttcctgccctctatcgccgagacaaagctccagaaggccggcacctacctgtgcctgctggaaaagttcttcccagatgtgattaagatccactggcaggaaaagaagtccaacaccatcctgggcagccaggaaggcaacaccatgaagaccaacgacacctacatgaagttcagctggctgaccgtgcccgagaagtccctggacaaagaacacagatgcatcgtgcggcacgaaaacaacaagaacggcgtggaccaggaaatcatcttcccacccatcaagaccgatgtgattacaatggaccccaaggacaactgctccaaggacgccaacgataccctgctgctccagctgaccaacaccagcgcctactacatgtacttgttgctgctgctgaagtccgtggtgtacttcgccatcatcacatgctgcctgctgcggagaaccgccttctgctgcaacggcgagaagtctagggccaagcgatctggatctggagcaacaaacttctcactactcaaacaagcaggtgacgtggaggagaatcccgggcctactagtatggactggatttggcgcatccttttccttgtcggcgctgctaccggcgcgcattccttcgaagaagttcagctggttgagtctggcggaggactggttcaacctggcggaagcctgagactgtcttgtgccgccagcggcttcaacatcgactactacggaatgcactgggtccgacaggcccctggcaaaggacttgaatgggtcgcctctctgtacggcggcagcgatagcacagattacgccgactctgtgaagggcagattcaccatcagcgccgacaccagcaagaacaccgcctacctccagatgaactccctgagagccgaagataccgccgtgtactactgctccagacagtacagcgcctacttcgactattggggccagggaaccctggtcaccgttagctctacgcgtagccagcctcacaccaagcccagcgtgttcgtgatgaagaacggcaccaacgtggcctgcctcgtgaaagagttctaccccaaggacatcaggatcaacctggtgtccagcaagaagatcaccgagttcgaccccgccatcgtgatctcccccagcggcaagtacaacgccgtgaagctggggaagtacgaggacagcaacagcgtgacctgctccgtgcagcacgacaacaagaccgtgcacagcaccgactttgaagtgaaaaccgactccaccgaccacgtgaagcccaaagagacagagaacaccaagcagcccagcaagagctgccacaagcccaaggccatcgtgcacaccgagaaagtgaacatgatgagcctgaccgtgctgggcctgcggatgctgttcgccaaaaccgtggccgtgaacttcctgctgaccgccaagctgttcttcctc

SEQ ID NO: 39523 - DNA, 1878 bp, synthetic construct; identical to SEQ ID NO: 3832
  source 1..1878: mol_type = other DNA

SEQ ID NO: 39524 - DNA, 1923 bp, synthetic construct
  source 1..1923: mol_type = other DNA
atggccttaccagtgaccgccttgctcctgccgctggccttgctgctccacgccgccaggccgctcgaggacaagcagctggacgccgacgtgtcccccaagcctaccatcttcctgccctctatcgccgagacaaagctccagaaggccggcacctacctgtgcctgctggaaaagttcttcccagatgtgattaagatccactggcaggaaaagaagtccaacaccatcctgggcagccaggaaggcaacaccatgaagaccaacgacacctacatgaagttcagctggctgaccgtgcccgagaagtccctggacaaagaacacagatgcatcgtgcggcacgaaaacaacaagaacggcgtggaccaggaaatcatcttcccacccatcaagaccgatgtgattacaatggaccccaaggacaactgctccaaggacgccaacgataccctgctgctccagctgaccaacaccagcgcctactacatgtacttgttgctgctgctgaagtccgtggtgtacttcgccatcatcacatgctgcctgctgcggagaaccgccttctgctgcaacggcgagaagtctagggccaagcgatctggatctggagcaacaaacttctcactactcaaacaagcaggtgacgtggaggagaatcccgggcctactagcatggccttaccagtgaccgccttgctcctgccgctggccttgctgctccacgccgccaggccggacatccagatgacacagagccctagcagcctgtctgccagcgtgggagacagagtgaccatcacctgtagagccagccaggatgtgtctacagccgtggcctggtatcagcagaagcctggaaaggcccctaagctgctgatctacagcgccagctttctgtactccggcgtgcccagcagattcagcggaagcagaagcggcaccgacttcaccctgacaatatccagcctccagcctgaggacttcgccacctactactgccagcagtacctgtaccagccttggacattcggccagggcaccaaggtggaaatcaagagaggcggaggcggaagtggaggcggaggatctggcggcggaggctctgaagttcagctggttgagtctggcggaggactggttcaacctggcggaagcctgagactgtcttgtgccgccagcggcttcaacatcgactactacggaatgcactgggtccgacaggcccctggcaaaggacttgaatgggtcgcctctctgtacggcggcagcgatagcacagattacgccgactctgtgaagggcagattcaccatcagcgccgacaccagcaagaacaccgcctacctccagatgaactccctgagagccgaagataccgccgtgtactactgctccagacagtacagcgcctacttcgactattggggccagggaaccctggtcaccgttagctctacgcgtagccagcctcacaccaagcccagcgtgttcgtgatgaagaacggcaccaacgtggcctgcctcgtgaaagagttctaccccaaggacatcaggatcaacctggtgtccagcaagaagatcaccgagttcgaccccgccatcgtgatctcccccagcggcaagtacaacgccgtgaagctggggaagtacgaggacagcaacagcgtgacctgctccgtgcagcacgacaacaagaccgtgcacagcaccgactttgaagtgaaaaccgactccaccgaccacgtgaagcccaaagagacagagaacaccaagcagcccagcaagagctgccacaagcccaaggccatcgtgcacaccgagaaagtgaacatgatgagcctgaccgtgctgggcctgcggatgctgttcgccaaaaccgtggccgtgaacttcctgctgaccgccaagctgttcttcctc

SEQ ID NO: 39525 - DNA, 2385 bp, synthetic construct
  source 1..2385: mol_type = other DNA
atggccttaccagtgaccgccttgctcctgccgctggccttgctgctccacgccgccaggccggacatccagatgacacagagccctagcagcctgtctgccagcgtgggagacagagtgaccatcacctgtagagccagccaggatgtgtctacagccgtggcctggtatcagcagaagcctggaaaggcccctaagctgctgatctacagcgccagctttctgtactccggcgtgcccagcagattcagcggaagcagaagcggcaccgacttcaccctgacaatatccagcctccagcctgaggacttcgccacctactactgccagcagtacctgtaccagccttggacattcggccagggcaccaaggtggaaatcaagagaggacagcctaaggccaatcctaccgtgacactgttccctccaagcagcgaagaactccaggccaacaaggccacacttgtgtgcctgatctccgacttctaccctggggctgtgacagtggcttggaaggccgatggatctcctgtgaaagccggcgtggaaaccaccaagccatccaagcagagcaacaacaaatacgccgccagctcctacctgagcctgacacctgagcagtggaagtcccacagatcctacagctgccaagtgacccacgaaggcagcaccgtggaaaagacagtggcccctacagagtgcagcggatcccagagcttcggcctgctggaccccaagctgtgctacctgctggatggcatcctgttcatctacggcgtgatcctgaccgccctgttcctgagagtgaagttcagcagaagcgccgacgcccctgcctaccagcagggacagaaccaactgtacaacgagctgaacctgggcagacgggaagagtacgacgtgctggacaagcggagaggcagggaccctgagatgggcggaaagccccagcggagaaagaacccccaggaaggactgtataacgaactccagaaagacaagatggccgaagcctacagcgagatcggcatgaagggcgagcggagaagaggcaagggccacgatggcctgtaccagggcctgagcaccgccaccaaggacacctatgacgccctgcacatgcaggccctgcctccaagaagggccaagcgatctggatctggagcaacaaacttctcactactcaaacaagcaggtgacgtggaggagaatcccgggcctactagtatggactggatttggcgcatccttttccttgtcggcgctgctaccggcgcgcattccttcgaagaagttcagctggttgagtctggcggaggactggttcaacctggcggaagcctgagactgtcttgtgccgccagcggcttcaacatcgactactacggaatgcactgggtccgacaggcccctggcaaaggacttgaatgggtcgcctctctgtacggcggcagcgatagcacagattacgccgactctgtgaagggcagattcaccatcagcgccgacaccagcaagaacaccgcctacctccagatgaactccctgagagccgaagataccgccgtgtactactgctccagacagtacagcgcctacttcgactattggggccagggaaccctggtcaccgttagctctgcctctacaaagggaccctccgtgtttcctctggctcccagcagcaagtctacaagcggaggaacagccgctctgggctgcctggtcaaggattactttcccgagcctgtgaccgtgtcctggaatagcggagcactgacaagcggcgtgcacacctttccagccgtgctgcaaagcagcggcctgtactctctgagcagcgtggtcacagtgcctagctctagcctgggcacccagacctacatctgcaatgtgaaccacaagcctagcaacaccaaggtggacaagagagtggaacccaagagctgtggtacccagagttttgggttgttggaccctaaattgtgctatctgttggacggaatcctgttcatttacggagtgatcctgaccgcattgttcctgcgggttaagttttccagatccgcagacgcacccgcttaccaacaagggcagaaccaactctacaatgaacttaatttggggcggagggaagagtacgacgttctggacaaaaggaggggacgagatcccgagatgggcggaaagcctcagcgaaggaagaatccgcaagaggggctttataacgaactccagaaagataaaatggcagaagcctatagtgagattgggatgaagggagaaaggaggaggggtaaaggtcacgatgggttgtaccaaggattgagcacagccactaaagatacctatgatgcgctccacatgcaggccctgccgccaaga

SEQ ID NO: 39526 - DNA, 2442 bp, synthetic construct; identical to SEQ ID NO: 3835
  source 1..2442: mol_type = other DNA

SEQ ID NO: 39527 - DNA, 2568 bp, synthetic construct
  source 1..2568: mol_type = other DNA
atggccttaccagtgaccgccttgctcctgccgctggccttgctgctccacgccgccaggccggacatccagatgacacagagccctagcagcctgtctgccagcgtgggagacagagtgaccatcacctgtagagccagccaggatgtgtctacagccgtggcctggtatcagcagaagcctggaaaggcccctaagctgctgatctacagcgccagctttctgtactccggcgtgcccagcagattcagcggaagcagaagcggcaccgacttcaccctgacaatatccagcctccagcctgaggacttcgccacctactactgccagcagtacctgtaccagccttggacattcggccagggcaccaaggtggaaatcaagagactcgaggaggacctgaagaacgtgttcccacctgaggtggccgtgttcgagcctagcgaggccgagatcagccacacccagaaagccaccctcgtgtgcctggctaccggcttctaccccgaccatgtggaactgtcttggtgggtcaacggcaaagaggtgcacagcggcgtgtctaccgacccccagccactgaaagaacagcccgccctgaacgacagccggtactgcctgagcagcagactgagagtgtccgccaccttctggcagaacccccggaaccacttcagatgccaggtgcagttctacggcctgagcgagaacgacgagtggacccaggacagagccaagcccgtgacccagatcgtgtctgccgaagcctggggcagagccgattgcggatcccagagcttcggcctgctggaccccaagctgtgctacctgctggatggcatcctgttcatctacggcgtgatcctgaccgccctgttcctgagagtgaagttcagcagaagcgccgacgcccctgcctaccagcagggacagaaccaactgtacaacgagctgaacctgggcagacgggaagagtacgacgtgctggacaagcggagaggcagggaccctgagatgggcggaaagccccagcggagaaagaacccccaggaaggactgtataacgaactccagaaagacaagatggccgaagcctacagcgagatcggcatgaagggcgagcggagaagaggcaagggccacgatggcctgtaccagggcctgagcaccgccaccaaggacacctatgacgccctgcacatgcaggccctgcctccaagaagggccaagcgatctggatctggagcaacaaacttctcactactcaaacaagcaggtgacgtggaggagaatcccgggcctactagtatggactggatttggcgcatccttttccttgtcggcgctgctaccggcgcgcattccttcgaagaagttcagctggttgagtctggcggaggactggttcaacctggcggaagcctgagactgtcttgtgccgccagcggcttcaacatcgactactacggaatgcactgggtccgacaggcccctggcaaaggacttgaatgggtcgcctctctgtacggcggcagcgatagcacagattacgccgactctgtgaagggcagattcaccatcagcgccgacaccagcaagaacaccgcctacctccagatgaactccctgagagccgaagataccgccgtgtactactgctccagacagtacagcgcctacttcgactattggggccagggaaccctggtcaccgttagctctacgcgtatccagaaccctgatcctgccgtgtaccagctgcgggatagcaagagcagcgacaagagcgtgtgtctgttcaccgacttcgacagccagaccaacgtgtcccagagcaaggactccgacgtgtacatcaccgataagaccgtgctggacatgcggagcatggacttcaagagcaactccgccgtggcctggtccaacaagtccgatttcgcctgcgccaacgccttcaacaacagcattatccccgaggacacattcttcccaagccccgagagcagctgcggtacccagagttttgggttgttggaccctaaattgtgctatctgttggacggaatcctgttcatttacggagtgatcctgaccgcattgttcctgaggagcaagcggtcacggctgctccacagcgattacatgaatatgacaccacgaagaccgggtcctactcgcaaacactaccaaccctacgcacctccccgcgactttgcagcgtaccgatctcgggttaagttttccagatccgcagacgcacccgcttaccaacaagggcagaaccaactctacaatgaacttaatttggggcggagggaagagtacgacgttctggacaaaaggaggggacgagatcccgagatgggcggaaagcctcagcgaaggaagaatccgcaagaggggctttataacgaactccagaaagataaaatggcagaagcctatagtgagattgggatgaagggagaaaggaggaggggtaaaggtcacgatgggttgtaccaaggattgagcacagccactaaagatacctatgatgcgctccacatgcaggccctgccgccaaga

SEQ ID NO: 39528 - DNA, 2697 bp, synthetic construct
  source 1..2697: mol_type = other DNA
atggccttaccagtgaccgccttgctcctgccgctggccttgctgctccacgccgccaggccggacatccagatgacacagagccctagcagcctgtctgccagcgtgggagacagagtgaccatcacctgtagagccagccaggatgtgtctacagccgtggcctggtatcagcagaagcctggaaaggcccctaagctgctgatctacagcgccagctttctgtactccggcgtgcccagcagattcagcggaagcagaagcggcaccgacttcaccctgacaatatccagcctccagcctgaggacttcgccacctactactgccagcagtacctgtaccagccttggacattcggccagggcaccaaggtggaaatcaagagactcgaggaggacctgaagaacgtgttcccacctgaggtggccgtgttcgagcctagcgaggccgagatcagccacacccagaaagccaccctcgtgtgcctggctaccggcttctaccccgaccatgtggaactgtcttggtgggtcaacggcaaagaggtgcacagcggcgtgtctaccgacccccagccactgaaagaacagcccgccctgaacgacagccggtactgcctgagcagcagactgagagtgtccgccaccttctggcagaacccccggaaccacttcagatgccaggtgcagttctacggcctgagcgagaacgacgagtggacccaggacagagccaagcccgtgacccagatcgtgtctgccgaagcctggggcagagccgattgcggatcccagagcttcggcctgctggaccccaagctgtgctacctgctggatggcatcctgttcatctacggcgtgatcctgaccgccctgttcctgaaacggggcagaaagaaactcctgtatatattcaaacaaccatttatgagaccagtacaaactactcaagaggaagatggctgtagctgccgatttccagaagaagaagaaggaggatgtgaactgagagtgaagttcagcagaagcgccgacgcccctgcctaccagcagggacagaaccaactgtacaacgagctgaacctgggcagacgggaagagtacgacgtgctggacaagcggagaggcagggaccctgagatgggcggaaagccccagcggagaaagaacccccaggaaggactgtataacgaactccagaaagacaagatggccgaagcctacagcgagatcggcatgaagggcgagcggagaagaggcaagggccacgatggcctgtaccagggcctgagcaccgccaccaaggacacctatgacgccctgcacatgcaggccctgcctccaagaagggccaagcgatctggatctggagcaacaaacttctcactactcaaacaagcaggtgacgtggaggagaatcccgggcctactagtatggactggatttggcgcatccttttccttgtcggcgctgctaccggcgcgcattccttcgaagaagttcagctggttgagtctggcggaggactggttcaacctggcggaagcctgagactgtcttgtgccgccagcggcttcaacatcgactactacggaatgcactgggtccgacaggcccctggcaaaggacttgaatgggtcgcctctctgtacggcggcagcgatagcacagattacgccgactctgtgaagggcagattcaccatcagcgccgacaccagcaagaacaccgcctacctccagatgaactccctgagagccgaagataccgccgtgtactactgctccagacagtacagcgcctacttcgactattggggccagggaaccctggtcaccgttagctctacgcgtatccagaaccctgatcctgccgtgtaccagctgcgggatagcaagagcagcgacaagagcgtgtgtctgttcaccgacttcgacagccagaccaacgtgtcccagagcaaggactccgacgtgtacatcaccgataagaccgtgctggacatgcggagcatggacttcaagagcaactccgccgtggcctggtccaacaagtccgatttcgcctgcgccaacgccttcaacaacagcattatccccgaggacacattcttcccaagccccgagagcagctgcggtacccagagttttgggttgttggaccctaaattgtgctatctgttggacggaatcctgttcatttacggagtgatcctgaccgcattgttcctgaagagaggccggaagaagctgctgtacatcttcaagcagcctttcatgcggcccgtgcagaccacccaggaagaggacggctgctcctgccggttccccgaggaagaagaaggcggctgcgagctgcgggttaagttttccagatccgcagacgcacccgcttaccaacaagggcagaaccaactctacaatgaacttaatttggggcggagggaagagtacgacgttctggacaaaaggaggggacgagatcccgagatgggcggaaagcctcagcgaaggaagaatccgcaagaggggctttataacgaactccagaaagataaaatggcagaagcctatagtgagattgggatgaagggagaaaggaggaggggtaaaggtcacgatgggttgtaccaaggattgagcacagccactaaagatacctatgatgcgctccacatgcaggccctgccgccaaga

SEQ ID NO: 39529 - DNA, 1758 bp, synthetic construct
  source 1..1758: mol_type = other DNA
atggccttaccagtgaccgccttgctcctgccgctggccttgctgctccacgccgccaggccggacatccagatgacacagagccctagcagcctgtctgccagcgtgggagacagagtgaccatcacctgtagagccagccaggatgtgtctacagccgtggcctggtatcagcagaagcctggaaaggcccctaagctgctgatctacagcgccagctttctgtactccggcgtgcccagcagattcagcggaagcagaagcggcaccgacttcaccctgacaatatccagcctccagcctgaggacttcgccacctactactgccagcagtacctgtaccagccttggacattcggccagggcaccaaggtggaaatcaagagactcgagcagagcttcggcctgctggaccccaagctgtgctacctgctggatggcatcctgttcatctacggcgtgatcctgaccgccctgttcctgagagtgaagttcagcagaagcgccgacgcccctgcctaccagcagggacagaaccaactgtacaacgagctgaacctgggcagacgggaagagtacgacgtgctggacaagcggagaggcagggaccctgagatgggcggaaagccccagcggagaaagaacccccaggaaggactgtataacgaactccagaaagacaagatggccgaagcctacagcgagatcggcatgaagggcgagcggagaagaggcaagggccacgatggcctgtaccagggcctgagcaccgccaccaaggacacctatgacgccctgcacatgcaggccctgcctccaagaagggccaagcgatctggatctggagcaacaaacttctcactactcaaacaagcaggtgacgtggaggagaatcccgggcctactagtatggactggatttggcgcatccttttccttgtcggcgctgctaccggcgcgcattccttcgaagaagttcagctggttgagtctggcggaggactggttcaacctggcggaagcctgagactgtcttgtgccgccagcggcttcaacatcgactactacggaatgcactgggtccgacaggcccctggcaaaggacttgaatgggtcgcctctctgtacggcggcagcgatagcacagattacgccgactctgtgaagggcagattcaccatcagcgccgacaccagcaagaacaccgcctacctccagatgaactccctgagagccgaagataccgccgtgtactactgctccagacagtacagcgcctacttcgactattggggccagggaaccctggtcaccgttagctctacgcgtcagagttttgggttgttggaccctaaattgtgctatctgttggacggaatcctgttcatttacggagtgatcctgaccgcattgttcctgcgggttaagttttccagatccgcagacgcacccgcttaccaacaagggcagaaccaactctacaatgaacttaatttggggcggagggaagagtacgacgttctggacaaaaggaggggacgagatcccgagatgggcggaaagcctcagcgaaggaagaatccgcaagaggggctttataacgaactccagaaagataaaatggcagaagcctatagtgagattgggatgaagggagaaaggaggaggggtaaaggtcacgatgggttgtaccaaggattgagcacagccactaaagatacctatgatgcgctccacatgcaggccctgccgccaaga

SEQ ID NO: 39530 - DNA, 1932 bp, synthetic construct; identical to SEQ ID NO: 3842
  source 1..1932: mol_type = other DNA

SEQ ID NO: 39531 - DNA, 1866 bp, synthetic construct; identical to SEQ ID NO: 3843
  source 1..1866: mol_type = other DNA

SEQ ID NO: 39532 - DNA, 1866 bp, synthetic construct; identical to SEQ ID NO: 3844
  source 1..1866: mol_type = other DNA

SEQ ID NO: 39533 - DNA, 1344 bp, synthetic construct; identical to SEQ ID NO: 3845
  source 1..1344: mol_type = other DNA

SEQ ID NO: 39534 - DNA, 1239 bp, synthetic construct; identical to SEQ ID NO: 3846
  source 1..1239: mol_type = other DNA

SEQ ID NO: 39535 - DNA, 1269 bp, synthetic construct; identical to SEQ ID NO: 3847
  source 1..1269: mol_type = other DNA

SEQ ID NO: 39536 - DNA, 1218 bp, synthetic construct; identical to SEQ ID NO: 3848
  source 1..1218: mol_type = other DNA

SEQ ID NO: 39537 - DNA, 1503 bp, synthetic construct; identical to SEQ ID NO: 3853
  source 1..1503: mol_type = other DNA

SEQ ID NO: 39538 - DNA, 1428 bp, synthetic construct
  source 1..1428: mol_type = other DNA
atggccttaccagtgaccgccttgctcctgccgctggccttgctgctccacgccgccaggccggacatccagatgacacagagccctagcagcctgtctgccagcgtgggagacagagtgaccatcacctgtagagccagccaggatgtgtctacagccgtggcctggtatcagcagaagcctggaaaggcccctaagctgctgatctacagcgccagctttctgtactccggcgtgcccagcagattcagcggaagcagaagcggcaccgacttcaccctgacaatatccagcctccagcctgaggacttcgccacctactactgccagcagtacctgtaccagccttggacattcggccagggcaccaaggtggaaatcaagagaggcggaggcggaagtggaggcggaggatctggcggcggaggctctgaagttcagctggttgagtctggcggaggactggttcaacctggcggaagcctgagactgtcttgtgccgccagcggcttcaacatcgactactacggaatgcactgggtccgacaggcccctggcaaaggacttgaatgggtcgcctctctgtacggcggcagcgatagcacagattacgccgactctgtgaagggcagattcaccatcagcgccgacaccagcaagaacaccgcctacctccagatgaactccctgagagccgaagataccgccgtgtactactgctccagacagtacagcgcctacttcgactattggggccagggaaccctggtcaccgttagctctacgcgtggaatgaggactgaggatcttcccaaagctgtcgtctttctcgaaccccaatggtatcgggtgctcgaaaaagactctgtgacactgaaatgccaaggggcctactctcccgaggacaactccacacagtggtttcataatgagtccctcatcagctctcaggccagctcttatttcattgatgccgctacagtggacgactccggcgagtatcggtgtcagaccaatctgtctacactgtctgaccccgtgcagcttgaggtccacattggatggttgctcttgcaagccccacgctgggttttcaaagaggaagatccaatccatctgcggtgccacagctggaaaaacaccgctctccacaaagtcacatacctgcaaaatggcaaaggacgcaaatacttccatcacaattccgatttttacattccgaaggctaccctgaaagacagcggcagctatttctgccggggactcgtcggctccaagaatgtgtcctccgaaaccgtgaatatcacgattacccaaggactggctgtgcctacaatctctagcttctttccgcctggataccaagtctccttctgtcttgtgatggtcctcctgtttgctgtggacacaggactgtacttttccgtg

SEQ ID NO: 39539 - DNA, 1431 bp, synthetic construct
  source 1..1431: mol_type = other DNA
atggccttaccagtgaccgccttgctcctgccgctggccttgctgctccacgccgccaggccggacatccagatgacacagagccctagcagcctgtctgccagcgtgggagacagagtgaccatcacctgtagagccagccaggatgtgtctacagccgtggcctggtatcagcagaagcctggaaaggcccctaagctgctgatctacagcgccagctttctgtactccggcgtgcccagcagattcagcggaagcagaagcggcaccgacttcaccctgacaatatccagcctccagcctgaggacttcgccacctactactgccagcagtacctgtaccagccttggacattcggccagggcaccaaggtggaaatcaagagaggcggaggcggaagtggaggcggaggatctggcggcggaggctctgaagttcagctggttgagtctggcggaggactggttcaacctggcggaagcctgagactgtcttgtgccgccagcggcttcaacatcgactactacggaatgcactgggtccgacaggcccctggcaaaggacttgaatgggtcgcctctctgtacggcggcagcgatagcacagattacgccgactctgtgaagggcagattcaccatcagcgccgacaccagcaagaacaccgcctacctccagatgaactccctgagagccgaagataccgccgtgtactactgctccagacagtacagcgcctacttcgactattggggccagggaaccctggtcaccgttagctctacgcgtggaatgaggactgaggatcttcccaaagctgtcgtctttctcgaaccccaatggtatcgggtgctcgaaaaagactctgtgacactgaaatgccaaggggcctactctcccgaggacaactccacacagtggtttcataatgagtccctcatcagctctcaggccagctcttatttcattgatgccgctacagtggacgactccggcgagtatcggtgtcagaccaatctgtctacactgtctgaccccgtgcagcttgaggtccacattggatggttgctcttgcaagccccacgctgggttttcaaagaggaagatccaatccatctgcggtgccacagctggaaaaacaccgctctccacaaagtcacatacctgcaaaatggcaaaggacgcaaatacttccatcacaattccgatttttacattccgaaggctaccctgaaagacagcggcagctatttctgccggggactcgtcggctccaagaatgtgtcctccgaaaccgtgaatatcacgattacccaaggactggctgtgcctacaatctctagcttctttccgcctggataccaagtctccttctgtcttgtgatggtcctcctgtttgctgtggacacaggactgtacttttccgtgaaa

SEQ ID NO: 39540 - DNA, 2163 bp, synthetic construct
  source 1..2163: mol_type = other DNA
atggccttaccagtgaccgccttgctcctgccgctggccttgctgctccacgccgccaggccggacatccagatgacacagagccctagcagcctgtctgccagcgtgggagacagagtgaccatcacctgtagagccagccaggatgtgtctacagccgtggcctggtatcagcagaagcctggaaaggcccctaagctgctgatctacagcgccagctttctgtactccggcgtgcccagcagattcagcggaagcagaagcggcaccgacttcaccctgacaatatccagcctccagcctgaggacttcgccacctactactgccagcagtacctgtaccagccttggacattcggccagggcaccaaggtggaaatcaagagactcgagggacagcctaaggccaatcctaccgtgacactgttccctccaagcagcgaagaactccaggccaacaaggccacacttgtgtgcctgatctccgacttctaccctggggctgtgacagtggcttggaaggccgatggatctcctgtgaaagccggcgtggaaaccaccaagccatccaagcagagcaacaacaaatacgccgccagctcctacctgagcctgacacctgagcagtggaagtcccacagatcctacagctgccaagtgacccacgaaggcagcaccgtggaaaagacagtggcccctacagagtgcagcggatcccagagcttcggcctgctggaccccaagctgtgctacctgctggatggcatcctgttcatctacggcgtgatcctgaccgccctgttcctgagagtgaagttcagcagaagcgccgacgcccctgcctaccagcagggacagaaccaactgtacaacgagctgaacctgggcagacgggaagagtacgacgtgctggacaagcggagaggcagggaccctgagatgggcggaaagccccagcggagaaagaacccccaggaaggactgtataacgaactccagaaagacaagatggccgaagcctacagcgagatcggcatgaagggcgagcggagaagaggcaagggccacgatggcctgtaccagggcctgagcaccgccaccaaggacacctatgacgccctgcacatgcaggccctgcctccaagaagggccaagcgatctggatctggagcaacaaacttctcactactcaaacaagcaggtgacgtggaggagaatcccgggcctactagtatggactggatttggcgcatccttttccttgtcggcgctgctaccggcgcgcattccttcgaagaagttcagctggttgagtctggcggaggactggttcaacctggcggaagcctgagactgtcttgtgccgccagcggcttcaacatcgactactacggaatgcactgggtccgacaggcccctggcaaaggacttgaatgggtcgcctctctgtacggcggcagcgatagcacagattacgccgactctgtgaagggcagattcaccatcagcgccgacaccagcaagaacaccgcctacctccagatgaactccctgagagccgaagataccgccgtgtactactgctccagacagtacagcgcctacttcgactattggggccagggaaccctggtcaccgttagctctacgcgtgcctctacaaagggaccctccgtgtttcctctggctcccagcagcaagtctacaagcggaggaacagccgctctgggctgcctggtcaaggattactttcccgagcctgtgaccgtgtcctggaatagcggagcactgacaagcggcgtgcacacctttccagccgtgctgcaaagcagcggcctgtactctctgagcagcgtggtcacagtgcctagctctagcctgggcacccagacctacatctgcaatgtgaaccacaagcctagcaacaccaaggtggacaagagagtggaacccaagagctgtggtaccatcactcaaggtttggcagtgtcaaccatctcatcattctttccacctggctaccaagtgtccttctgcctggtcatggtgctgctgttcgccgtggataccggcctgtacttcagcgtcaagaccaacatccggtccagcaccagagactggaaggaccacaagttcaagtggcggaaggaccctcaggacaag

SEQ ID NO: 39541 - DNA, 2208 bp, synthetic construct
  source 1..2208: mol_type = other DNA
atggccttaccagtgaccgccttgctcctgccgctggccttgctgctccacgccgccaggccggacatccagatgacacagagccctagcagcctgtctgccagcgtgggagacagagtgaccatcacctgtagagccagccaggatgtgtctacagccgtggcctggtatcagcagaagcctggaaaggcccctaagctgctgatctacagcgccagctttctgtactccggcgtgcccagcagattcagcggaagcagaagcggcaccgacttcaccctgacaatatccagcctccagcctgaggacttcgccacctactactgccagcagtacctgtaccagccttggacattcggccagggcaccaaggtggaaatcaagagactcgaggacctgaagaacgtgttcccacctgaggtggccgtgttcgagcctagcgaggccgagatcagccacacccagaaagccaccctcgtgtgcctggctaccggcttctaccccgaccatgtggaactgtcttggtgggtcaacggcaaagaggtgcacagcggcgtgtctaccgacccccagccactgaaagaacagcccgccctgaacgacagccggtactgcctgagcagcagactgagagtgtccgccaccttctggcagaacccccggaaccacttcagatgccaggtgcagttctacggcctgagcgagaacgacgagtggacccaggacagagccaagcccgtgacccagatcgtgtctgccgaagcctggggcagagccgattgcggatcccagagcttcggcctgctggaccccaagctgtgctacctgctggatggcatcctgttcatctacggcgtgatcctgaccgccctgttcctgagagtgaagttcagcagaagcgccgacgcccctgcctaccagcagggacagaaccaactgtacaacgagctgaacctgggcagacgggaagagtacgacgtgctggacaagcggagaggcagggaccctgagatgggcggaaagccccagcggagaaagaacccccaggaaggactgtataacgaactccagaaagacaagatggccgaagcctacagcgagatcggcatgaagggcgagcggagaagaggcaagggccacgatggcctgtaccagggcctgagcaccgccaccaaggacacctatgacgccctgcacatgcaggccctgcctccaagaagggccaagcgatctggatctggagcaacaaacttctcactactcaaacaagcaggtgacgtggaggagaatcccgggcctactagtatggactggatttggcgcatccttttccttgtcggcgctgctaccggcgcgcattccttcgaagaagttcagctggttgagtctggcggaggactggttcaacctggcggaagcctgagactgtcttgtgccgccagcggcttcaacatcgactactacggaatgcactgggtccgacaggcccctggcaaaggacttgaatgggtcgcctctctgtacggcggcagcgatagcacagattacgccgactctgtgaagggcagattcaccatcagcgccgacaccagcaagaacaccgcctacctccagatgaactccctgagagccgaagataccgccgtgtactactgctccagacagtacagcgcctacttcgactattggggccagggaaccctggtcaccgttagctctacgcgtatccagaaccctgatcctgccgtgtaccagctgcgggatagcaagagcagcgacaagagcgtgtgtctgttcaccgacttcgacagccagaccaacgtgtcccagagcaaggactccgacgtgtacatcaccgataagaccgtgctggacatgcggagcatggacttcaagagcaactccgccgtggcctggtccaacaagtccgatttcgcctgcgccaacgccttcaacaacagcattatccccgaggacacattcttcccaagccccgagagcagctgcggtaccatcactcaaggtttggcagtgtcaaccatctcatcattctttccacctggctaccaagtgtccttctgcctggtcatggtgctgctgttcgccgtggataccggcctgtacttcagcgtcaagaccaacatccggtccagcaccagagactggaaggaccacaagttcaagtggcggaaggaccctcaggacaag

SEQ ID NO: 39542 - DNA, 2133 bp, synthetic construct
  source 1..2133: mol_type = other DNA
atggccttaccagtgaccgccttgctcctgccgctggccttgctgctccacgccgccaggccggacatccagatgacacagagccctagcagcctgtctgccagcgtgggagacagagtgaccatcacctgtagagccagccaggatgtgtctacagccgtggcctggtatcagcagaagcctggaaaggcccctaagctgctgatctacagcgccagctttctgtactccggcgtgcccagcagattcagcggaagcagaagcggcaccgacttcaccctgacaatatccagcctccagcctgaggacttcgccacctactactgccagcagtacctgtaccagccttggacattcggccagggcaccaaggtggaaatcaagagactcgaggacctgaagaacgtgttcccacctgaggtggccgtgttcgagcctagcgaggccgagatcagccacacccagaaagccaccctcgtgtgcctggctaccggcttctaccccgaccatgtggaactgtcttggtgggtcaacggcaaagaggtgcacagcggcgtgtctaccgacccccagccactgaaagaacagcccgccctgaacgacagccggtactgcctgagcagcagactgagagtgtccgccaccttctggcagaacccccggaaccacttcagatgccaggtgcagttctacggcctgagcgagaacgacgagtggacccaggacagagccaagcccgtgacccagatcgtgtctgccgaagcctggggcagagccgattgcggatcccagagcttcggcctgctggaccccaagctgtgctacctgctggatggcatcctgttcatctacggcgtgatcctgaccgccctgttcctgagagtgaagttcagcagaagcgccgacgcccctgcctaccagcagggacagaaccaactgtacaacgagctgaacctgggcagacgggaagagtacgacgtgctggacaagcggagaggcagggaccctgagatgggcggaaagccccagcggagaaagaacccccaggaaggactgtataacgaactccagaaagacaagatggccgaagcctacagcgagatcggcatgaagggcgagcggagaagaggcaagggccacgatggcctgtaccagggcctgagcaccgccaccaaggacacctatgacgccctgcacatgcaggccctgcctccaagaagggccaagcgatctggatctggagcaacaaacttctcactactcaaacaagcaggtgacgtggaggagaatcccgggcctactagtatggactggatttggcgcatccttttccttgtcggcgctgctaccggcgcgcattccttcgaagaagttcagctggttgagtctggcggaggactggttcaacctggcggaagcctgagactgtcttgtgccgccagcggcttcaacatcgactactacggaatgcactgggtccgacaggcccctggcaaaggacttgaatgggtcgcctctctgtacggcggcagcgatagcacagattacgccgactctgtgaagggcagattcaccatcagcgccgacaccagcaagaacaccgcctacctccagatgaactccctgagagccgaagataccgccgtgtactactgctccagacagtacagcgcctacttcgactattggggccagggaaccctggtcaccgttagctctacgcgtatccagaaccctgatcctgccgtgtaccagctgcgggatagcaagagcagcgacaagagcgtgtgtctgttcaccgacttcgacagccagaccaacgtgtcccagagcaaggactccgacgtgtacatcaccgataagaccgtgctggacatgcggagcatggacttcaagagcaactccgccgtggcctggtccaacaagtccgatttcgcctgcgccaacgccttcaacaacagcattatccccgaggacacattcttcccaagccccgagagcagctgcggtaccatcactcaaggtttggcagtgtcaaccatctcatcattctttccacctggctaccaagtgtccttctgcctggtcatggtgctgctgttcgccgtggataccggcctgtacttcagcgtc

SEQ ID NO: 39543 - DNA, 2136 bp, synthetic construct
  source 1..2136: mol_type = other DNA
atggccttaccagtgaccgccttgctcctgccgctggccttgctgctccacgccgccaggccggacatccagatgacacagagccctagcagcctgtctgccagcgtgggagacagagtgaccatcacctgtagagccagccaggatgtgtctacagccgtggcctggtatcagcagaagcctggaaaggcccctaagctgctgatctacagcgccagctttctgtactccggcgtgcccagcagattcagcggaagcagaagcggcaccgacttcaccctgacaatatccagcctccagcctgaggacttcgccacctactactgccagcagtacctgtaccagccttggacattcggccagggcaccaaggtggaaatcaagagactcgaggacctgaagaacgtgttcccacctgaggtggccgtgttcgagcctagcgaggccgagatcagccacacccagaaagccaccctcgtgtgcctggctaccggcttctaccccgaccatgtggaactgtcttggtgggtcaacggcaaagaggtgcacagcggcgtgtctaccgacccccagccactgaaagaacagcccgccctgaacgacagccggtactgcctgagcagcagactgagagtgtccgccaccttctggcagaacccccggaaccacttcagatgccaggtgcagttctacggcctgagcgagaacgacgagtggacccaggacagagccaagcccgtgacccagatcgtgtctgccgaagcctggggcagagccgattgcggatcccagagcttcggcctgctggaccccaagctgtgctacctgctggatggcatcctgttcatctacggcgtgatcctgaccgccctgttcctgagagtgaagttcagcagaagcgccgacgcccctgcctaccagcagggacagaaccaactgtacaacgagctgaacctgggcagacgggaagagtacgacgtgctggacaagcggagaggcagggaccctgagatgggcggaaagccccagcggagaaagaacccccaggaaggactgtataacgaactccagaaagacaagatggccgaagcctacagcgagatcggcatgaagggcgagcggagaagaggcaagggccacgatggcctgtaccagggcctgagcaccgccaccaaggacacctatgacgccctgcacatgcaggccctgcctccaagaagggccaagcgatctggatctggagcaacaaacttctcactactcaaacaagcaggtgacgtggaggagaatcccgggcctactagtatggactggatttggcgcatccttttccttgtcggcgctgctaccggcgcgcattccttcgaagaagttcagctggttgagtctggcggaggactggttcaacctggcggaagcctgagactgtcttgtgccgccagcggcttcaacatcgactactacggaatgcactgggtccgacaggcccctggcaaaggacttgaatgggtcgcctctctgtacggcggcagcgatagcacagattacgccgactctgtgaagggcagattcaccatcagcgccgacaccagcaagaacaccgcctacctccagatgaactccctgagagccgaagataccgccgtgtactactgctccagacagtacagcgcctacttcgactattggggccagggaaccctggtcaccgttagctctacgcgtatccagaaccctgatcctgccgtgtaccagctgcgggatagcaagagcagcgacaagagcgtgtgtctgttcaccgacttcgacagccagaccaacgtgtcccagagcaaggactccgacgtgtacatcaccgataagaccgtgctggacatgcggagcatggacttcaagagcaactccgccgtggcctggtccaacaagtccgatttcgcctgcgccaacgccttcaacaacagcattatccccgaggacacattcttcccaagccccgagagcagctgcggtaccatcactcaaggtttggcagtgtcaaccatctcatcattctttccacctggctaccaagtgtccttctgcctggtcatggtgctgctgttcgccgtggataccggcctgtacttcagcgtcaag

SEQ ID NO: 39544 - DNA, 2139 bp, synthetic construct
  source 1..2139: mol_type = other DNA
atggccttaccagtgaccgccttgctcctgccgctggccttgctgctccacgccgccaggccggacatccagatgacacagagccctagcagcctgtctgccagcgtgggagacagagtgaccatcacctgtagagccagccaggatgtgtctacagccgtggcctggtatcagcagaagcctggaaaggcccctaagctgctgatctacagcgccagctttctgtactccggcgtgcccagcagattcagcggaagcagaagcggcaccgacttcaccctgacaatatccagcctccagcctgaggacttcgccacctactactgccagcagtacctgtaccagccttggacattcggccagggcaccaaggtggaaatcaagagactcgaggacctgaagaacgtgttcccacctgaggtggccgtgttcgagcctagcgaggccgagatcagccacacccagaaagccaccctcgtgtgcctggctaccggcttctaccccgaccatgtggaactgtcttggtgggtcaacggcaaagaggtgcacagcggcgtgtctaccgacccccagccactgaaagaacagcccgccctgaacgacagccggtactgcctgagcagcagactgagagtgtccgccaccttctggcagaacccccggaaccacttcagatgccaggtgcagttctacggcctgagcgagaacgacgagtggacccaggacagagccaagcccgtgacccagatcgtgtctgccgaagcctggggcagagccgattgcggatcccagagcttcggcctgctggaccccaagctgtgctacctgctggatggcatcctgttcatctacggcgtgatcctgaccgccctgttcctgagagtgaagttcagcagaagcgccgacgcccctgcctaccagcagggacagaaccaactgtacaacgagctgaacctgggcagacgggaagagtacgacgtgctggacaagcggagaggcagggaccctgagatgggcggaaagccccagcggagaaagaacccccaggaaggactgtataacgaactccagaaagacaagatggccgaagcctacagcgagatcggcatgaagggcgagcggagaagaggcaagggccacgatggcctgtaccagggcctgagcaccgccaccaaggacacctatgacgccctgcacatgcaggccctgcctccaagaagggccaagcgatctggatctggagcaacaaacttctcactactcaaacaagcaggtgacgtggaggagaatcccgggcctactagtatggactggatttggcgcatccttttccttgtcggcgctgctaccggcgcgcattccttcgaagaagttcagctggttgagtctggcggaggactggttcaacctggcggaagcctgagactgtcttgtgccgccagcggcttcaacatcgactactacggaatgcactgggtccgacaggcccctggcaaaggacttgaatgggtcgcctctctgtacggcggcagcgatagcacagattacgccgactctgtgaagggcagattcaccatcagcgccgacaccagcaagaacaccgcctacctccagatgaactccctgagagccgaagataccgccgtgtactactgctccagacagtacagcgcctacttcgactattggggccagggaaccctggtcaccgttagctctacgcgtatccagaaccctgatcctgccgtgtaccagctgcgggatagcaagagcagcgacaagagcgtgtgtctgttcaccgacttcgacagccagaccaacgtgtcccagagcaaggactccgacgtgtacatcaccgataagaccgtgctggacatgcggagcatggacttcaagagcaactccgccgtggcctggtccaacaagtccgatttcgcctgcgccaacgccttcaacaacagcattatccccgaggacacattcttcccaagccccgagagcagctgcggtaccatcactcaaggtttggcagtgtcaaccatctcatcattctttccacctggctaccaagtgtccttctgcctggtcatggtgctgctgttcgccgtggataccggcctgtacttcagcgtcaagacc

SEQ ID NO: 39545 - DNA, 1950 bp, synthetic construct; identical to SEQ ID NO: 3872
  source 1..1950: mol_type = other DNA

SEQ ID NO: 39546 - DNA, 1857 bp, synthetic construct
  source 1..1857: mol_type = other DNA
atggccttaccagtgaccgccttgctcctgccgctggccttgctgctccacgccgccaggccggacatccagatgacacagagccctagcagcctgtctgccagcgtgggagacagagtgaccatcacctgtagagccagccaggatgtgtctacagccgtggcctggtatcagcagaagcctggaaaggcccctaagctgctgatctacagcgccagctttctgtactccggcgtgcccagcagattcagcggaagcagaagcggcaccgacttcaccctgacaatatccagcctccagcctgaggacttcgccacctactactgccagcagtacctgtaccagccttggacattcggccagggcaccaaggtggaaatcaagagactcgaggacctgaagaacgtgttcccacctgaggtggccgtgttcgagcctagcgaggccgagatcagccacacccagaaagccaccctcgtgtgcctggctaccggcttctaccccgaccatgtggaactgtcttggtgggtcaacggcaaagaggtgcacagcggcgtgtgtaccgacccccagccactgaaagaacagcccgccctgaacgacagccggtactgcctgagcagcagactgagagtgtccgccaccttctggcagaacccccggaaccacttcagatgccaggtgcagttctacggcctgagcgagaacgacgagtggacccaggacagagccaagcccgtgacccagatcgtgtctgccgaagcctggggcagagccgattgcggctttaccagcgagagctaccagcagggcgtgctgagcgcctactacatgtacttgttgctgctgctgaagtccgtggtgtacttcgccatcatcacatgctgcctgctgcggagaaccgccttctgctgcaacggcgagaagtctagggccaagcgatctggatctggagcaacaaacttctcactactcaaacaagcaggtgacgtggaggagaatcccgggcctactagtatggactggatttggcgcatccttttccttgtcggcgctgctaccggcgcgcattccttcgaagaagttcagctggttgagtctggcggaggactggttcaacctggcggaagcctgagactgtcttgtgccgccagcggcttcaacatcgactactacggaatgcactgggtccgacaggcccctggcaaaggacttgaatgggtcgcctctctgtacggcggcagcgatagcacagattacgccgactctgtgaagggcagattcaccatcagcgccgacaccagcaagaacaccgcctacctccagatgaactccctgagagccgaagataccgccgtgtactactgctccagacagtacagcgcctacttcgactattggggccagggaaccctggtcaccgttagctctacgcgtatccagaaccctgatcctgccgtgtaccagctgcgggatagcaagagcagcgacaagagcgtgtgtctgttcaccgacttcgacagccagaccaacgtgtcccagagcaaggactccgacgtgtacatcaccgataagtgcgtgctggacatgcggagcatggacttcaagagcaactccgccgtggcctggtccaacaagtccgatttcgcctgcgccaacgccttcaacaacagcattatccccgaggacacattcttcccaagccccgagagcagctgcgacgtgaagctggtggaaaagagcttcgagacagacaccaacctgaacttccagaacctgagcgtgatcggcttcagaatcctgctgctgaaagtggccggctttaacctgctgatgaccctgcggctgtggtccagc

SEQ ID NO: 39547 - DNA, 1878 bp, synthetic construct
  source 1..1878: mol_type = other DNA
atggccttaccagtgaccgccttgctcctgccgctggccttgctgctccacgccgccaggccggacatccagatgacacagagccctagcagcctgtctgccagcgtgggagacagagtgaccatcacctgtagagccagccaggatgtgtctacagccgtggcctggtatcagcagaagcctggaaaggcccctaagctgctgatctacagcgccagctttctgtactccggcgtgcccagcagattcagcggaagcagaagcggcaccgacttcaccctgacaatatccagcctccagcctgaggacttcgccacctactactgccagcagtacctgtaccagccttggacattcggccagggcaccaaggtggaaatcaagagactcgaggacaagcagctggacgccgacgtgtcccccaagcctaccatcttcctgccctctatcgccgagacaaagctccagaaggccggcacctacctgtgcctgctggaaaagttcttcccagatgtgattaagatccactggcaggaaaagaagtccaacaccatcctgggcagccaggaaggcaacaccatgaagaccaacgacacctacatgaagttcagctggctgaccgtgcccgagaagtccctggacaaagaacacagatgcatcgtgcggcacgaaaacaacaagaacggcgtggaccaggaaatcatcttcccacccatcaagaccgatgtgattacaatggaccccaaggacaactgctccaaggacgccaacgataccctgctgctccagctgaccaacaccagcgcctactacatgtacgagatcctgctgggcaaggccaccctgtacgccgtgctggtgtctgccctggtgctgatggctatggtcaagcggaaggacagccggggaagggccaagcgatctggatctggagcaacaaacttctcactactcaaacaagcaggtgacgtggaggagaatcccgggcctactagtatggactggatttggcgcatccttttccttgtcggcgctgctaccggcgcgcattccttcgaagaagttcagctggttgagtctggcggaggactggttcaacctggcggaagcctgagactgtcttgtgccgccagcggcttcaacatcgactactacggaatgcactgggtccgacaggcccctggcaaaggacttgaatgggtcgcctctctgtacggcggcagcgatagcacagattacgccgactctgtgaagggcagattcaccatcagcgccgacaccagcaagaacaccgcctacctccagatgaactccctgagagccgaagataccgccgtgtactactgctccagacagtacagcgcctacttcgactattggggccagggaaccctggtcaccgttagctctacgcgtagccagcctcacaccaagcccagcgtgttcgtgatgaagaacggcaccaacgtggcctgcctcgtgaaagagttctaccccaaggacatcaggatcaacctggtgtccagcaagaagatcaccgagttcgaccccgccatcgtgatctcccccagcggcaagtacaacgccgtgaagctggggaagtatgaggacagcaacagcgtgacctgctccgtgcagcacgacaacaagaccgtgcacagcaccgactttgaagtgaaaaccgactccaccgaccacgtgaagcccaaagagacagagaacaccaagcagcccagcaagagctgccacaagcccaaggccatcgtgcacaccgagaaagtgaacatgatgagcctgaccgtgatcggcttcagaatcctgctgctgaaagtggccggctttaacctgctgatgaccctgcggctgtggtccagctaa

SEQ ID NO: 39548 - DNA, 1878 bp, synthetic construct
  source 1..1878: mol_type = other DNA
atggccttaccagtgaccgccttgctcctgccgctggccttgctgctccacgccgccaggccggacatccagatgacacagagccctagcagcctgtctgccagcgtgggagacagagtgaccatcacctgtagagccagccaggatgtgtctacagccgtggcctggtatcagcagaagcctggaaaggcccctaagctgctgatctacagcgccagctttctgtactccggcgtgcccagcagattcagcggaagcagaagcggcaccgacttcaccctgacaatatccagcctccagcctgaggacttcgccacctactactgccagcagtacctgtaccagccttggacattcggccagggcaccaaggtggaaatcaagagactcgaggacaagcagctggacgccgacgtgtcccccaagcctaccatcttcctgccctctatcgccgagacaaagctccagaaggccggcacctacctgtgcctgctggaaaagttcttcccagatgtgattaagatccactggcaggaaaagaagtccaacaccatcctgggcagccaggaaggcaacaccatgaagaccaacgacacctacatgaagttcagctggctgaccgtgcccgagaagtccctggacaaagaacacagatgcatcgtgcggcacgaaaacaacaagaacggcgtggaccaggaaatcatcttcccacccatcaagaccgatgtgattacaatggaccccaaggacaactgctccaaggacgccaacgataccctgctgctccagctgaccaacaccagcgccaccatcctgtacgagatcctgctgggcaaggccaccctgtacgccgtgctggtgtctgccctggtgctgatggctatggtcaagcggaaggacagccggggaagggccaagcgatctggatctggagcaacaaacttctcactactcaaacaagcaggtgacgtggaggagaatcccgggcctactagtatggactggatttggcgcatccttttccttgtcggcgctgctaccggcgcgcattccttcgaagaagttcagctggttgagtctggcggaggactggttcaacctggcggaagcctgagactgtcttgtgccgccagcggcttcaacatcgactactacggaatgcactgggtccgacaggcccctggcaaaggacttgaatgggtcgcctctctgtacggcggcagcgatagcacagattacgccgactctgtgaagggcagattcaccatcagcgccgacaccagcaagaacaccgcctacctccagatgaactccctgagagccgaagataccgccgtgtactactgctccagacagtacagcgcctacttcgactattggggccagggaaccctggtcaccgttagctctacgcgtagccagcctcacaccaagcccagcgtgttcgtgatgaagaacggcaccaacgtggcctgcctcgtgaaagagttctaccccaaggacatcaggatcaacctggtgtccagcaagaagatcaccgagttcgaccccgccatcgtgatctcccccagcggcaagtacaacgccgtgaagctggggaagtatgaggacagcaacagcgtgacctgctccgtgcagcacgacaacaagaccgtgcacagcaccgactttgaagtgaaaaccgactccaccgaccacgtgaagcccaaagagacagagaacaccaagcagcccagcaagagctgccacaagcccaaggccatcgtgcacaccgagaaagtgaacatgatgagcctgaccgtgatcggcttcagaatcctgctgctgaaagtggccggctttaacctgctgatgaccctgcggctgtggtccagctaa

SEQ ID NO: 39549 - DNA, 1878 bp, synthetic construct
  source 1..1878: mol_type = other DNA
atggccttaccagtgaccgccttgctcctgccgctggccttgctgctccacgccgccaggccggacatccagatgacacagagccctagcagcctgtctgccagcgtgggagacagagtgaccatcacctgtagagccagccaggatgtgtctacagccgtggcctggtatcagcagaagcctggaaaggcccctaagctgctgatctacagcgccagctttctgtactccggcgtgcccagcagattcagcggaagcagaagcggcaccgacttcaccctgacaatatccagcctccagcctgaggacttcgccacctactactgccagcagtacctgtaccagccttggacattcggccagggcaccaaggtggaaatcaagagactcgaggacaagcagctggacgccgacgtgtcccccaagcctaccatcttcctgccctctatcgccgagacaaagctccagaaggccggcacctacctgtgcctgctggaaaagttcttcccagatgtgattaagatccactggcaggaaaagaagtccaacaccatcctgggcagccaggaaggcaacaccatgaagaccaacgacacctacatgaagttcagctggctgaccgtgcccgagaagtccctggacaaagaacacagatgcatcgtgcggcacgaaaacaacaagaacggcgtggaccaggaaatcatcttcccacccatcaagaccgatgtgattacaatggaccccaaggacaactgctccaaggacgccaacgataccctgctgctccagctgaccaacaccagcgcctactacatgtacgagatcctgctgggcaaggccaccctgtacgccgtgctggtgtctgccctggtgctgatggctatggtcaagcggaaggacagccggggaagggccaagcgatctggatctggagcaacaaacttctcactactcaaacaagcaggtgacgtggaggagaatcccgggcctactagtatggactggatttggcgcatccttttccttgtcggcgctgctaccggcgcgcattccttcgaagaagttcagctggttgagtctggcggaggactggttcaacctggcggaagcctgagactgtcttgtgccgccagcggcttcaacatcgactactacggaatgcactgggtccgacaggcccctggcaaaggacttgaatgggtcgcctctctgtacggcggcagcgatagcacagattacgccgactctgtgaagggcagattcaccatcagcgccgacaccagcaagaacaccgcctacctccagatgaactccctgagagccgaagataccgccgtgtactactgctccagacagtacagcgcctacttcgactattggggccagggaaccctggtcaccgttagctctacgcgtagccagcctcacaccaagcccagcgtgttcgtgatgaagaacggcaccaacgtggcctgcctcgtgaaagagttctaccccaaggacatcaggatcaacctggtgtccagcaagaagatcaccgagttcgaccccgccatcgtgatctcccccagcggcaagtacaacgccgtgaagctggggaagtacgaggacagcaacagcgtgacctgctccgtgcagcacgacaacaagaccgtgcacagcaccgactttgaagtgaaaaccgactccaccgaccacgtgaagcccaaagagacagagaacaccaagcagcccagcaagagctgccacaagcccaaggccatcgtgcacaccgagaaagtgaacatgatgagcctgaccgtgctgggcttcagaatcctgctgctgaaagtggccggctttaacctgctgatgaccctgcggctgtggtccagctaa

SEQ ID NO: 39550 - DNA, 1878 bp, synthetic construct
  source 1..1878: mol_type = other DNA
atggccttaccagtgaccgccttgctcctgccgctggccttgctgctccacgccgccaggccggacatccagatgacacagagccctagcagcctgtctgccagcgtgggagacagagtgaccatcacctgtagagccagccaggatgtgtctacagccgtggcctggtatcagcagaagcctggaaaggcccctaagctgctgatctacagcgccagctttctgtactccggcgtgcccagcagattcagcggaagcagaagcggcaccgacttcaccctgacaatatccagcctccagcctgaggacttcgccacctactactgccagcagtacctgtaccagccttggacattcggccagggcaccaaggtggaaatcaagagactcgaggacaagcagctggacgccgacgtgtcccccaagcctaccatcttcctgccctctatcgccgagacaaagctccagaaggccggcacctacctgtgcctgctggaaaagttcttcccagatgtgattaagatccactggcaggaaaagaagtccaacaccatcctgggcagccaggaaggcaacaccatgaagaccaacgacacctacatgaagttcagctggctgaccgtgcccgagaagtccctggacaaagaacacagatgcatcgtgcggcacgaaaacaacaagaacggcgtggaccaggaaatcatcttcccacccatcaagaccgatgtgattacaatggaccccaaggacaactgctccaaggacgccaacgataccctgctgctccagctgaccaacaccagcgccaccatcctgtacgagatcctgctgggcaaggccaccctgtacgccgtgctggtgtctgccctggtgctgatggctatggtcaagcggaaggacagccggggaagggccaagcgatctggatctggagcaacaaacttctcactactcaaacaagcaggtgacgtggaggagaatcccgggcctactagtatggactggatttggcgcatccttttccttgtcggcgctgctaccggcgcgcattccttcgaagaagttcagctggttgagtctggcggaggactggttcaacctggcggaagcctgagactgtcttgtgccgccagcggcttcaacatcgactactacggaatgcactgggtccgacaggcccctggcaaaggacttgaatgggtcgcctctctgtacggcggcagcgatagcacagattacgccgactctgtgaagggcagattcaccatcagcgccgacaccagcaagaacaccgcctacctccagatgaactccctgagagccgaagataccgccgtgtactactgctccagacagtacagcgcctacttcgactattggggccagggaaccctggtcaccgttagctctacgcgtagccagcctcacaccaagcccagcgtgttcgtgatgaagaacggcaccaacgtggcctgcctcgtgaaagagttctaccccaaggacatcaggatcaacctggtgtccagcaagaagatcaccgagttcgaccccgccatcgtgatctcccccagcggcaagtacaacgccgtgaagctggggaagtacgaggacagcaacagcgtgacctgctccgtgcagcacgacaacaagaccgtgcacagcaccgactttgaagtgaaaaccgactccaccgaccacgtgaagcccaaagagacagagaacaccaagcagcccagcaagagctgccacaagcccaaggccatcgtgcacaccgagaaagtgaacatgatgagcctgaccgtgctgggcttcagaatcctgctgctgaaagtggccggctttaacctgctgatgaccctgcggctgtggtccagctaa

SEQ ID NO: 39551 - DNA, 1860 bp, synthetic construct
  source 1..1860: mol_type = other DNA
atggccttaccagtgaccgccttgctcctgccgctggccttgctgctccacgccgccaggccggacatccagatgacacagagccctagcagcctgtctgccagcgtgggagacagagtgaccatcacctgtagagccagccaggatgtgtctacagccgtggcctggtatcagcagaagcctggaaaggcccctaagctgctgatctacagcgccagctttctgtactccggcgtgcccagcagattcagcggaagcagaagcggcaccgacttcaccctgacaatatccagcctccagcctgaggacttcgccacctactactgccagcagtacctgtaccagccttggacattcggccagggcaccaaggtggaaatcaagagactcgaggacctgaagaacgtgttcccacctgaggtggccgtgttcgagcctagcgaggccgagatcagccacacccagaaagccaccctcgtgtgcctggctaccggcttctaccccgaccatgtggaactgtcttggtgggtcaacggcaaagaggtgcacagcggcgtgtgtaccgacccccagccactgaaagaacagcccgccctgaacgacagccggtactgcctgagcagcagactgagagtgtccgccaccttctggcagaacccccggaaccacttcagatgccaggtgcagttctacggcctgagcgagaacgacgagtggacccaggacagagccaagcccgtgacccagatcgtgtctgccgaagcctggggcagagccgattgcggctttaccagcgagagctaccagcagggcgtgctgagcgccaccatcctgtacttgttgctgctgctgaagtccgtggtgtacttcgccatcatcacatgctgcctgctgcggagaaccgccttctgctgcaacggcgagaagtctagggccaagcgatctggatctggagcaacaaacttctcactactcaaacaagcaggtgacgtggaggagaatcccgggcctactagtatggactggatttggcgcatccttttccttgtcggcgctgctaccggcgcgcattccttcgaagaagttcagctggttgagtctggcggaggactggttcaacctggcggaagcctgagactgtcttgtgccgccagcggcttcaacatcgactactacggaatgcactgggtccgacaggcccctggcaaaggacttgaatgggtcgcctctctgtacggcggcagcgatagcacagattacgccgactctgtgaagggcagattcaccatcagcgccgacaccagcaagaacaccgcctacctccagatgaactccctgagagccgaagataccgccgtgtactactgctccagacagtacagcgcctacttcgactattggggccagggaaccctggtcaccgttagctctacgcgtatccagaaccctgatcctgccgtgtaccagctgcgggatagcaagagcagcgacaagagcgtgtgtctgttcaccgacttcgacagccagaccaacgtgtcccagagcaaggactccgacgtgtacatcaccgataagtgcgtgctggacatgcggagcatggacttcaagagcaactccgccgtggcctggtccaacaagtccgatttcgcctgcgccaacgccttcaacaacagcattatccccgaggacacattcttcccaagccccgagagcagctgcgacgtgaagctggtggaaaagagcttcgagacagacaccaacctgaacttccagaacctgagcgtgatcggcctgcggatgctgttcgccaaaaccgtggccgtgaacttcctgctgaccgccaagctgttcttcctctaa

SEQ ID NO: 39552 - DNA, 1947 bp, synthetic construct
  source 1..1947: mol_type = other DNA
atggccttaccagtgaccgccttgctcctgccgctggccttgctgctccacgccgccaggccggacatccagatgacacagagccctagcagcctgtctgccagcgtgggagacagagtgaccatcacctgtagagccagccaggatgtgtctacagccgtggcctggtatcagcagaagcctggaaaggcccctaagctgctgatctacagcgccagctttctgtactccggcgtgcccagcagattcagcggaagcagaagcggcaccgacttcaccctgacaatatccagcctccagcctgaggacttcgccacctactactgccagcagtacctgtaccagccttggacattcggccagggcaccaaggtggaaatcaagagactcgaggacctgaagaacgtgttcccacctgaggtggccgtgttcgagcctagcgaggccgagatcagccacacccagaaagccaccctcgtgtgcctggctaccggcttctaccccgaccatgtggaactgtcttggtgggtcaacggcaaagaggtgcacagcggcgtgtctaccgacccccagccactgaaagaacagcccgccctgaacgacagccggtactgcctgagcagcagactgagagtgtccgccaccttctggcagaacccccggaaccacttcagatgccaggtgcagttctacggcctgagcgagaacgacgagtggacccaggacagagccaagcccgtgacccagatcgtgtctgccgaagcctggggcagagccgattgcggatcctccaaggacgccaacgataccctgctgctccagctgaccaacaccagcgcctactacatgtacttgttgctgctgctgaagtccgtggtgtacttcgccatcatcacatgctgcctgctgcggagaaccgccttctgctgcaacggcgagaagtctagggccaagcgatctggatctggagcaacaaacttctcactactcaaacaagcaggtgacgtggaggagaatcccgggcctactagtatggactggatttggcgcatccttttccttgtcggcgctgctaccggcgcgcattccttcgaagaagttcagctggttgagtctggcggaggactggttcaacctggcggaagcctgagactgtcttgtgccgccagcggcttcaacatcgactactacggaatgcactgggtccgacaggcccctggcaaaggacttgaatgggtcgcctctctgtacggcggcagcgatagcacagattacgccgactctgtgaagggcagattcaccatcagcgccgacaccagcaagaacaccgcctacctccagatgaactccctgagagccgaagataccgccgtgtactactgctccagacagtacagcgcctacttcgactattggggccagggaaccctggtcaccgttagctctacgcgtatccagaaccctgatcctgccgtgtaccagctgcgggatagcaagagcagcgacaagagcgtgtgtctgttcaccgacttcgacagccagaccaacgtgtcccagagcaaggactccgacgtgtacatcaccgataagaccgtgctggacatgcggagcatggacttcaagagcaactccgccgtggcctggtccaacaagtccgatttcgcctgcgccaacgccttcaacaacagcattatccccgaggacacattcttcccaagccccgagagcagctgcggtaccgaagtgaaaaccgactccaccgaccacgtgaagcccaaagagacagagaacaccaagcagcccagcaagagctgccacaagcccaaggccatcgtgcacaccgagaaagtgaacatgatgagcctgaccgtgctgggcctgcggatgctgttcgccaaaaccgtggccgtgaacttcctgctgaccgccaagctgttcttcctctaa

SEQ ID NO: 39553 - DNA, 1857 bp, synthetic construct
  source 1..1857: mol_type = other DNA
atggccttaccagtgaccgccttgctcctgccgctggccttgctgctccacgccgccaggccggacatccagatgacacagagccctagcagcctgtctgccagcgtgggagacagagtgaccatcacctgtagagccagccaggatgtgtctacagccgtggcctggtatcagcagaagcctggaaaggcccctaagctgctgatctacagcgccagctttctgtactccggcgtgcccagcagattcagcggaagcagaagcggcaccgacttcaccctgacaatatccagcctccagcctgaggacttcgccacctactactgccagcagtacctgtaccagccttggacattcggccagggcaccaaggtggaaatcaagagactcgaggacctgaagaacgtgttcccacctgaggtggccgtgttcgagcctagcgaggccgagatcagccacacccagaaagccaccctcgtgtgcctggctaccggcttctaccccgaccatgtggaactgtcttggtgggtcaacggcaaagaggtgcacagcggcgtgtgtaccgacccccagccactgaaagaacagcccgccctgaacgacagccggtactgcctgagcagcagactgagagtgtccgccaccttctggcagaacccccggaaccacttcagatgccaggtgcagttctacggcctgagcgagaacgacgagtggacccaggacagagccaagcccgtgacccagatcgtgtctgccgaagcctggggcagagccgattgcgacgtgaagctggtggaaaagagcttcgagacagacaccaacctgaacttccagaacctgagcgtgatcggcttcagaatcctgctgctgaaagtggccggctttaacctgctgatgaccctgcggctgtggtccagcagggccaagcgatctggatctggagcaacaaacttctcactactcaaacaagcaggtgacgtggaggagaatcccgggcctactagtatggactggatttggcgcatccttttccttgtcggcgctgctaccggcgcgcattccttcgaagaagttcagctggttgagtctggcggaggactggttcaacctggcggaagcctgagactgtcttgtgccgccagcggcttcaacatcgactactacggaatgcactgggtccgacaggcccctggcaaaggacttgaatgggtcgcctctctgtacggcggcagcgatagcacagattacgccgactctgtgaagggcagattcaccatcagcgccgacaccagcaagaacaccgcctacctccagatgaactccctgagagccgaagataccgccgtgtactactgctccagacagtacagcgcctacttcgactattggggccagggaaccctggtcaccgttagctctacgcgtatccagaaccctgatcctgccgtgtaccagctgcgggatagcaagagcagcgacaagagcgtgtgtctgttcaccgacttcgacagccagaccaacgtgtcccagagcaaggactccgacgtgtacatcaccgataagtgcgtgctggacatgcggagcatggacttcaagagcaactccgccgtggcctggtccaacaagtccgatttcgcctgcgccaacgccttcaacaacagcattatccccgaggacacattcttcccaagccccgagagcagctgcggctttaccagcgagagctaccagcagggcgtgctgagcgccaccatcctgtacgagatcctgctgggcaaggccaccctgtacgccgtgctggtgtctgccctggtgctgatggctatggtcaagcggaaggacagccggggataa

SEQ ID NO: 39554 - DNA, 1857 bp, synthetic construct
  source 1..1857: mol_type = other DNA
atggccttaccagtgaccgccttgctcctgccgctggccttgctgctccacgccgccaggccggacatccagatgacacagagccctagcagcctgtctgccagcgtgggagacagagtgaccatcacctgtagagccagccaggatgtgtctacagccgtggcctggtatcagcagaagcctggaaaggcccctaagctgctgatctacagcgccagctttctgtactccggcgtgcccagcagattcagcggaagcagaagcggcaccgacttcaccctgacaatatccagcctccagcctgaggacttcgccacctactactgccagcagtacctgtaccagccttggacattcggccagggcaccaaggtggaaatcaagagactcgaggacctgaagaacgtgttcccacctgaggtggccgtgttcgagcctagcgaggccgagatcagccacacccagaaagccaccctcgtgtgcctggctaccggcttctaccccgaccatgtggaactgtcttggtgggtcaacggcaaagaggtgcacagcggcgtgtgtaccgacccccagccactgaaagaacagcccgccctgaacgacagccggtactgcctgagcagcagactgagagtgtccgccaccttctggcagaacccccggaaccacttcagatgccaggtgcagttctacggcctgagcgagaacgacgagtggacccaggacagagccaagcccgtgacccagatcgtgtctgccgaagcctggggcagagccgattgcggctttaccagcgagagctaccagcagggcgtgctgagcgccaccaacctgagcgtgatcggcttcagaatcctgctgctgaaagtggccggctttaacctgctgatgaccctgcggctgtggtccagcagggccaagcgatctggatctggagcaacaaacttctcactactcaaacaagcaggtgacgtggaggagaatcccgggcctactagtatggactggatttggcgcatccttttccttgtcggcgctgctaccggcgcgcattccttcgaagaagttcagctggttgagtctggcggaggactggttcaacctggcggaagcctgagactgtcttgtgccgccagcggcttcaacatcgactactacggaatgcactgggtccgacaggcccctggcaaaggacttgaatgggtcgcctctctgtacggcggcagcgatagcacagattacgccgactctgtgaagggcagattcaccatcagcgccgacaccagcaagaacaccgcctacctccagatgaactccctgagagccgaagataccgccgtgtactactgctccagacagtacagcgcctacttcgactattggggccagggaaccctggtcaccgttagctctacgcgtatccagaaccctgatcctgccgtgtaccagctgcgggatagcaagagcagcgacaagagcgtgtgtctgttcaccgacttcgacagccagaccaacgtgtcccagagcaaggactccgacgtgtacatcaccgataagtgcgtgctggacatgcggagcatggacttcaagagcaactccgccgtggcctggtccaacaagtccgatttcgcctgcgccaacgccttcaacaacagcattatccccgaggacacattcttcccaagccccgagagcagctgcgacgtgaagctggtggaaaagagcttcgagacagacaccaacctgaacttccagatcctgtacgagatcctgctgggcaaggccaccctgtacgccgtgctggtgtctgccctggtgctgatggctatggtcaagcggaaggacagccggggataa

SEQ ID NO: 39555 - DNA, 1857 bp, synthetic construct; identical to SEQ ID NO: 39553
  source 1..1857: mol_type = other DNA

SEQ ID NO: 39556 - DNA, 1857 bp, synthetic construct; identical to SEQ ID NO: 39554
  source 1..1857: mol_type = other DNA

SEQ ID NO: 39557 - DNA, 1854 bp, synthetic construct
  source 1..1854: mol_type = other DNA
atggccttaccagtgaccgccttgctcctgccgctggccttgctgctccacgccgccaggccggacatccagatgacacagagccctagcagcctgtctgccagcgtgggagacagagtgaccatcacctgtagagccagccaggatgtgtctacagccgtggcctggtatcagcagaagcctggaaaggcccctaagctgctgatctacagcgccagctttctgtactccggcgtgcccagcagattcagcggaagcagaagcggcaccgacttcaccctgacaatatccagcctccagcctgaggacttcgccacctactactgccagcagtacctgtaccagccttggacattcggccagggcaccaaggtggaaatcaagagactcgaggacctgaagaacgtgttcccacctgaggtggccgtgttcgagcctagcgaggccgagatcagccacacccagaaagccaccctcgtgtgcctggctaccggcttctaccccgaccatgtggaactgtcttggtgggtcaacggcaaagaggtgcacagcggcgtgtgtaccgacccccagccactgaaagaacagcccgccctgaacgacagccggtactgcctgagcagcagactgagagtgtccgccaccttctggcagaacccccggaaccacttcagatgccaggtgcagttctacggcctgagcgagaacgacgagtggacccaggacagagccaagcccgtgacccagatcgtgtctgccgaagcctggggcagagccgattgcgacgtgaagctggtggaaaagagcttcgagacagacaccaacctgaacttccagaacctgagcgtgatcggcttcagaatcctgctgctgaaagtggccggctttaacctgctgatgaccctgcggctgtggtccagcagggccaagcgatctggatctggagcaacaaacttctcactactcaaacaagcaggtgacgtggaggagaatcccgggcctactagtatggactggatttggcgcatccttttccttgtcggcgctgctaccggcgcgcattccttcgaagaagttcagctggttgagtctggcggaggactggttcaacctggcggaagcctgagactgtcttgtgccgccagcggcttcaacatcgactactacggaatgcactgggtccgacaggcccctggcaaaggacttgaatgggtcgcctctctgtacggcggcagcgatagcacagattacgccgactctgtgaagggcagattcaccatcagcgccgacaccagcaagaacaccgcctacctccagatgaactccctgagagccgaagataccgccgtgtactactgctccagacagtacagcgcctacttcgactattggggccagggaaccctggtcaccgttagctctacgcgtatccagaaccctgatcctgccgtgtaccagctgcgggatagcaagagcagcgacaagagcgtgtgtctgttcaccgacttcgacagccagaccaacgtgtcccagagcaaggactccgacgtgtacatcaccgataagtgcgtgctggacatgcggagcatggacttcaagagcaactccgccgtggcctggtccaacaagtccgatttcgcctgcgccaacgccttcaacaacagcattatccccgaggacacattcttcccaagccccgagagcagctgcggctttaccagcgagagctaccagcagggcgtgctgagcgccaccatcctgtacgagatcctgctgggcaaggccaccctgtacgccgtgctggtgtctgccctggtgctgatggctatggtcaagcggaaggacagccgggga

SEQ ID NO: 39558 - DNA, 1866 bp, synthetic construct
  source 1..1866: mol_type = other DNA
atggccttaccagtgaccgccttgctcctgccgctggccttgctgctccacgccgccaggccggacatccagatgacacagagccctagcagcctgtctgccagcgtgggagacagagtgaccatcacctgtagagccagccaggatgtgtctacagccgtggcctggtatcagcagaagcctggaaaggcccctaagctgctgatctacagcgccagctttctgtactccggcgtgcccagcagattcagcggaagcagaagcggcaccgacttcaccctgacaatatccagcctccagcctgaggacttcgccacctactactgccagcagtacctgtaccagccttggacattcggccagggcaccaaggtggaaatcaagagactcgaggccgacgtgtcccccaagcctaccatcttcctgccctctatcgccgagacaaagctccagaaggccggcacctacctgtgcctgctggaaaagttcttcccagatgtgattaagatccactggcaggaaaagaagtccaacaccatcctgggcagccaggaaggcaacaccatgaagaccaacgacacctacatgaagttcagctggctgaccgtgcccgagaagtccctggacaaagaacacagatgcatcgtgcggcacgaaaacaacaagaacggcgtggaccaggaaatcatcttcccacccatcaagaccgatgtgattacaatggaccccaaggacaactgctccaaggacgccaacgataccctgctgctccagctgaccaacaccagcgcctactacatgtacttgttgctgctgctgaagtccgtggtgtacttcgccatcatcacatgctgcctgctgcggagaaccgccttctgctgcaacggcgagaagtctagggccaagcgatctggatctggagcaacaaacttctcactactcaaacaagcaggtgacgtggaggagaatcccgggcctactagtatggactggatttggcgcatccttttccttgtcggcgctgctaccggcgcgcattccttcgaagaagttcagctggttgagtctggcggaggactggttcaacctggcggaagcctgagactgtcttgtgccgccagcggcttcaacatcgactactacggaatgcactgggtccgacaggcccctggcaaaggacttgaatgggtcgcctctctgtacggcggcagcgatagcacagattacgccgactctgtgaagggcagattcaccatcagcgccgacaccagcaagaacaccgcctacctccagatgaactccctgagagccgaagataccgccgtgtactactgctccagacagtacagcgcctacttcgactattggggccagggaaccctggtcaccgttagctctacgcgtagccagcctcacaccaagcccagcgtgttcgtgatgaagaacggcaccaacgtggcctgcctcgtgaaagagttctaccccaaggacatcaggatcaacctggtgtccagcaagaagatcaccgagttcgaccccgccatcgtgatctcccccagcggcaagtacaacgccgtgaagctggggaagtatgaggacagcaacagcgtgacctgctccgtgcagcacgacaacaagaccgtgcacagcaccgactttgaagtgaaaaccgactccaccgaccacgtgaagcccaaagagacagagaacaccaagcagcccagcaagagctgccacaagcccaaggccatcgtgcacaccgagaaagtgaacatgatgagcctgaccgtgatcggcttcagaatcctgctgctgaaagtggccggctttaacctgctgatgaccctgcggctgtggtccagctaa

SEQ ID NO: 39559 - DNA, 1866 bp, synthetic construct
  source 1..1866: mol_type = other DNA
atggccttaccagtgaccgccttgctcctgccgctggccttgctgctccacgccgccaggccggacatccagatgacacagagccctagcagcctgtctgccagcgtgggagacagagtgaccatcacctgtagagccagccaggatgtgtctacagccgtggcctggtatcagcagaagcctggaaaggcccctaagctgctgatctacagcgccagctttctgtactccggcgtgcccagcagattcagcggaagcagaagcggcaccgacttcaccctgacaatatccagcctccagcctgaggacttcgccacctactactgccagcagtacctgtaccagccttggacattcggccagggcaccaaggtggaaatcaagagactcgaggccgacgtgtcccccaagcctaccatcttcctgccctctatcgccgagacaaagctccagaaggccggcacctacctgtgcctgctggaaaagttcttcccagatgtgattaagatccactggcaggaaaagaagtccaacaccatcctgggcagccaggaaggcaacaccatgaagaccaacgacacctacatgaagttcagctggctgaccgtgcccgagaagtccctggacaaagaacacagatgcatcgtgcggcacgaaaacaacaagaacggcgtggaccaggaaatcatcttcccacccatcaagaccgatgtgattacaatggaccccaaggacaactgctccaaggacgccaacgataccctgctgctccagctgaccaacaccagcgcctactacatgtacttgttgctgctgctgaagtccgtggtgtacttcgccatcatcacatgctgcctgctgcggagaaccgccttctgctgcaacggcgagaagtctagggccaagcgatctggatctggagcaacaaacttctcactactcaaacaagcaggtgacgtggaggagaatcccgggcctactagtatggactggatttggcgcatccttttccttgtcggcgctgctaccggcgcgcattccttcgaagaagttcagctggttgagtctggcggaggactggttcaacctggcggaagcctgagactgtcttgtgccgccagcggcttcaacatcgactactacggaatgcactgggtccgacaggcccctggcaaaggacttgaatgggtcgcctctctgtacggcggcagcgatagcacagattacgccgactctgtgaagggcagattcaccatcagcgccgacaccagcaagaacaccgcctacctccagatgaactccctgagagccgaagataccgccgtgtactactgctccagacagtacagcgcctacttcgactattggggccagggaaccctggtcaccgttagctctacgcgtagccagcctcacaccaagcccagcgtgttcgtgatgaagaacggcaccaacgtggcctgcctcgtgaaagagttctaccccaaggacatcaggatcaacctggtgtccagcaagaagatcaccgagttcgaccccgccatcgtgatctcccccagcggcaagtacaacgccgtgaagctggggaagtacgaggacagcaacagcgtgacctgctccgtgcagcacgacaacaagaccgtgcacagcaccgactttgaagtgaaaaccgactccaccgaccacgtgaagcccaaagagacagagaacaccaagcagcccagcaagagctgccacaagcccaaggccatcgtgcacaccgagaaagtgaacatgatgagcctgaccgtgctgggcttcagaatcctgctgctgaaagtggccggctttaacctgctgatgaccctgcggctgtggtccagctaa

SEQ ID NO: 39560 - DNA, 1854 bp, synthetic construct; identical to SEQ ID NO: 39557
  source 1..1854: mol_type = other DNA

SEQ ID NO: 39561 - DNA, 1866 bp, synthetic construct
  source 1..1866: mol_type = other DNA
atggccttaccagtgaccgccttgctcctgccgctggccttgctgctccacgccgccaggccggacatccagatgacacagagccctagcagcctgtctgccagcgtgggagacagagtgaccatcacctgtagagccagccaggatgtgtctacagccgtggcctggtatcagcagaagcctggaaaggcccctaagctgctgatctacagcgccagctttctgtactccggcgtgcccagcagattcagcggaagcagaagcggcaccgacttcaccctgacaatatccagcctccagcctgaggacttcgccacctactactgccagcagtacctgtaccagccttggacattcggccagggcaccaaggtggaaatcaagagactcgagatccagaaccctgatcctgccgtgtaccagctgcgggatagcaagagcagcgacaagagcgtgtgtctgttcaccgacttcgacagccagaccaacgtgtcccagagcaaggactccgacgtgtacatcaccgataagtgcgtgctggacatgcggagcatggacttcaagagcaactccgccgtggcctggtccaacaagtccgatttcgcctgcgccaacgccttcaacaacagcattatccccgaggacacattcttcccaagccccgagagcagctgcggctttaccagcgagagctaccagcagggcgtgctgagcgccaccatcctgtacgagatcctgctgggcaaggccaccctgtacgccgtgctggtgtctgccctggtgctgatggctatggtcaagcggaaggacagccggggacgcgccaagagaagcggatctggcgtgaagcagaccctgaatttcgacctgctgaagctggctggcgacgtggaatccaacccaggccctactagtatggactggatttggcgcatccttttccttgtcggcgctgctaccggcgcgcattccttcgaagaagttcagctggttgagtctggcggaggactggttcaacctggcggaagcctgagactgtcttgtgccgccagcggcttcaacatcgactactacggaatgcactgggtccgacaggcccctggcaaaggacttgaatgggtcgcctctctgtacggcggcagcgatagcacagattacgccgactctgtgaagggcagattcaccatcagcgccgacaccagcaagaacaccgcctacctccagatgaactccctgagagccgaagataccgccgtgtactactgctccagacagtacagcgcctacttcgactattggggccagggaaccctggtcaccgttagctctacgcgtgaggacctgaagaacgtgttcccacctgaggtggccgtgttcgagcctagcgaggccgagatcagccacacccagaaagccaccctcgtgtgcctggctaccggcttctaccccgaccatgtggaactgtcttggtgggtcaacggcaaagaggtgcacagcggcgtgtgtaccgacccccagccactgaaagaacagcccgccctgaacgacagccggtactgcctgagcagcagactgagagtgtccgccaccttctggcagaacccccggaaccacttcagatgccaggtgcagttctacggcctgagcgagaacgacgagtggacccaggacagagccaagcccgtgacccagatcgtgtctgccgaagcctggggcagagccgattgcgacgtgaagctggtggaaaagagcttcgagacagacaccaacctgaacttccagaacctgagcgtgatcggcttcagaatcctgctgctgaaagtggccggctttaacctgctgatgaccctgcggctgtggtccagc

SEQ ID NO: 39562 - DNA, 2259 bp, synthetic construct
  source 1..2259: mol_type = other DNA
atggccttaccagtgaccgccttgctcctgccgctggccttgctgctccacgccgccaggccggaagtgcagctggttgaatctggcggaggactggttcagcctggcggatctctgagactgtcttgtgccgccagcggcttcagcttcagcgacttttggatgagctgggtccgacaggcccctggcaaaggacttgaatgggtcgccacaatcagccaggccggcagcgagaaggactacgtggactctgtgaagggcagattcaccatcagccgggacaacgccaagaagtccctgtacctccagatgaacagcctgagagccgaggacaccgccgtgtactattgtgcctctggcgtgtacagcttcgactacagaggccagggcaccctggtcacagtctcttctggtaccggcggaggcggatctggcggcggaggtagcggtggcggaggatctgaattcgacatccagatgacacagagccctagcagcctgtctgccagcgtgggagacagagtgaccatcacctgtagagccagccaggatgtgtctacagccgtggcctggtatcagcagaagcctggaaaggcccctaagctgctgatctacagcgccagctttctgtactccggcgtgcccagcagattcagcggaagcagaagcggcaccgacttcaccctgacaatatccagcctccagcctgaggacttcgccacctactactgccagcagtacctgtaccagccttggacattcggccagggcaccaaggtggaaatcaagagactcgaggacctgaagaacgtgttcccacctgaggtggccgtgttcgagcctagcgaggccgagatcagccacacccagaaagccaccctcgtgtgcctggctaccggcttctaccccgaccatgtggaactgtcttggtgggtcaacggcaaagaggtgcacagcggcgtgtgtaccgacccccagccactgaaagaacagcccgccctgaacgacagccggtactgcctgagcagcagactgagagtgtccgccaccttctggcagaacccccggaaccacttcagatgccaggtgcagttctacggcctgagcgagaacgacgagtggacccaggacagagccaagcccgtgacccagatcgtgtctgccgaagcctggggcagagccgattgcgacgtgaagctggtggaaaagagcttcgagacagacaccaacctgaacttccagaacctgagcgtgatcggcttcagaatcctgctgctgaaagtggccggctttaacctgctgatgaccctgcggctgtggtccagcagggccaagcgatctggatctggagcaacaaacttctcactactcaaacaagcaggtgacgtggaggagaatcccgggcctactagtatggactggatttggcgcatccttttccttgtcggcgctgctaccggcgcgcattccttcgaagaagttcagctggttgagtctggcggaggactggttcaacctggcggaagcctgagactgtcttgtgccgccagcggcttcaacatcgactactacggaatgcactgggtccgacaggcccctggcaaaggacttgaatgggtcgcctctctgtacggcggcagcgatagcacagattacgccgactctgtgaagggcagattcaccatcagcgccgacaccagcaagaacaccgcctacctccagatgaactccctgagagccgaagataccgccgtgtactactgctccagacagtacagcgcctacttcgactattggggccagggaaccctggtcaccgttagctctacgcgtatccagaaccctgatcctgccgtgtaccagctgcgggatagcaagagcagcgacaagagcgtgtgtctgttcaccgacttcgacagccagaccaacgtgtcccagagcaaggactccgacgtgtacatcaccgataagtgcgtgctggacatgcggagcatggacttcaagagcaactccgccgtggcctggtccaacaagtccgatttcgcctgcgccaacgccttcaacaacagcattatccccgaggacacattcttcccaagccccgagagcagctgcggctttaccagcgagagctaccagcagggcgtgctgagcgccaccatcctgtacgagatcctgctgggcaaggccaccctgtacgccgtgctggtgtctgccctggtgctgatggctatggtcaagcggaaggacagccgggga

SEQ ID NO: 39563 - DNA, 2271 bp, synthetic construct
  source 1..2271: mol_type = other DNA
atggccttaccagtgaccgccttgctcctgccgctggccttgctgctccacgccgccaggccggaagtgcagctggttgaatctggcggaggactggttcagcctggcggatctctgagactgtcttgtgccgccagcggcttcagcttcagcgacttttggatgagctgggtccgacaggcccctggcaaaggacttgaatgggtcgccacaatcagccaggccggcagcgagaaggactacgtggactctgtgaagggcagattcaccatcagccgggacaacgccaagaagtccctgtacctccagatgaacagcctgagagccgaggacaccgccgtgtactattgtgcctctggcgtgtacagcttcgactacagaggccagggcaccctggtcacagtctcttctggtaccggcggaggcggatctggcggcggaggtagcggtggcggaggatctgaattcgacatccagatgacacagagccctagcagcctgtctgccagcgtgggagacagagtgaccatcacctgtagagccagccaggatgtgtctacagccgtggcctggtatcagcagaagcctggaaaggcccctaagctgctgatctacagcgccagctttctgtactccggcgtgcccagcagattcagcggaagcagaagcggcaccgacttcaccctgacaatatccagcctccagcctgaggacttcgccacctactactgccagcagtacctgtaccagccttggacattcggccagggcaccaaggtggaaatcaagagactcgagatccagaaccctgatcctgccgtgtaccagctgcgggatagcaagagcagcgacaagagcgtgtgtctgttcaccgacttcgacagccagaccaacgtgtcccagagcaaggactccgacgtgtacatcaccgataagtgcgtgctggacatgcggagcatggacttcaagagcaactccgccgtggcctggtccaacaagtccgatttcgcctgcgccaacgccttcaacaacagcattatccccgaggacacattcttcccaagccccgagagcagctgcggctttaccagcgagagctaccagcagggcgtgctgagcgccaccatcctgtacgagatcctgctgggcaaggccaccctgtacgccgtgctggtgtctgccctggtgctgatggctatggtcaagcggaaggacagccggggacgcgccaagagaagcggatctggcgtgaagcagaccctgaatttcgacctgctgaagctggctggcgacgtggaatccaacccaggccctactagtatggactggatttggcgcatccttttccttgtcggcgctgctaccggcgcgcattccttcgaagaagttcagctggttgagtctggcggaggactggttcaacctggcggaagcctgagactgtcttgtgccgccagcggcttcaacatcgactactacggaatgcactgggtccgacaggcccctggcaaaggacttgaatgggtcgcctctctgtacggcggcagcgatagcacagattacgccgactctgtgaagggcagattcaccatcagcgccgacaccagcaagaacaccgcctacctccagatgaactccctgagagccgaagataccgccgtgtactactgctccagacagtacagcgcctacttcgactattggggccagggaaccctggtcaccgttagctctacgcgtgaggacctgaagaacgtgttcccacctgaggtggccgtgttcgagcctagcgaggccgagatcagccacacccagaaagccaccctcgtgtgcctggctaccggcttctaccccgaccatgtggaactgtcttggtgggtcaacggcaaagaggtgcacagcggcgtgtgtaccgacccccagccactgaaagaacagcccgccctgaacgacagccggtactgcctgagcagcagactgagagtgtccgccaccttctggcagaacccccggaaccacttcagatgccaggtgcagttctacggcctgagcgagaacgacgagtggacccaggacagagccaagcccgtgacccagatcgtgtctgccgaagcctggggcagagccgattgcgacgtgaagctggtggaaaagagcttcgagacagacaccaacctgaacttccagaacctgagcgtgatcggcttcagaatcctgctgctgaaagtggccggctttaacctgctgatgaccctgcggctgtggtccagc

SEQ ID NO: 39564 - DNA, 2670 bp, synthetic construct
  source 1..2670: mol_type = other DNA
atggccttaccagtgaccgccttgctcctgccgctggccttgctgctccacgccgccaggccggaagtgcagctggttgaatctggcggaggactggttcagcctggcggatctctgagactgtcttgtgccgccagcggcttcagcttcagcgacttttggatgagctgggtccgacaggcccctggcaaaggacttgaatgggtcgccacaatcagccaggccggcagcgagaaggactacgtggactctgtgaagggcagattcaccatcagccgggacaacgccaagaagtccctgtacctccagatgaacagcctgagagccgaggacaccgccgtgtactattgtgcctctggcgtgtacagcttcgactacagaggccagggcaccctggtcacagtctcttctggtaccggcggaggcggatctggcggcggaggtagcggtggcggaggatctgaattcgacatccagatgacacagagccctagcagcctgtctgccagcgtgggagacagagtgaccatcacctgtagagccagccaggatgtgtctacagccgtggcctggtatcagcagaagcctggaaaggcccctaagctgctgatctacagcgccagctttctgtactccggcgtgcccagcagattcagcggaagcagaagcggcaccgacttcaccctgacaatatccagcctccagcctgaggacttcgccacctactactgccagcagtacctgtaccagccttggacattcggccagggcaccaaggtggaaatcaagagactcgaggacctgaagaacgtgttcccacctgaggtggccgtgttcgagcctagcgaggccgagatcagccacacccagaaagccaccctcgtgtgcctggctaccggcttctaccccgaccatgtggaactgtcttggtgggtcaacggcaaagaggtgcacagcggcgtgtgtaccgacccccagccactgaaagaacagcccgccctgaacgacagccggtactgcctgagcagcagactgagagtgtccgccaccttctggcagaacccccggaaccacttcagatgccaggtgcagttctacggcctgagcgagaacgacgagtggacccaggacagagccaagcccgtgacccagatcgtgtctgccgaagcctggggcagagccgattgcgacgtgaagctggtggaaaagagcttcgagacagacaccaacctgaacttccagaacctgagcgtgatcggcttcagaatcctgctgctgaaagtggccggctttaacctgctgatgaccctgcggctgtggtccagcagggccaagcgatctggatctggagcaacaaacttctcactactcaaacaagcaggtgacgtggaggagaatcccgggcctactagtatggactggatttggcgcatccttttccttgtcggcgctgctaccggcgcgcattccgggccccagctccagctgcaagagtctggacctggcctggtcaagcctagcgagacactgagcctgacctgtaccgtgtccggcgatagcatcagcagcggcgattactactggggctggatcagacagcctcctggcaaaggactggaatggatcggccacatctactacagcggcgtgacctactacaaccccagcctgaagtccagagtgaccatcagcgtggacaccagccggaaccagttctccctgaagctgtctagcgtgacagccgccgataccgccgtgtactactgcaccagagaggacagcagcaactggcggagtagaggccagggaacactggtcacagttagctctggatccggcggaggcggaagtggaggcggaggatctggcggcggaggctctttcgaagaagttcagctggttgagtctggcggaggactggttcaacctggcggaagcctgagactgtcttgtgccgccagcggcttcaacatcgactactacggaatgcactgggtccgacaggcccctggcaaaggacttgaatgggtcgcctctctgtacggcggcagcgatagcacagattacgccgactctgtgaagggcagattcaccatcagcgccgacaccagcaagaacaccgcctacctccagatgaactccctgagagccgaagataccgccgtgtactactgctccagacagtacagcgcctacttcgactattggggccagggaaccctggtcaccgttagctctacgcgtatccagaaccctgatcctgccgtgtaccagctgcgggatagcaagagcagcgacaagagcgtgtgtctgttcaccgacttcgacagccagaccaacgtgtcccagagcaaggactccgacgtgtacatcaccgataagtgcgtgctggacatgcggagcatggacttcaagagcaactccgccgtggcctggtccaacaagtccgatttcgcctgcgccaacgccttcaacaacagcattatccccgaggacacattcttcccaagccccgagagcagctgcggctttaccagcgagagctaccagcagggcgtgctgagcgccaccatcctgtacgagatcctgctgggcaaggccaccctgtacgccgtgctggtgtctgccctggtgctgatggctatggtcaagcggaaggacagccgggga

SEQ ID NO: 39565 - DNA, 2682 bp, synthetic construct
  source 1..2682: mol_type = other DNA
atggccttaccagtgaccgccttgctcctgccgctggccttgctgctccacgccgccaggccggaagtgcagctggttgaatctggcggaggactggttcagcctggcggatctctgagactgtcttgtgccgccagcggcttcagcttcagcgacttttggatgagctgggtccgacaggcccctggcaaaggacttgaatgggtcgccacaatcagccaggccggcagcgagaaggactacgtggactctgtgaagggcagattcaccatcagccgggacaacgccaagaagtccctgtacctccagatgaacagcctgagagccgaggacaccgccgtgtactattgtgcctctggcgtgtacagcttcgactacagaggccagggcaccctggtcacagtctcttctggtaccggcggaggcggatctggcggcggaggtagcggtggcggaggatctgaattcgacatccagatgacacagagccctagcagcctgtctgccagcgtgggagacagagtgaccatcacctgtagagccagccaggatgtgtctacagccgtggcctggtatcagcagaagcctggaaaggcccctaagctgctgatctacagcgccagctttctgtactccggcgtgcccagcagattcagcggaagcagaagcggcaccgacttcaccctgacaatatccagcctccagcctgaggacttcgccacctactactgccagcagtacctgtaccagccttggacattcggccagggcaccaaggtggaaatcaagagactcgagatccagaaccctgatcctgccgtgtaccagctgcgggatagcaagagcagcgacaagagcgtgtgtctgttcaccgacttcgacagccagaccaacgtgtcccagagcaaggactccgacgtgtacatcaccgataagtgcgtgctggacatgcggagcatggacttcaagagcaactccgccgtggcctggtccaacaagtccgatttcgcctgcgccaacgccttcaacaacagcattatccccgaggacacattcttcccaagccccgagagcagctgcggctttaccagcgagagctaccagcagggcgtgctgagcgccaccatcctgtacgagatcctgctgggcaaggccaccctgtacgccgtgctggtgtctgccctggtgctgatggctatggtcaagcggaaggacagccggggacgcgccaagagaagcggatctggcgtgaagcagaccctgaatttcgacctgctgaagctggctggcgacgtggaatccaacccaggccctactagtatggactggatttggcgcatccttttccttgtcggcgctgctaccggcgcgcattccgggccccagctccagctgcaagagtctggacctggcctggtcaagcctagcgagacactgagcctgacctgtaccgtgtccggcgatagcatcagcagcggcgattactactggggctggatcagacagcctcctggcaaaggactggaatggatcggccacatctactacagcggcgtgacctactacaaccccagcctgaagtccagagtgaccatcagcgtggacaccagccggaaccagttctccctgaagctgtctagcgtgacagccgccgataccgccgtgtactactgcaccagagaggacagcagcaactggcggagtagaggccagggaacactggtcacagttagctctggatccggcggaggcggaagtggaggcggaggatctggcggcggaggctctttcgaagaagttcagctggttgagtctggcggaggactggttcaacctggcggaagcctgagactgtcttgtgccgccagcggcttcaacatcgactactacggaatgcactgggtccgacaggcccctggcaaaggacttgaatgggtcgcctctctgtacggcggcagcgatagcacagattacgccgactctgtgaagggcagattcaccatcagcgccgacaccagcaagaacaccgcctacctccagatgaactccctgagagccgaagataccgccgtgtactactgctccagacagtacagcgcctacttcgactattggggccagggaaccctggtcaccgttagctctacgcgtgaggacctgaagaacgtgttcccacctgaggtggccgtgttcgagcctagcgaggccgagatcagccacacccagaaagccaccctcgtgtgcctggctaccggcttctaccccgaccatgtggaactgtcttggtgggtcaacggcaaagaggtgcacagcggcgtgtgtaccgacccccagccactgaaagaacagcccgccctgaacgacagccggtactgcctgagcagcagactgagagtgtccgccaccttctggcagaacccccggaaccacttcagatgccaggtgcagttctacggcctgagcgagaacgacgagtggacccaggacagagccaagcccgtgacccagatcgtgtctgccgaagcctggggcagagccgattgcgacgtgaagctggtggaaaagagcttcgagacagacaccaacctgaacttccagaacctgagcgtgatcggcttcagaatcctgctgctgaaagtggccggctttaacctgctgatgaccctgcggctgtggtccagc

SEQ ID NO: 39566 - DNA, 2064 bp, synthetic construct
  source 1..2064: mol_type = other DNA
atggccttaccagtgaccgccttgctcctgccgctggccttgctgctccacgccgccaggccggacatccagatgacacagagccctagcagcctgtctgccagcgtgggagacagagtgaccatcacctgtagagccagccaggatgtgtctacagccgtggcctggtatcagcagaagcctggaaaggcccctaagctgctgatctacagcgccagctttctgtactccggcgtgcccagcagattcagcggaagcagaagcggcaccgacttcaccctgacaatatccagcctccagcctgaggacttcgccacctactactgccagcagtacctgtaccagccttggacattcggccagggcaccaaggtggaaatcaagagactcgaggacctgaagaacgtgttcccacctgaggtggccgtgttcgagcctagcgaggccgagatcagccacacccagaaagccaccctcgtgtgcctggctaccggcttctaccccgaccatgtggaactgtcttggtgggtcaacggcaaagaggtgcacagcggcgtgtgtaccgacccccagccactgaaagaacagcccgccctgaacgacagccggtactgcctgagcagcagactgagagtgtccgccaccttctggcagaacccccggaaccacttcagatgccaggtgcagttctacggcctgagcgagaacgacgagtggacccaggacagagccaagcccgtgacccagatcgtgtctgccgaagcctggggcagagccgattgcgacgtgaagctggtggaaaagagcttcgagacagacaccaacctgaacttccagaacctgagcgtgatcggcttcagaatcctgctgctgaaagtggccggctttaacctgctgatgaccctgcggctgtggtccagcagggccaagcgatctggatctggagcaacaaacttctcactactcaaacaagcaggtgacgtggaggagaatcccgggcctactagtatggactggatttggcgcatccttttccttgtcggcgctgctaccggcgcccattccgggcccatggaccccgacctggaaatcagagccgccttcctgcggcagagaaacacagccctgagaacagaggtggccgagctggaacaagaggtgcagcggctggaaaacgaggtgtcccagtacgagacaagatacggccctctcggaggcggaaaaggatccggcggcggaggatctggcggaggcggatctgggggcggaggctctttcgaagaagttcagctggttgagtctggcggaggactggttcaacctggcggaagcctgagactgtcttgtgccgccagcggcttcaacatcgactactacggaatgcactgggtccgacaggcccctggcaaaggacttgaatgggtcgcctctctgtacggcggcagcgatagcacagattacgccgactctgtgaagggcagattcaccatcagcgccgacaccagcaagaacaccgcctacctccagatgaactccctgagagccgaagataccgccgtgtactactgctccagacagtacagcgcctacttcgactattggggccagggaaccctggtcaccgttagctctacgcgtatccagaaccctgatcctgccgtgtaccagctgcgggatagcaagagcagcgacaagagcgtgtgtctgttcaccgacttcgacagccagaccaacgtgtcccagagcaaggactccgacgtgtacatcaccgataagtgcgtgctggacatgcggagcatggacttcaagagcaactccgccgtggcctggtccaacaagtccgatttcgcctgcgccaacgccttcaacaacagcattatccccgaggacacattcttcccaagccccgagagcagctgcggctttaccagcgagagctaccagcagggcgtgctgagcgccaccatcctgtacgagatcctgctgggcaaggccaccctgtacgccgtgctggtgtctgccctggtgctgatggctatggtcaagcggaaggacagccgggga

SEQ ID NO: 39567 - DNA, 2076 bp, synthetic construct
  source 1..2076: mol_type = other DNA
atggccttaccagtgaccgccttgctcctgccgctggccttgctgctccacgccgccaggccggacatccagatgacacagagccctagcagcctgtctgccagcgtgggagacagagtgaccatcacctgtagagccagccaggatgtgtctacagccgtggcctggtatcagcagaagcctggaaaggcccctaagctgctgatctacagcgccagctttctgtactccggcgtgcccagcagattcagcggaagcagaagcggcaccgacttcaccctgacaatatccagcctccagcctgaggacttcgccacctactactgccagcagtacctgtaccagccttggacattcggccagggcaccaaggtggaaatcaagagactcgagatccagaaccctgatcctgccgtgtaccagctgcgggatagcaagagcagcgacaagagcgtgtgtctgttcaccgacttcgacagccagaccaacgtgtcccagagcaaggactccgacgtgtacatcaccgataagtgcgtgctggacatgcggagcatggacttcaagagcaactccgccgtggcctggtccaacaagtccgatttcgcctgcgccaacgccttcaacaacagcattatccccgaggacacattcttcccaagccccgagagcagctgcggctttaccagcgagagctaccagcagggcgtgctgagcgccaccatcctgtacgagatcctgctgggcaaggccaccctgtacgccgtgctggtgtctgccctggtgctgatggctatggtcaagcggaaggacagccggggacgcgccaagagaagcggatctggcgtgaagcagaccctgaatttcgacctgctgaagctggctggcgacgtggaatccaacccaggccctactagtatggactggatttggcgcatccttttccttgtcggcgctgctaccggcgcccattccgggcccatggaccccgacctggaaatcagagccgccttcctgcggcagagaaacacagccctgagaacagaggtggccgagctggaacaagaggtgcagcggctggaaaacgaggtgtcccagtacgagacaagatacggccctctcggaggcggaaaaggatccggcggcggaggatctggcggaggcggatctgggggcggaggctctttcgaagaagttcagctggttgagtctggcggaggactggttcaacctggcggaagcctgagactgtcttgtgccgccagcggcttcaacatcgactactacggaatgcactgggtccgacaggcccctggcaaaggacttgaatgggtcgcctctctgtacggcggcagcgatagcacagattacgccgactctgtgaagggcagattcaccatcagcgccgacaccagcaagaacaccgcctacctccagatgaactccctgagagccgaagataccgccgtgtactactgctccagacagtacagcgcctacttcgactattggggccagggaaccctggtcaccgttagctctacgcgtgaggacctgaagaacgtgttcccacctgaggtggccgtgttcgagcctagcgaggccgagatcagccacacccagaaagccaccctcgtgtgcctggctaccggcttctaccccgaccatgtggaactgtcttggtgggtcaacggcaaagaggtgcacagcggcgtgtgtaccgacccccagccactgaaagaacagcccgccctgaacgacagccggtactgcctgagcagcagactgagagtgtccgccaccttctggcagaacccccggaaccacttcagatgccaggtgcagttctacggcctgagcgagaacgacgagtggacccaggacagagccaagcccgtgacccagatcgtgtctgccgaagcctggggcagagccgattgcgacgtgaagctggtggaaaagagcttcgagacagacaccaacctgaacttccagaacctgagcgtgatcggcttcagaatcctgctgctgaaagtggccggctttaacctgctgatgaccctgcggctgtggtccagc

SEQ ID NO: 39568 - DNA, 1995 bp, synthetic construct
  source 1..1995: mol_type = other DNA
atggccttaccagtgaccgccttgctcctgccgctggccttgctgctccacgccgccaggccggacatccagatgacacagagccctagcagcctgtctgccagcgtgggagacagagtgaccatcacctgtagagccagccaggatgtgtctacagccgtggcctggtatcagcagaagcctggaaaggcccctaagctgctgatctacagcgccagctttctgtactccggcgtgcccagcagattcagcggaagcagaagcggcaccgacttcaccctgacaatatccagcctccagcctgaggacttcgccacctactactgccagcagtacctgtaccagccttggacattcggccagggcaccaaggtggaaatcaagagactcgaggacctgaagaacgtgttcccacctgaggtggccgtgttcgagcctagcgaggccgagatcagccacacccagaaagccaccctcgtgtgcctggctaccggcttctaccccgaccatgtggaactgtcttggtgggtcaacggcaaagaggtgcacagcggcgtgtgtaccgacccccagccactgaaagaacagcccgccctgaacgacagccggtactgcctgagcagcagactgagagtgtccgccaccttctggcagaacccccggaaccacttcagatgccaggtgcagttctacggcctgagcgagaacgacgagtggacccaggacagagccaagcccgtgacccagatcgtgtctgccgaagcctggggcagagccgattgcgacgtgaagctggtggaaaagagcttcgagacagacaccaacctgaacttccagaacctgagcgtgatcggcttcagaatcctgctgctgaaagtggccggctttaacctgctgatgaccctgcggctgtggtccagcagggccaagcgatctggatctggagcaacaaacttctcactactcaaacaagcaggtgacgtggaggagaatcccgggcctactagtatggactggatttggcgcatccttttccttgtcggcgctgctaccggcgcccattccgggcccgaagttgctgccctcgagaaggaggtagcagctttggaaaaagaagtcgcagcccttgagaaagaagttgcggctctggagaagggatccggcggcggaggatctggcggaggcggatctgggggcggaggctctttcgaagaagttcagctggttgagtctggcggaggactggttcaacctggcggaagcctgagactgtcttgtgccgccagcggcttcaacatcgactactacggaatgcactgggtccgacaggcccctggcaaaggacttgaatgggtcgcctctctgtacggcggcagcgatagcacagattacgccgactctgtgaagggcagattcaccatcagcgccgacaccagcaagaacaccgcctacctccagatgaactccctgagagccgaagataccgccgtgtactactgctccagacagtacagcgcctacttcgactattggggccagggaaccctggtcaccgttagctctacgcgtatccagaaccctgatcctgccgtgtaccagctgcgggatagcaagagcagcgacaagagcgtgtgtctgttcaccgacttcgacagccagaccaacgtgtcccagagcaaggactccgacgtgtacatcaccgataagtgcgtgctggacatgcggagcatggacttcaagagcaactccgccgtggcctggtccaacaagtccgatttcgcctgcgccaacgccttcaacaacagcattatccccgaggacacattcttcccaagccccgagagcagctgcggctttaccagcgagagctaccagcagggcgtgctgagcgccaccatcctgtacgagatcctgctgggcaaggccaccctgtacgccgtgctggtgtctgccctggtgctgatggctatggtcaagcggaaggacagccgggga

SEQ ID NO: 39569 - DNA, 2007 bp, synthetic construct
  source 1..2007: mol_type = other DNA
atggccttaccagtgaccgccttgctcctgccgctggccttgctgctccacgccgccaggccggacatccagatgacacagagccctagcagcctgtctgccagcgtgggagacagagtgaccatcacctgtagagccagccaggatgtgtctacagccgtggcctggtatcagcagaagcctggaaaggcccctaagctgctgatctacagcgccagctttctgtactccggcgtgcccagcagattcagcggaagcagaagcggcaccgacttcaccctgacaatatccagcctccagcctgaggacttcgccacctactactgccagcagtacctgtaccagccttggacattcggccagggcaccaaggtggaaatcaagagactcgagatccagaaccctgatcctgccgtgtaccagctgcgggatagcaagagcagcgacaagagcgtgtgtctgttcaccgacttcgacagccagaccaacgtgtcccagagcaaggactccgacgtgtacatcaccgataagtgcgtgctggacatgcggagcatggacttcaagagcaactccgccgtggcctggtccaacaagtccgatttcgcctgcgccaacgccttcaacaacagcattatccccgaggacacattcttcccaagccccgagagcagctgcggctttaccagcgagagctaccagcagggcgtgctgagcgccaccatcctgtacgagatcctgctgggcaaggccaccctgtacgccgtgctggtgtctgccctggtgctgatggctatggtcaagcggaaggacagccggggacgcgccaagagaagcggatctggcgtgaagcagaccctgaatttcgacctgctgaagctggctggcgacgtggaatccaacccaggccctactagtatggactggatttggcgcatccttttccttgtcggcgctgctaccggcgcccattccgggcccgaagttgctgccctcgagaaggaggtagcagctttggaaaaagaagtcgcagcccttgagaaagaagttgcggctctggagaagggatccggcggcggaggatctggcggaggcggatctgggggcggaggctctttcgaagaagttcagctggttgagtctggcggaggactggttcaacctggcggaagcctgagactgtcttgtgccgccagcggcttcaacatcgactactacggaatgcactgggtccgacaggcccctggcaaaggacttgaatgggtcgcctctctgtacggcggcagcgatagcacagattacgccgactctgtgaagggcagattcaccatcagcgccgacaccagcaagaacaccgcctacctccagatgaactccctgagagccgaagataccgccgtgtactactgctccagacagtacagcgcctacttcgactattggggccagggaaccctggtcaccgttagctctacgcgtgaggacctgaagaacgtgttcccacctgaggtggccgtgttcgagcctagcgaggccgagatcagccacacccagaaagccaccctcgtgtgcctggctaccggcttctaccccgaccatgtggaactgtcttggtgggtcaacggcaaagaggtgcacagcggcgtgtgtaccgacccccagccactgaaagaacagcccgccctgaacgacagccggtactgcctgagcagcagactgagagtgtccgccaccttctggcagaacccccggaaccacttcagatgccaggtgcagttctacggcctgagcgagaacgacgagtggacccaggacagagccaagcccgtgacccagatcgtgtctgccgaagcctggggcagagccgattgcgacgtgaagctggtggaaaagagcttcgagacagacaccaacctgaacttccagaacctgagcgtgatcggcttcagaatcctgctgctgaaagtggccggctttaacctgctgatgaccctgcggctgtggtccagc

SEQ ID NO: 39570 - DNA, 2265 bp, synthetic construct
  source 1..2265: mol_type = other DNA
atggccttaccagtgaccgccttgctcctgccgctggccttgctgctccacgccgccaggccggacatccagatgacacagagccctagcagcctgtctgccagcgtgggagacagagtgaccatcacctgtagagccagccaggatgtgtctacagccgtggcctggtatcagcagaagcctggaaaggcccctaagctgctgatctacagcgccagctttctgtactccggcgtgcccagcagattcagcggaagcagaagcggcaccgacttcaccctgacaatatccagcctccagcctgaggacttcgccacctactactgccagcagtacctgtaccagccttggacattcggccagggcaccaaggtggaaatcaagagactcgaggacctgaagaacgtgttcccacctgaggtggccgtgttcgagcctagcgaggccgagatcagccacacccagaaagccaccctcgtgtgcctggctaccggcttctaccccgaccatgtggaactgtcttggtgggtcaacggcaaagaggtgcacagcggcgtgtgtaccgacccccagccactgaaagaacagcccgccctgaacgacagccggtactgcctgagcagcagactgagagtgtccgccaccttctggcagaacccccggaaccacttcagatgccaggtgcagttctacggcctgagcgagaacgacgagtggacccaggacagagccaagcccgtgacccagatcgtgtctgccgaagcctggggcagagccgattgcgacgtgaagctggtggaaaagagcttcgagacagacaccaacctgaacttccagaacctgagcgtgatcggcttcagaatcctgctgctgaaagtggccggctttaacctgctgatgaccctgcggctgtggtccagcagggccaagcgatctggatctggagcaacaaacttctcactactcaaacaagcaggtgacgtggaggagaatcccgggcctactagtatggactggatttggcgcatccttttccttgtcggcgctgctaccggcgcccattccgggccccaggttcagctgcaagagtctggcggaggacttgctcaagctggcggaagcctgagactgtcttgtgccgcctctggcagaaccttcagcatgggctggtttagacaggcccctggcaaagagagagagttcgtcgccgccatcacatacagcggcggcagcccttactacgcctcttctgtcagaggccggttcaccatcagccgggacaacgccaagaacaccgtgtacctccagatgaacagcctgaagccagaggacaccgccgtgtactactgtgccgccaatccaacctacggcagcgactggaatgccgagaattggggccagggcacccaagtgacagtgtctagtggatccggcggcggaggatctggcggaggcggatctgggggcggaggctctttcgaagaagttcagctggttgagtctggcggaggactggttcaacctggcggaagcctgagactgtcttgtgccgccagcggcttcaacatcgactactacggaatgcactgggtccgacaggcccctggcaaaggacttgaatgggtcgcctctctgtacggcggcagcgatagcacagattacgccgactctgtgaagggcagattcaccatcagcgccgacaccagcaagaacaccgcctacctccagatgaactccctgagagccgaagataccgccgtgtactactgctccagacagtacagcgcctacttcgactattggggccagggaaccctggtcaccgttagctctacgcgtatccagaaccctgatcctgccgtgtaccagctgcgggatagcaagagcagcgacaagagcgtgtgtctgttcaccgacttcgacagccagaccaacgtgtcccagagcaaggactccgacgtgtacatcaccgataagtgcgtgctggacatgcggagcatggacttcaagagcaactccgccgtggcctggtccaacaagtccgatttcgcctgcgccaacgccttcaacaacagcattatccccgaggacacattcttcccaagccccgagagcagctgcggctttaccagcgagagctaccagcagggcgtgctgagcgccaccatcctgtacgagatcctgctgggcaaggccaccctgtacgccgtgctggtgtctgccctggtgctgatggctatggtcaagcggaaggacagccgggga

SEQ ID NO: 39571 - DNA, 2277 bp, synthetic construct
  source 1..2277: mol_type = other DNA
atggccttaccagtgaccgccttgctcctgccgctggccttgctgctccacgccgccaggccggacatccagatgacacagagccctagcagcctgtctgccagcgtgggagacagagtgaccatcacctgtagagccagccaggatgtgtctacagccgtggcctggtatcagcagaagcctggaaaggcccctaagctgctgatctacagcgccagctttctgtactccggcgtgcccagcagattcagcggaagcagaagcggcaccgacttcaccctgacaatatccagcctccagcctgaggacttcgccacctactactgccagcagtacctgtaccagccttggacattcggccagggcaccaaggtggaaatcaagagactcgagatccagaaccctgatcctgccgtgtaccagctgcgggatagcaagagcagcgacaagagcgtgtgtctgttcaccgacttcgacagccagaccaacgtgtcccagagcaaggactccgacgtgtacatcaccgataagtgcgtgctggacatgcggagcatggacttcaagagcaactccgccgtggcctggtccaacaagtccgatttcgcctgcgccaacgccttcaacaacagcattatccccgaggacacattcttcccaagccccgagagcagctgcggctttaccagcgagagctaccagcagggcgtgctgagcgccaccatcctgtacgagatcctgctgggcaaggccaccctgtacgccgtgctggtgtctgccctggtgctgatggctatggtcaagcggaaggacagccggggacgcgccaagagaagcggatctggcgtgaagcagaccctgaatttcgacctgctgaagctggctggcgacgtggaatccaacccaggccctactagtatggactggatttggcgcatccttttccttgtcggcgctgctaccggcgcccattccgggccccaggttcagctgcaagagtctggcggaggacttgctcaagctggcggaagcctgagactgtcttgtgccgcctctggcagaaccttcagcatgggctggtttagacaggcccctggcaaagagagagagttcgtcgccgccatcacatacagcggcggcagcccttactacgcctcttctgtcagaggccggttcaccatcagccgggacaacgccaagaacaccgtgtacctccagatgaacagcctgaagccagaggacaccgccgtgtactactgtgccgccaatccaacctacggcagcgactggaatgccgagaattggggccagggcacccaagtgacagtgtctagtggatccggcggcggaggatctggcggaggcggatctgggggcggaggctctttcgaagaagttcagctggttgagtctggcggaggactggttcaacctggcggaagcctgagactgtcttgtgccgccagcggcttcaacatcgactactacggaatgcactgggtccgacaggcccctggcaaaggacttgaatgggtcgcctctctgtacggcggcagcgatagcacagattacgccgactctgtgaagggcagattcaccatcagcgccgacaccagcaagaacaccgcctacctccagatgaactccctgagagccgaagataccgccgtgtactactgctccagacagtacagcgcctacttcgactattggggccagggaaccctggtcaccgttagctctacgcgtgaggacctgaagaacgtgttcccacctgaggtggccgtgttcgagcctagcgaggccgagatcagccacacccagaaagccaccctcgtgtgcctggctaccggcttctaccccgaccatgtggaactgtcttggtgggtcaacggcaaagaggtgcacagcggcgtgtgtaccgacccccagccactgaaagaacagcccgccctgaacgacagccggtactgcctgagcagcagactgagagtgtccgccaccttctggcagaacccccggaaccacttcagatgccaggtgcagttctacggcctgagcgagaacgacgagtggacccaggacagagccaagcccgtgacccagatcgtgtctgccgaagcctggggcagagccgattgcgacgtgaagctggtggaaaagagcttcgagacagacaccaacctgaacttccagaacctgagcgtgatcggcttcagaatcctgctgctgaaagtggccggctttaacctgctgatgaccctgcggctgtggtccagc

SEQ ID NO: 39572 - DNA, 2283 bp, synthetic construct
  source 1..2283: mol_type = other DNA
atggccttaccagtgaccgccttgctcctgccgctggccttgctgctccacgccgccaggccggaagtgcaactggtggaatctggaggctctctggtgcagccagggggaagcctgagactgtcttgtgccgcttccggcttcaccttcgacgactacgccatgagctgggtgcgccaggtgccaggcaaaggcctggaatgggtgtccagcatcaactggagcggcacccacaccgattacgccgactccgtgaaaggcagattcacaatcagcagaaacaacgccaacaataccctgtacctgcagatgaactccctgaagtctgaggatacagcagtgtattattgcgccaagaactggcgggacgccggcaccacttggtttgagaaaagcggctctgccggacagggaacccaagtgacagtgtcctccggtaccggcggaggcggatctggcggcggaggtagcggtggcggaggatctgaattcgacatccagatgacacagagccctagcagcctgtctgccagcgtgggagacagagtgaccatcacctgtagagccagccaggatgtgtctacagccgtggcctggtatcagcagaagcctggaaaggcccctaagctgctgatctacagcgccagctttctgtactccggcgtgcccagcagattcagcggaagcagaagcggcaccgacttcaccctgacaatatccagcctccagcctgaggacttcgccacctactactgccagcagtacctgtaccagccttggacattcggccagggcaccaaggtggaaatcaagagactcgaggacctgaagaacgtgttcccacctgaggtggccgtgttcgagcctagcgaggccgagatcagccacacccagaaagccaccctcgtgtgcctggctaccggcttctaccccgaccatgtggaactgtcttggtgggtcaacggcaaagaggtgcacagcggcgtgtgtaccgacccccagccactgaaagaacagcccgccctgaacgacagccggtactgcctgagcagcagactgagagtgtccgccaccttctggcagaacccccggaaccacttcagatgccaggtgcagttctacggcctgagcgagaacgacgagtggacccaggacagagccaagcccgtgacccagatcgtgtctgccgaagcctggggcagagccgattgcgacgtgaagctggtggaaaagagcttcgagacagacaccaacctgaacttccagaacctgagcgtgatcggcttcagaatcctgctgctgaaagtggccggctttaacctgctgatgaccctgcggctgtggtccagcagggccaagcgatctggatctggagcaacaaacttctcactactcaaacaagcaggtgacgtggaggagaatcccgggcctactagtatggactggatttggcgcatccttttccttgtcggcgctgctaccggcgcgcattccttcgaagaagttcagctggttgagtctggcggaggactggttcaacctggcggaagcctgagactgtcttgtgccgccagcggcttcaacatcgactactacggaatgcactgggtccgacaggcccctggcaaaggacttgaatgggtcgcctctctgtacggcggcagcgatagcacagattacgccgactctgtgaagggcagattcaccatcagcgccgacaccagcaagaacaccgcctacctccagatgaactccctgagagccgaagataccgccgtgtactactgctccagacagtacagcgcctacttcgactattggggccagggaaccctggtcaccgttagctctacgcgtatccagaaccctgatcctgccgtgtaccagctgcgggatagcaagagcagcgacaagagcgtgtgtctgttcaccgacttcgacagccagaccaacgtgtcccagagcaaggactccgacgtgtacatcaccgataagtgcgtgctggacatgcggagcatggacttcaagagcaactccgccgtggcctggtccaacaagtccgatttcgcctgcgccaacgccttcaacaacagcattatccccgaggacacattcttcccaagccccgagagcagctgcggctttaccagcgagagctaccagcagggcgtgctgagcgccaccatcctgtacgagatcctgctgggcaaggccaccctgtacgccgtgctggtgtctgccctggtgctgatggctatggtcaagcggaaggacagccgggga

SEQ ID NO: 39573 - DNA, 2295 bp, synthetic construct
  source 1..2295: mol_type = other DNA
atggccttaccagtgaccgccttgctcctgccgctggccttgctgctccacgccgccaggccggaagtgcaactggtggaatctggaggctctctggtgcagccagggggaagcctgagactgtcttgtgccgcttccggcttcaccttcgacgactacgccatgagctgggtgcgccaggtgccaggcaaaggcctggaatgggtgtccagcatcaactggagcggcacccacaccgattacgccgactccgtgaaaggcagattcacaatcagcagaaacaacgccaacaataccctgtacctgcagatgaactccctgaagtctgaggatacagcagtgtattattgcgccaagaactggcgggacgccggcaccacttggtttgagaaaagcggctctgccggacagggaacccaagtgacagtgtcctccggtaccggcggaggcggatctggcggcggaggtagcggtggcggaggatctgaattcgacatccagatgacacagagccctagcagcctgtctgccagcgtgggagacagagtgaccatcacctgtagagccagccaggatgtgtctacagccgtggcctggtatcagcagaagcctggaaaggcccctaagctgctgatctacagcgccagctttctgtactccggcgtgcccagcagattcagcggaagcagaagcggcaccgacttcaccctgacaatatccagcctccagcctgaggacttcgccacctactactgccagcagtacctgtaccagccttggacattcggccagggcaccaaggtggaaatcaagagactcgagatccagaaccctgatcctgccgtgtaccagctgcgggatagcaagagcagcgacaagagcgtgtgtctgttcaccgacttcgacagccagaccaacgtgtcccagagcaaggactccgacgtgtacatcaccgataagtgcgtgctggacatgcggagcatggacttcaagagcaactccgccgtggcctggtccaacaagtccgatttcgcctgcgccaacgccttcaacaacagcattatccccgaggacacattcttcccaagccccgagagcagctgcggctttaccagcgagagctaccagcagggcgtgctgagcgccaccatcctgtacgagatcctgctgggcaaggccaccctgtacgccgtgctggtgtctgccctggtgctgatggctatggtcaagcggaaggacagccggggacgcgccaagagaagcggatctggcgtgaagcagaccctgaatttcgacctgctgaagctggctggcgacgtggaatccaacccaggccctactagtatggactggatttggcgcatccttttccttgtcggcgctgctaccggcgcgcattccttcgaagaagttcagctggttgagtctggcggaggactggttcaacctggcggaagcctgagactgtcttgtgccgccagcggcttcaacatcgactactacggaatgcactgggtccgacaggcccctggcaaaggacttgaatgggtcgcctctctgtacggcggcagcgatagcacagattacgccgactctgtgaagggcagattcaccatcagcgccgacaccagcaagaacaccgcctacctccagatgaactccctgagagccgaagataccgccgtgtactactgctccagacagtacagcgcctacttcgactattggggccagggaaccctggtcaccgttagctctacgcgtgaggacctgaagaacgtgttcccacctgaggtggccgtgttcgagcctagcgaggccgagatcagccacacccagaaagccaccctcgtgtgcctggctaccggcttctaccccgaccatgtggaactgtcttggtgggtcaacggcaaagaggtgcacagcggcgtgtgtaccgacccccagccactgaaagaacagcccgccctgaacgacagccggtactgcctgagcagcagactgagagtgtccgccaccttctggcagaacccccggaaccacttcagatgccaggtgcagttctacggcctgagcgagaacgacgagtggacccaggacagagccaagcccgtgacccagatcgtgtctgccgaagcctggggcagagccgattgcgacgtgaagctggtggaaaagagcttcgagacagacaccaacctgaacttccagaacctgagcgtgatcggcttcagaatcctgctgctgaaagtggccggctttaacctgctgatgaccctgcggctgtggtccagc

SEQ ID NO: 39574 - DNA, 2277 bp, synthetic construct
  source 1..2277: mol_type = other DNA
atggccttaccagtgaccgccttgctcctgccgctggccttgctgctccacgccgccaggccggaagttcagctgcttgagtctggcggaggactggttcaacctggcggaagcctgagactgtcttgtgccgccagcggcttcatcttcagcagctacgccatgagctgggtccgacaggctcctggaaagggccaagaatgggtttccggcgttagcggcacaggcgtgaacacctactacgccgatagcgtgaagggcagattcaccatcagccgggacaacagcaagaacaccctgtacctccagatgaacagcctgagagccgaggacaccgccgtgtactattgtgcctctggcaaaggctgggacagcggctcttggtacgaggactatagaggccagggcaccctggtcacagtttcttcaggtaccggcggaggcggatctggcggcggaggtagcggtggcggaggatctgaattcgacatccagatgacacagagccctagcagcctgtctgccagcgtgggagacagagtgaccatcacctgtagagccagccaggatgtgtctacagccgtggcctggtatcagcagaagcctggaaaggcccctaagctgctgatctacagcgccagctttctgtactccggcgtgcccagcagattcagcggaagcagaagcggcaccgacttcaccctgacaatatccagcctccagcctgaggacttcgccacctactactgccagcagtacctgtaccagccttggacattcggccagggcaccaaggtggaaatcaagagactcgaggacctgaagaacgtgttcccacctgaggtggccgtgttcgagcctagcgaggccgagatcagccacacccagaaagccaccctcgtgtgcctggctaccggcttctaccccgaccatgtggaactgtcttggtgggtcaacggcaaagaggtgcacagcggcgtgtgtaccgacccccagccactgaaagaacagcccgccctgaacgacagccggtactgcctgagcagcagactgagagtgtccgccaccttctggcagaacccccggaaccacttcagatgccaggtgcagttctacggcctgagcgagaacgacgagtggacccaggacagagccaagcccgtgacccagatcgtgtctgccgaagcctggggcagagccgattgcgacgtgaagctggtggaaaagagcttcgagacagacaccaacctgaacttccagaacctgagcgtgatcggcttcagaatcctgctgctgaaagtggccggctttaacctgctgatgaccctgcggctgtggtccagcagggccaagcgatctggatctggagcaacaaacttctcactactcaaacaagcaggtgacgtggaggagaatcccgggcctactagtatggactggatttggcgcatccttttccttgtcggcgctgctaccggcgcgcattccttcgaagaagttcagctggttgagtctggcggaggactggttcaacctggcggaagcctgagactgtcttgtgccgccagcggcttcaacatcgactactacggaatgcactgggtccgacaggcccctggcaaaggacttgaatgggtcgcctctctgtacggcggcagcgatagcacagattacgccgactctgtgaagggcagattcaccatcagcgccgacaccagcaagaacaccgcctacctccagatgaactccctgagagccgaagataccgccgtgtactactgctccagacagtacagcgcctacttcgactattggggccagggaaccctggtcaccgttagctctacgcgtatccagaaccctgatcctgccgtgtaccagctgcgggatagcaagagcagcgacaagagcgtgtgtctgttcaccgacttcgacagccagaccaacgtgtcccagagcaaggactccgacgtgtacatcaccgataagtgcgtgctggacatgcggagcatggacttcaagagcaactccgccgtggcctggtccaacaagtccgatttcgcctgcgccaacgccttcaacaacagcattatccccgaggacacattcttcccaagccccgagagcagctgcggctttaccagcgagagctaccagcagggcgtgctgagcgccaccatcctgtacgagatcctgctgggcaaggccaccctgtacgccgtgctggtgtctgccctggtgctgatggctatggtcaagcggaaggacagccgggga

SEQ ID NO: 39575 - DNA, 2289 bp, synthetic construct
  source 1..2289: mol_type = other DNA
atggccttaccagtgaccgccttgctcctgccgctggccttgctgctccacgccgccaggccggaagttcagctgcttgagtctggcggaggactggttcaacctggcggaagcctgagactgtcttgtgccgccagcggcttcatcttcagcagctacgccatgagctgggtccgacaggctcctggaaagggccaagaatgggtttccggcgttagcggcacaggcgtgaacacctactacgccgatagcgtgaagggcagattcaccatcagccgggacaacagcaagaacaccctgtacctccagatgaacagcctgagagccgaggacaccgccgtgtactattgtgcctctggcaaaggctgggacagcggctcttggtacgaggactatagaggccagggcaccctggtcacagtttcttcaggtaccggcggaggcggatctggcggcggaggtagcggtggcggaggatctgaattcgacatccagatgacacagagccctagcagcctgtctgccagcgtgggagacagagtgaccatcacctgtagagccagccaggatgtgtctacagccgtggcctggtatcagcagaagcctggaaaggcccctaagctgctgatctacagcgccagctttctgtactccggcgtgcccagcagattcagcggaagcagaagcggcaccgacttcaccctgacaatatccagcctccagcctgaggacttcgccacctactactgccagcagtacctgtaccagccttggacattcggccagggcaccaaggtggaaatcaagagactcgagatccagaaccctgatcctgccgtgtaccagctgcgggatagcaagagcagcgacaagagcgtgtgtctgttcaccgacttcgacagccagaccaacgtgtcccagagcaaggactccgacgtgtacatcaccgataagtgcgtgctggacatgcggagcatggacttcaagagcaactccgccgtggcctggtccaacaagtccgatttcgcctgcgccaacgccttcaacaacagcattatccccgaggacacattcttcccaagccccgagagcagctgcggctttaccagcgagagctaccagcagggcgtgctgagcgccaccatcctgtacgagatcctgctgggcaaggccaccctgtacgccgtgctggtgtctgccctggtgctgatggctatggtcaagcggaaggacagccggggacgcgccaagagaagcggatctggcgtgaagcagaccctgaatttcgacctgctgaagctggctggcgacgtggaatccaacccaggccctactagtatggactggatttggcgcatccttttccttgtcggcgctgctaccggcgcgcattccttcgaagaagttcagctggttgagtctggcggaggactggttcaacctggcggaagcctgagactgtcttgtgccgccagcggcttcaacatcgactactacggaatgcactgggtccgacaggcccctggcaaaggacttgaatgggtcgcctctctgtacggcggcagcgatagcacagattacgccgactctgtgaagggcagattcaccatcagcgccgacaccagcaagaacaccgcctacctccagatgaactccctgagagccgaagataccgccgtgtactactgctccagacagtacagcgcctacttcgactattggggccagggaaccctggtcaccgttagctctacgcgtgaggacctgaagaacgtgttcccacctgaggtggccgtgttcgagcctagcgaggccgagatcagccacacccagaaagccaccctcgtgtgcctggctaccggcttctaccccgaccatgtggaactgtcttggtgggtcaacggcaaagaggtgcacagcggcgtgtgtaccgacccccagccactgaaagaacagcccgccctgaacgacagccggtactgcctgagcagcagactgagagtgtccgccaccttctggcagaacccccggaaccacttcagatgccaggtgcagttctacggcctgagcgagaacgacgagtggacccaggacagagccaagcccgtgacccagatcgtgtctgccgaagcctggggcagagccgattgcgacgtgaagctggtggaaaagagcttcgagacagacaccaacctgaacttccagaacctgagcgtgatcggcttcagaatcctgctgctgaaagtggccggctttaacctgctgatgaccctgcggctgtggtccagc

SEQ ID NO: 39576 - DNA, 2181 bp, synthetic construct
  source 1..2181: mol_type = other DNA
atggccttaccagtgaccgccttgctcctgccgctggccttgctgctccacgccgccaggccgatgctgcccgctcctaagaatctggtggtgtccagaatcaccgaggacagcgccagactgtcttggacagctcctgatgccgccttcgacagcttccccatccggtacatcgagacactgatctggggcgaagccatctggctggatgtgcctggaagcgagagaagctacgacctgaccggactgaagcctggcacagagtatgccgtggtcatcaccggcgtgaaaggcggcagattctctagccctctggtggcctctttcaccaccggtaccggcggaggcggatctggcggcggaggtagcggtggcggaggatctgaattcgacatccagatgacacagagccctagcagcctgtctgccagcgtgggagacagagtgaccatcacctgtagagccagccaggatgtgtctacagccgtggcctggtatcagcagaagcctggaaaggcccctaagctgctgatctacagcgccagctttctgtactccggcgtgcccagcagattcagcggaagcagaagcggcaccgacttcaccctgacaatatccagcctccagcctgaggacttcgccacctactactgccagcagtacctgtaccagccttggacattcggccagggcaccaaggtggaaatcaagagactcgaggacctgaagaacgtgttcccacctgaggtggccgtgttcgagcctagcgaggccgagatcagccacacccagaaagccaccctcgtgtgcctggctaccggcttctaccccgaccatgtggaactgtcttggtgggtcaacggcaaagaggtgcacagcggcgtgtgtaccgacccccagccactgaaagaacagcccgccctgaacgacagccggtactgcctgagcagcagactgagagtgtccgccaccttctggcagaacccccggaaccacttcagatgccaggtgcagttctacggcctgagcgagaacgacgagtggacccaggacagagccaagcccgtgacccagatcgtgtctgccgaagcctggggcagagccgattgcgacgtgaagctggtggaaaagagcttcgagacagacaccaacctgaacttccagaacctgagcgtgatcggcttcagaatcctgctgctgaaagtggccggctttaacctgctgatgaccctgcggctgtggtccagcagggccaagcgatctggatctggagcaacaaacttctcactactcaaacaagcaggtgacgtggaggagaatcccgggcctactagtatggactggatttggcgcatccttttccttgtcggcgctgctaccggcgcgcattccttcgaagaagttcagctggttgagtctggcggaggactggttcaacctggcggaagcctgagactgtcttgtgccgccagcggcttcaacatcgactactacggaatgcactgggtccgacaggcccctggcaaaggacttgaatgggtcgcctctctgtacggcggcagcgatagcacagattacgccgactctgtgaagggcagattcaccatcagcgccgacaccagcaagaacaccgcctacctccagatgaactccctgagagccgaagataccgccgtgtactactgctccagacagtacagcgcctacttcgactattggggccagggaaccctggtcaccgttagctctacgcgtatccagaaccctgatcctgccgtgtaccagctgcgggatagcaagagcagcgacaagagcgtgtgtctgttcaccgacttcgacagccagaccaacgtgtcccagagcaaggactccgacgtgtacatcaccgataagtgcgtgctggacatgcggagcatggacttcaagagcaactccgccgtggcctggtccaacaagtccgatttcgcctgcgccaacgccttcaacaacagcattatccccgaggacacattcttcccaagccccgagagcagctgcggctttaccagcgagagctaccagcagggcgtgctgagcgccaccatcctgtacgagatcctgctgggcaaggccaccctgtacgccgtgctggtgtctgccctggtgctgatggctatggtcaagcggaaggacagccgggga

SEQ ID NO: 39577 - DNA, 2193 bp, synthetic construct
  source 1..2193: mol_type = other DNA
atggccttaccagtgaccgccttgctcctgccgctggccttgctgctccacgccgccaggccgatgctgcccgctcctaagaatctggtggtgtccagaatcaccgaggacagcgccagactgtcttggacagctcctgatgccgccttcgacagcttccccatccggtacatcgagacactgatctggggcgaagccatctggctggatgtgcctggaagcgagagaagctacgacctgaccggactgaagcctggcacagagtatgccgtggtcatcaccggcgtgaaaggcggcagattctctagccctctggtggcctctttcaccaccggtaccggcggaggcggatctggcggcggaggtagcggtggcggaggatctgaattcgacatccagatgacacagagccctagcagcctgtctgccagcgtgggagacagagtgaccatcacctgtagagccagccaggatgtgtctacagccgtggcctggtatcagcagaagcctggaaaggcccctaagctgctgatctacagcgccagctttctgtactccggcgtgcccagcagattcagcggaagcagaagcggcaccgacttcaccctgacaatatccagcctccagcctgaggacttcgccacctactactgccagcagtacctgtaccagccttggacattcggccagggcaccaaggtggaaatcaagagactcgagatccagaaccctgatcctgccgtgtaccagctgcgggatagcaagagcagcgacaagagcgtgtgtctgttcaccgacttcgacagccagaccaacgtgtcccagagcaaggactccgacgtgtacatcaccgataagtgcgtgctggacatgcggagcatggacttcaagagcaactccgccgtggcctggtccaacaagtccgatttcgcctgcgccaacgccttcaacaacagcattatccccgaggacacattcttcccaagccccgagagcagctgcggctttaccagcgagagctaccagcagggcgtgctgagcgccaccatcctgtacgagatcctgctgggcaaggccaccctgtacgccgtgctggtgtctgccctggtgctgatggctatggtcaagcggaaggacagccggggacgcgccaagagaagcggatctggcgtgaagcagaccctgaatttcgacctgctgaagctggctggcgacgtggaatccaacccaggccctactagtatggactggatttggcgcatccttttccttgtcggcgctgctaccggcgcgcattccttcgaagaagttcagctggttgagtctggcggaggactggttcaacctggcggaagcctgagactgtcttgtgccgccagcggcttcaacatcgactactacggaatgcactgggtccgacaggcccctggcaaaggacttgaatgggtcgcctctctgtacggcggcagcgatagcacagattacgccgactctgtgaagggcagattcaccatcagcgccgacaccagcaagaacaccgcctacctccagatgaactccctgagagccgaagataccgccgtgtactactgctccagacagtacagcgcctacttcgactattggggccagggaaccctggtcaccgttagctctacgcgtgaggacctgaagaacgtgttcccacctgaggtggccgtgttcgagcctagcgaggccgagatcagccacacccagaaagccaccctcgtgtgcctggctaccggcttctaccccgaccatgtggaactgtcttggtgggtcaacggcaaagaggtgcacagcggcgtgtgtaccgacccccagccactgaaagaacagcccgccctgaacgacagccggtactgcctgagcagcagactgagagtgtccgccaccttctggcagaacccccggaaccacttcagatgccaggtgcagttctacggcctgagcgagaacgacgagtggacccaggacagagccaagcccgtgacccagatcgtgtctgccgaagcctggggcagagccgattgcgacgtgaagctggtggaaaagagcttcgagacagacaccaacctgaacttccagaacctgagcgtgatcggcttcagaatcctgctgctgaaagtggccggctttaacctgctgatgaccctgcggctgtggtccagc

SEQ ID NO: 39578 - DNA, 2268 bp, synthetic construct
  source 1..2268: mol_type = other DNA
atggccttaccagtgaccgccttgctcctgccgctggccttgctgctccacgccgccaggccggaggtgcagctggttgaatctggcggaggactggttcagcctggcggatctctgagactgtcttgtgccgccagcggcttcaacatcaaggatacctgtatcggctgggttcgcagagcccctggcaaagaggaagaactggtcgccaaaatctgcaagtacagcggccacaccagatacgccgacagcgtgaagggcagattcaccatcagcgccgacaccagcaagaacaccgcctacctccagatgaacagcctgagagccgaggacaccgccgtgtactattgtgccgctgtgtccgtcagagatgggcactacaattactggggccagggcaccaccgtgaccgtttcttcaggtaccggcggaggcggatctggcggcggaggtagcggtggcggaggatctgaattcgacatccagatgacacagagccctagcagcctgtctgccagcgtgggagacagagtgaccatcacctgtagagccagccaggatgtgtctacagccgtggcctggtatcagcagaagcctggaaaggcccctaagctgctgatctacagcgccagctttctgtactccggcgtgcccagcagattcagcggaagcagaagcggcaccgacttcaccctgacaatatccagcctccagcctgaggacttcgccacctactactgccagcagtacctgtaccagccttggacattcggccagggcaccaaggtggaaatcaagagactcgaggacctgaagaacgtgttcccacctgaggtggccgtgttcgagcctagcgaggccgagatcagccacacccagaaagccaccctcgtgtgcctggctaccggcttctaccccgaccatgtggaactgtcttggtgggtcaacggcaaagaggtgcacagcggcgtgtgtaccgacccccagccactgaaagaacagcccgccctgaacgacagccggtactgcctgagcagcagactgagagtgtccgccaccttctggcagaacccccggaaccacttcagatgccaggtgcagttctacggcctgagcgagaacgacgagtggacccaggacagagccaagcccgtgacccagatcgtgtctgccgaagcctggggcagagccgattgcgacgtgaagctggtggaaaagagcttcgagacagacaccaacctgaacttccagaacctgagcgtgatcggcttcagaatcctgctgctgaaagtggccggctttaacctgctgatgaccctgcggctgtggtccagcagggccaagcgatctggatctggagcaacaaacttctcactactcaaacaagcaggtgacgtggaggagaatcccgggcctactagtatggactggatttggcgcatccttttccttgtcggcgctgctaccggcgcgcattccttcgaagaagttcagctggttgagtctggcggaggactggttcaacctggcggaagcctgagactgtcttgtgccgccagcggcttcaacatcgactactacggaatgcactgggtccgacaggcccctggcaaaggacttgaatgggtcgcctctctgtacggcggcagcgatagcacagattacgccgactctgtgaagggcagattcaccatcagcgccgacaccagcaagaacaccgcctacctccagatgaactccctgagagccgaagataccgccgtgtactactgctccagacagtacagcgcctacttcgactattggggccagggaaccctggtcaccgttagctctacgcgtatccagaaccctgatcctgccgtgtaccagctgcgggatagcaagagcagcgacaagagcgtgtgtctgttcaccgacttcgacagccagaccaacgtgtcccagagcaaggactccgacgtgtacatcaccgataagtgcgtgctggacatgcggagcatggacttcaagagcaactccgccgtggcctggtccaacaagtccgatttcgcctgcgccaacgccttcaacaacagcattatccccgaggacacattcttcccaagccccgagagcagctgcggctttaccagcgagagctaccagcagggcgtgctgagcgccaccatcctgtacgagatcctgctgggcaaggccaccctgtacgccgtgctggtgtctgccctggtgctgatggctatggtcaagcggaaggacagccgggga

SEQ ID NO: 39579 - DNA, 2280 bp, synthetic construct
  source 1..2280: mol_type = other DNA
atggccttaccagtgaccgccttgctcctgccgctggccttgctgctccacgccgccaggccggaggtgcagctggttgaatctggcggaggactggttcagcctggcggatctctgagactgtcttgtgccgccagcggcttcaacatcaaggatacctgtatcggctgggttcgcagagcccctggcaaagaggaagaactggtcgccaaaatctgcaagtacagcggccacaccagatacgccgacagcgtgaagggcagattcaccatcagcgccgacaccagcaagaacaccgcctacctccagatgaacagcctgagagccgaggacaccgccgtgtactattgtgccgctgtgtccgtcagagatgggcactacaattactggggccagggcaccaccgtgaccgtttcttcaggtaccggcggaggcggatctggcggcggaggtagcggtggcggaggatctgaattcgacatccagatgacacagagccctagcagcctgtctgccagcgtgggagacagagtgaccatcacctgtagagccagccaggatgtgtctacagccgtggcctggtatcagcagaagcctggaaaggcccctaagctgctgatctacagcgccagctttctgtactccggcgtgcccagcagattcagcggaagcagaagcggcaccgacttcaccctgacaatatccagcctccagcctgaggacttcgccacctactactgccagcagtacctgtaccagccttggacattcggccagggcaccaaggtggaaatcaagagactcgagatccagaaccctgatcctgccgtgtaccagctgcgggatagcaagagcagcgacaagagcgtgtgtctgttcaccgacttcgacagccagaccaacgtgtcccagagcaaggactccgacgtgtacatcaccgataagtgcgtgctggacatgcggagcatggacttcaagagcaactccgccgtggcctggtccaacaagtccgatttcgcctgcgccaacgccttcaacaacagcattatccccgaggacacattcttcccaagccccgagagcagctgcggctttaccagcgagagctaccagcagggcgtgctgagcgccaccatcctgtacgagatcctgctgggcaaggccaccctgtacgccgtgctggtgtctgccctggtgctgatggctatggtcaagcggaaggacagccggggacgcgccaagagaagcggatctggcgtgaagcagaccctgaatttcgacctgctgaagctggctggcgacgtggaatccaacccaggccctactagtatggactggatttggcgcatccttttccttgtcggcgctgctaccggcgcgcattccttcgaagaagttcagctggttgagtctggcggaggactggttcaacctggcggaagcctgagactgtcttgtgccgccagcggcttcaacatcgactactacggaatgcactgggtccgacaggcccctggcaaaggacttgaatgggtcgcctctctgtacggcggcagcgatagcacagattacgccgactctgtgaagggcagattcaccatcagcgccgacaccagcaagaacaccgcctacctccagatgaactccctgagagccgaagataccgccgtgtactactgctccagacagtacagcgcctacttcgactattggggccagggaaccctggtcaccgttagctctacgcgtgaggacctgaagaacgtgttcccacctgaggtggccgtgttcgagcctagcgaggccgagatcagccacacccagaaagccaccctcgtgtgcctggctaccggcttctaccccgaccatgtggaactgtcttggtgggtcaacggcaaagaggtgcacagcggcgtgtgtaccgacccccagccactgaaagaacagcccgccctgaacgacagccggtactgcctgagcagcagactgagagtgtccgccaccttctggcagaacccccggaaccacttcagatgccaggtgcagttctacggcctgagcgagaacgacgagtggacccaggacagagccaagcccgtgacccagatcgtgtctgccgaagcctggggcagagccgattgcgacgtgaagctggtggaaaagagcttcgagacagacaccaacctgaacttccagaacctgagcgtgatcggcttcagaatcctgctgctgaaagtggccggctttaacctgctgatgaccctgcggctgtggtccagc

SEQ ID NO: 39580 - DNA, 3384 bp, synthetic construct
  source 1..3384: mol_type = other DNA
atggccttaccagtgaccgccttgctcctgccgctggccttgctgctccacgccgccaggccggaagtgcagctggttgaatctggcggaggactggttcaggctggcggatctctgagactgtcttgtgccgccagcggcagaacctttagcatgggctggtttagacaggcccctggcaaagagagagagttcgtcgccgccatcacatactctggcggcagcccttactacgccgactctgtgaagggcagattcaccatcagccgggacaacgccaagaacaccgtgtacctccagatgaacagcctgaagcctgaggacaccgccgtgtactactgcgccgccaatccaacatacggcagcgactggaacgccgagaattggggccagggaacccaagtgacagtgtctagcggtaccggcggaggcggatctggcggcggaggtagcggtggcggaggatctgaattcgacatccagatgacacagagccctagcagcctgtctgccagcgtgggagacagagtgaccatcacctgtagagccagccaggatgtgtctacagccgtggcctggtatcagcagaagcctggaaaggcccctaagctgctgatctacagcgccagctttctgtactccggcgtgcccagcagattcagcggaagcagaagcggcaccgacttcaccctgacaatatccagcctccagcctgaggacttcgccacctactactgccagcagtacctgtaccagccttggacattcggccagggcaccaaggtggaaatcaagagactcgaggacctgaagaacgtgttcccacctgaggtggccgtgttcgagcctagcgaggccgagatcagccacacccagaaagccaccctcgtgtgcctggctaccggcttctaccccgaccatgtggaactgtcttggtgggtcaacggcaaagaggtgcacagcggcgtgtgtaccgacccccagccactgaaagaacagcccgccctgaacgacagccggtactgcctgagcagcagactgagagtgtccgccaccttctggcagaacccccggaaccacttcagatgccaggtgcagttctacggcctgagcgagaacgacgagtggacccaggacagagccaagcccgtgacccagatcgtgtctgccgaagcctggggcagagccgattgcgacgtgaagctggtggaaaagagcttcgagacagacaccaacctgaacttccagaacctgagcgtgatcggcttcagaatcctgctgctgaaagtggccggctttaacctgctgatgaccctgcggctgtggtccagcagggccaagcgatctggatctggagcaacaaacttctcactactcaaacaagcaggtgacgtggaggagaatcccgggcctactagtgccaccatggactggatttggcgcatccttttccttgtcggcgctgctaccggcgcccattccgggcccgaagtgcaactggttgaatccggtggcggcctggtgcaagcaggcggatctctcagacttagctgtgccgcctccggcagaaccttcacaatgggatggtttaggcaggctccagggaaagagagagagttcgtcgccgccatctctctgtctcccacactggcctactacgccgactctgtgaaaggccggttcaccatctccagagataatgccaagaacaccgtggtgctgcaaatgaactctctgaaacccgaggatacagccctgtactattgtgccgctgaccggaagtccgtgatgagcatcagacccgattactggggacagggcacacaagtcacagtgtcctctggatccggcggcggaggatctggcggaggcggatctgggggcggaggctctttcgaagaagttcagctggttgagtctggcggaggactggttcaacctggcggaagcctgagactgtcttgtgccgccagcggcttcaacatcgactactacggaatgcactgggtccgacaggcccctggcaaaggacttgaatgggtcgcctctctgtacggcggcagcgatagcacagattacgccgactctgtgaagggcagattcaccatcagcgccgacaccagcaagaacaccgcctacctccagatgaactccctgagagccgaagataccgccgtgtactactgctccagacagtacagcgcctacttcgactattggggccagggaaccctggtcaccgttagctctacgcgtatccagaaccctgatcctgccgtgtaccagctgcgggatagcaagagcagcgacaagagcgtgtgtctgttcaccgacttcgacagccagaccaacgtgtcccagagcaaggactccgacgtgtacatcaccgataagtgcgtgctggacatgcggagcatggacttcaagagcaactccgccgtggcctggtccaacaagtccgatttcgcctgcgccaacgccttcaacaacagcattatccccgaggacacattcttcccaagccccgagagcagctgcggctttaccagcgagagctaccagcagggcgtgctgagcgccaccatcctgtacgagatcctgctgggcaaggccaccctgtacgccgtgctggtgtctgccctggtgctgatggctatggtcaagcggaaggacagccggggacgcgccaagagaagcggatctggcgtgaagcagaccctgaatttcgacctgctgaagctggctggcgacgtggaatccaacccaggcccttctagaggccatatgaccgagtacaagcccacggtgcgcctcgccacccgcgacgacgtccccagggccgtacgcaccctcgccgccgcgttcgccgactaccccgccacgcgccacaccgtcgatccggaccgccacatcgagcgggtcaccgagctgcaagaactcttcctcacgcgcgtcgggctcgacatcggcaaggtgtgggtcgcggacgacggcgccgcggtggcggtctggaccacgccggagagcgtcgaagcgggggcggtgttcgccgagatcggcccgcgcatggccgagttgagcggttcccggctggccgcgcagcaacagatggaaggcctcctggcgccgcaccggcccaaggagcccgcgtggttcctggccaccgtcggcgtctcgcccgaccaccagggcaagggtctgggcagcgccgtcgtgctccccggagtggaggcggccgagcgcgccggggtgcccgccttcctggagacctccgcgccccgcaacctccccttctacgagcggctcggcttcaccgtcaccgccgacgtcgaggtgcccgaaggaccgcgcacctggtgcatgacccgcaagcccggtgcctga

SEQ ID NO: 39581 - DNA, 2298 bp, synthetic construct
  source 1..2298: mol_type = other DNA
atggccttaccagtgaccgccttgctcctgccgctggccttgctgctccacgccgccaggccggaagtgcagctggttgaatctggcggaggactggttcagcctggcggatctctgagactgtcttgtgccgcctctggcttcgccagcgactactatatcatcggctggttcagacaggcccctggcaaagagagagagggcgtcagctgtatcagcagcagatacgccaacaccaactacgccgacagcgtgaagggcagattcaccatcagccgggacaacgccaagaacaccgtgtacctccagatgaacagcctgaagcctgaggacaccgccgtgtactactgtgccgccgacaccagaagatacacctgtcctgacattgccaccatgcaccggaacttcgattcttggggccagggcacactggtcaccgtttcttctggtaccggcggaggcggatctggcggcggaggtagcggtggcggaggatctgaattcgacatccagatgacacagagccctagcagcctgtctgccagcgtgggagacagagtgaccatcacctgtagagccagccaggatgtgtctacagccgtggcctggtatcagcagaagcctggaaaggcccctaagctgctgatctacagcgccagctttctgtactccggcgtgcccagcagattcagcggaagcagaagcggcaccgacttcaccctgacaatatccagcctccagcctgaggacttcgccacctactactgccagcagtacctgtaccagccttggacattcggccagggcaccaaggtggaaatcaagagactcgaggacctgaagaacgtgttcccacctgaggtggccgtgttcgagcctagcgaggccgagatcagccacacccagaaagccaccctcgtgtgcctggctaccggcttctaccccgaccatgtggaactgtcttggtgggtcaacggcaaagaggtgcacagcggcgtgtgtaccgacccccagccactgaaagaacagcccgccctgaacgacagccggtactgcctgagcagcagactgagagtgtccgccaccttctggcagaacccccggaaccacttcagatgccaggtgcagttctacggcctgagcgagaacgacgagtggacccaggacagagccaagcccgtgacccagatcgtgtctgccgaagcctggggcagagccgattgcgacgtgaagctggtggaaaagagcttcgagacagacaccaacctgaacttccagaacctgagcgtgatcggcttcagaatcctgctgctgaaagtggccggctttaacctgctgatgaccctgcggctgtggtccagcagggccaagcgatctggatctggagcaacaaacttctcactactcaaacaagcaggtgacgtggaggagaatcccgggcctactagtatggactggatttggcgcatccttttccttgtcggcgctgctaccggcgcgcattccttcgaagaagttcagctggttgagtctggcggaggactggttcaacctggcggaagcctgagactgtcttgtgccgccagcggcttcaacatcgactactacggaatgcactgggtccgacaggcccctggcaaaggacttgaatgggtcgcctctctgtacggcggcagcgatagcacagattacgccgactctgtgaagggcagattcaccatcagcgccgacaccagcaagaacaccgcctacctccagatgaactccctgagagccgaagataccgccgtgtactactgctccagacagtacagcgcctacttcgactattggggccagggaaccctggtcaccgttagctctacgcgtatccagaaccctgatcctgccgtgtaccagctgcgggatagcaagagcagcgacaagagcgtgtgtctgttcaccgacttcgacagccagaccaacgtgtcccagagcaaggactccgacgtgtacatcaccgataagtgcgtgctggacatgcggagcatggacttcaagagcaactccgccgtggcctggtccaacaagtccgatttcgcctgcgccaacgccttcaacaacagcattatccccgaggacacattcttcccaagccccgagagcagctgcggctttaccagcgagagctaccagcagggcgtgctgagcgccaccatcctgtacgagatcctgctgggcaaggccaccctgtacgccgtgctggtgtctgccctggtgctgatggctatggtcaagcggaaggacagccggggataa

SEQ ID NO: 39582 - DNA, 2298 bp, synthetic construct
  source 1..2298: mol_type = other DNA
atggccttaccagtgaccgccttgctcctgccgctggccttgctgctccacgccgccaggccggaagtgcagctggttgaatctggcggaggactggttcagcctggcggatctctgagactgagctgtgaagccagcggcttcgccagcgacgattacatcatcggctggttcagacaggcccctggcaaagagagagagggcgtcagctgcatcagctctaagtacgccaacaccgtgtacaccgacagcgtgaagggcagattcagactgagcagaggcaccgccaagaataccgtgtacctccagatgagcgccctgaagcctgaggataccgccgtgtactactgcgctatggacagccgcagagtgacatgccctgagatcagcaccatgcaccggaacttcgattcttggggccagggcacactggtcacagtgtcatctggtaccggcggaggcggatctggcggcggaggtagcggtggcggaggatctgaattcgacatccagatgacacagagccctagcagcctgtctgccagcgtgggagacagagtgaccatcacctgtagagccagccaggatgtgtctacagccgtggcctggtatcagcagaagcctggaaaggcccctaagctgctgatctacagcgccagctttctgtactccggcgtgcccagcagattcagcggaagcagaagcggcaccgacttcaccctgacaatatccagcctccagcctgaggacttcgccacctactactgccagcagtacctgtaccagccttggacattcggccagggcaccaaggtggaaatcaagagactcgaggacctgaagaacgtgttcccacctgaggtggccgtgttcgagcctagcgaggccgagatcagccacacccagaaagccaccctcgtgtgcctggctaccggcttctaccccgaccatgtggaactgtcttggtgggtcaacggcaaagaggtgcacagcggcgtgtgtaccgacccccagccactgaaagaacagcccgccctgaacgacagccggtactgcctgagcagcagactgagagtgtccgccaccttctggcagaacccccggaaccacttcagatgccaggtgcagttctacggcctgagcgagaacgacgagtggacccaggacagagccaagcccgtgacccagatcgtgtctgccgaagcctggggcagagccgattgcgacgtgaagctggtggaaaagagcttcgagacagacaccaacctgaacttccagaacctgagcgtgatcggcttcagaatcctgctgctgaaagtggccggctttaacctgctgatgaccctgcggctgtggtccagcagggccaagcgatctggatctggagcaacaaacttctcactactcaaacaagcaggtgacgtggaggagaatcccgggcctactagtatggactggatttggcgcatccttttccttgtcggcgctgctaccggcgcgcattccttcgaagaagttcagctggttgagtctggcggaggactggttcaacctggcggaagcctgagactgtcttgtgccgccagcggcttcaacatcgactactacggaatgcactgggtccgacaggcccctggcaaaggacttgaatgggtcgcctctctgtacggcggcagcgatagcacagattacgccgactctgtgaagggcagattcaccatcagcgccgacaccagcaagaacaccgcctacctccagatgaactccctgagagccgaagataccgccgtgtactactgctccagacagtacagcgcctacttcgactattggggccagggaaccctggtcaccgttagctctacgcgtatccagaaccctgatcctgccgtgtaccagctgcgggatagcaagagcagcgacaagagcgtgtgtctgttcaccgacttcgacagccagaccaacgtgtcccagagcaaggactccgacgtgtacatcaccgataagtgcgtgctggacatgcggagcatggacttcaagagcaactccgccgtggcctggtccaacaagtccgatttcgcctgcgccaacgccttcaacaacagcattatccccgaggacacattcttcccaagccccgagagcagctgcggctttaccagcgagagctaccagcagggcgtgctgagcgccaccatcctgtacgagatcctgctgggcaaggccaccctgtacgccgtgctggtgtctgccctggtgctgatggctatggtcaagcggaaggacagccggggataa

SEQ ID NO: 39583 - DNA, 2295 bp, synthetic construct
  source 1..2295: mol_type = other DNA
atggccttaccagtgaccgccttgctcctgccgctggccttgctgctccacgccgccaggccggaagtgcagctggttgaatctggcggaggactggttcagcctggcggatctctgagactgtcttgtgccgcctctggcttcgccagcgactactatatcatcggctggttcagacaggcccctggcaaagagagagagggcgtcagctgtatcagcagcagatacgccaacaccaactacgccgacagcgtgaagggcagattcaccatcagccgggacaacgccaagaacaccgtgtacctccagatgaacagcctgaagcctgaggacaccgccgtgtactactgtgccgccgacaccagaagatacacctgtcctgacattgccaccatgcaccggaacttcgattcttggggccagggcacactggtcaccgtttcttctggtaccggcggaggcggatctggcggcggaggtagcggtggcggaggatctgaattcgacatccagatgacacagagccctagcagcctgtctgccagcgtgggagacagagtgaccatcacctgtagagccagccaggatgtgtctacagccgtggcctggtatcagcagaagcctggaaaggcccctaagctgctgatctacagcgccagctttctgtactccggcgtgcccagcagattcagcggaagcagaagcggcaccgacttcaccctgacaatatccagcctccagcctgaggacttcgccacctactactgccagcagtacctgtaccagccttggacattcggccagggcaccaaggtggaaatcaagagactcgagatccagaaccctgatcctgccgtgtaccagctgcgggatagcaagagcagcgacaagagcgtgtgtctgttcaccgacttcgacagccagaccaacgtgtcccagagcaaggactccgacgtgtacatcaccgataagtgcgtgctggacatgcggagcatggacttcaagagcaactccgccgtggcctggtccaacaagtccgatttcgcctgcgccaacgccttcaacaacagcattatccccgaggacacattcttcccaagccccgagagcagctgcggctttaccagcgagagctaccagcagggcgtgctgagcgccaccatcctgtacgagatcctgctgggcaaggccaccctgtacgccgtgctggtgtctgccctggtgctgatggctatggtcaagcggaaggacagccggggaagggccaagcgatctggatctggagcaacaaacttctcactactcaaacaagcaggtgacgtggaggagaatcccgggcctactagtatggactggatttggcgcatccttttccttgtcggcgctgctaccggcgcgcattccttcgaagaagttcagctggttgagtctggcggaggactggttcaacctggcggaagcctgagactgtcttgtgccgccagcggcttcaacatcgactactacggaatgcactgggtccgacaggcccctggcaaaggacttgaatgggtcgcctctctgtacggcggcagcgatagcacagattacgccgactctgtgaagggcagattcaccatcagcgccgacaccagcaagaacaccgcctacctccagatgaactccctgagagccgaagataccgccgtgtactactgctccagacagtacagcgcctacttcgactattggggccagggaaccctggtcaccgttagctctacgcgtgacctgaagaacgtgttcccacctgaggtggccgtgttcgagcctagcgaggccgagatcagccacacccagaaagccaccctcgtgtgcctggctaccggcttctaccccgaccatgtggaactgtcttggtgggtcaacggcaaagaggtgcacagcggcgtgtgtaccgacccccagccactgaaagaacagcccgccctgaacgacagccggtactgcctgagcagcagactgagagtgtccgccaccttctggcagaacccccggaaccacttcagatgccaggtgcagttctacggcctgagcgagaacgacgagtggacccaggacagagccaagcccgtgacccagatcgtgtctgccgaagcctggggcagagccgattgcgacgtgaagctggtggaaaagagcttcgagacagacaccaacctgaacttccagaacctgagcgtgatcggcttcagaatcctgctgctgaaagtggccggctttaacctgctgatgaccctgcggctgtggtccagc

SEQ ID NO: 39584 - DNA, 2295 bp, synthetic construct
  source 1..2295: mol_type = other DNA
atggccttaccagtgaccgccttgctcctgccgctggccttgctgctccacgccgccaggccggaagtgcagctggttgaatctggcggaggactggttcagcctggcggatctctgagactgagctgtgaagccagcggcttcgccagcgacgattacatcatcggctggttcagacaggcccctggcaaagagagagagggcgtcagctgcatcagctctaagtacgccaacaccgtgtacaccgacagcgtgaagggcagattcagactgagcagaggcaccgccaagaataccgtgtacctccagatgagcgccctgaagcctgaggataccgccgtgtactactgcgctatggacagccgcagagtgacatgccctgagatcagcaccatgcaccggaacttcgattcttggggccagggcacactggtcacagtgtcatctggtaccggcggaggcggatctggcggcggaggtagcggtggcggaggatctgaattcgacatccagatgacacagagccctagcagcctgtctgccagcgtgggagacagagtgaccatcacctgtagagccagccaggatgtgtctacagccgtggcctggtatcagcagaagcctggaaaggcccctaagctgctgatctacagcgccagctttctgtactccggcgtgcccagcagattcagcggaagcagaagcggcaccgacttcaccctgacaatatccagcctccagcctgaggacttcgccacctactactgccagcagtacctgtaccagccttggacattcggccagggcaccaaggtggaaatcaagagactcgagatccagaaccctgatcctgccgtgtaccagctgcgggatagcaagagcagcgacaagagcgtgtgtctgttcaccgacttcgacagccagaccaacgtgtcccagagcaaggactccgacgtgtacatcaccgataagtgcgtgctggacatgcggagcatggacttcaagagcaactccgccgtggcctggtccaacaagtccgatttcgcctgcgccaacgccttcaacaacagcattatccccgaggacacattcttcccaagccccgagagcagctgcggctttaccagcgagagctaccagcagggcgtgctgagcgccaccatcctgtacgagatcctgctgggcaaggccaccctgtacgccgtgctggtgtctgccctggtgctgatggctatggtcaagcggaaggacagccggggaagggccaagcgatctggatctggagcaacaaacttctcactactcaaacaagcaggtgacgtggaggagaatcccgggcctactagtatggactggatttggcgcatccttttccttgtcggcgctgctaccggcgcgcattccttcgaagaagttcagctggttgagtctggcggaggactggttcaacctggcggaagcctgagactgtcttgtgccgccagcggcttcaacatcgactactacggaatgcactgggtccgacaggcccctggcaaaggacttgaatgggtcgcctctctgtacggcggcagcgatagcacagattacgccgactctgtgaagggcagattcaccatcagcgccgacaccagcaagaacaccgcctacctccagatgaactccctgagagccgaagataccgccgtgtactactgctccagacagtacagcgcctacttcgactattggggccagggaaccctggtcaccgttagctctacgcgtgacctgaagaacgtgttcccacctgaggtggccgtgttcgagcctagcgaggccgagatcagccacacccagaaagccaccctcgtgtgcctggctaccggcttctaccccgaccatgtggaactgtcttggtgggtcaacggcaaagaggtgcacagcggcgtgtgtaccgacccccagccactgaaagaacagcccgccctgaacgacagccggtactgcctgagcagcagactgagagtgtccgccaccttctggcagaacccccggaaccacttcagatgccaggtgcagttctacggcctgagcgagaacgacgagtggacccaggacagagccaagcccgtgacccagatcgtgtctgccgaagcctggggcagagccgattgcgacgtgaagctggtggaaaagagcttcgagacagacaccaacctgaacttccagaacctgagcgtgatcggcttcagaatcctgctgctgaaagtggccggctttaacctgctgatgaccctgcggctgtggtccagc

SEQ ID NO: 39585 - DNA, 2268 bp, synthetic construct
  source 1..2268: mol_type = other DNA
atggccttaccagtgaccgccttgctcctgccgctggccttgctgctccacgccgccaggccgcaagtcaaactggaagaaagcggtggcggcctggtgcaacctggcgaatctctgagactgagctgtagcgccagcggctccatcttcaaggtgttcagagtgttcgccatgagctggtacaggcaaggccctggcaagcagagagagctggtcgcctctatcagcagcggcgagacaaccacatacgccgaatctgtgaaaggccggttcaccatcagccgggataatgccaagaataccgcctatctccagatggactccctgaagcctgaagatacagctgtgtactactgcaacgccgaccataccttcaccggcgatttttggggccagggaacccaagtgaccgtgtctagtggtaccggcggaggcggatctggcggcggaggtagcggtggcggaggatctgaattcgacatccagatgacacagagccctagcagcctgtctgccagcgtgggagacagagtgaccatcacctgtagagccagccaggatgtgtctacagccgtggcctggtatcagcagaagcctggaaaggcccctaagctgctgatctacagcgccagctttctgtactccggcgtgcccagcagattcagcggaagcagaagcggcaccgacttcaccctgacaatatccagcctccagcctgaggacttcgccacctactactgccagcagtacctgtaccagccttggacattcggccagggcaccaaggtggaaatcaagagactcgagatccagaaccctgatcctgccgtgtaccagctgcgggatagcaagagcagcgacaagagcgtgtgtctgttcaccgacttcgacagccagaccaacgtgtcccagagcaaggactccgacgtgtacatcaccgataagtgcgtgctggacatgcggagcatggacttcaagagcaactccgccgtggcctggtccaacaagtccgatttcgcctgcgccaacgccttcaacaacagcattatccccgaggacacattcttcccaagccccgagagcagctgcggctttaccagcgagagctaccagcagggcgtgctgagcgccaccatcctgtacgagatcctgctgggcaaggccaccctgtacgccgtgctggtgtctgccctggtgctgatggctatggtcaagcggaaggacagccggggaagggccaagcgatctggatctggagcaacaaacttctcactactcaaacaagcaggtgacgtggaggagaatcccgggcctactagtatggactggatttggcgcatccttttccttgtcggcgctgctaccggcgcgcattccttcgaagaagttcagctggttgagtctggcggaggactggttcaacctggcggaagcctgagactgtcttgtgccgccagcggcttcaacatcgactactacggaatgcactgggtccgacaggcccctggcaaaggacttgaatgggtcgcctctctgtacggcggcagcgatagcacagattacgccgactctgtgaagggcagattcaccatcagcgccgacaccagcaagaacaccgcctacctccagatgaactccctgagagccgaagataccgccgtgtactactgctccagacagtacagcgcctacttcgactattggggccagggaaccctggtcaccgttagctctacgcgtgacctgaagaacgtgttcccacctgaggtggccgtgttcgagcctagcgaggccgagatcagccacacccagaaagccaccctcgtgtgcctggctaccggcttctaccccgaccatgtggaactgtcttggtgggtcaacggcaaagaggtgcacagcggcgtgtgtaccgacccccagccactgaaagaacagcccgccctgaacgacagccggtactgcctgagcagcagactgagagtgtccgccaccttctggcagaacccccggaaccacttcagatgccaggtgcagttctacggcctgagcgagaacgacgagtggacccaggacagagccaagcccgtgacccagatcgtgtctgccgaagcctggggcagagccgattgcgacgtgaagctggtggaaaagagcttcgagacagacaccaacctgaacttccagaacctgagcgtgatcggcttcagaatcctgctgctgaaagtggccggctttaacctgctgatgaccctgcggctgtggtccagc

SEQ ID NO: 39586 - DNA, 2274 bp, synthetic construct
  source 1..2274: mol_type = other DNA
atggccttaccagtgaccgccttgctcctgccgctggccttgctgctccacgccgccaggccggacatccagatgacacagagccctagcagcctgtctgccagcgtgggagacagagtgaccatcacctgtagagccagccaggatgtgtctacagccgtggcctggtatcagcagaagcctggaaaggcccctaagctgctgatctacagcgccagctttctgtactccggcgtgcccagcagattcagcggaagcagaagcggcaccgacttcaccctgacaatatccagcctccagcctgaggacttcgccacctactactgccagcagtacctgtaccagccttggacattcggccagggcaccaaggtggaaatcaagagactcgaggacctgaagaacgtgttcccacctgaggtggccgtgttcgagcctagcgaggccgagatcagccacacccagaaagccaccctcgtgtgcctggctaccggcttctaccccgaccatgtggaactgtcttggtgggtcaacggcaaagaggtgcacagcggcgtgtgtaccgacccccagccactgaaagaacagcccgccctgaacgacagccggtactgcctgagcagcagactgagagtgtccgccaccttctggcagaacccccggaaccacttcagatgccaggtgcagttctacggcctgagcgagaacgacgagtggacccaggacagagccaagcccgtgacccagatcgtgtctgccgaagcctggggcagagccgattgcgacgtgaagctggtggaaaagagcttcgagacagacaccaacctgaacttccagaacctgagcgtgatcggcttcagaatcctgctgctgaaagtggccggctttaacctgctgatgaccctgcggctgtggtccagcagggccaagcgatctggatctggagcaacaaacttctcactactcaaacaagcaggtgacgtggaggagaatcccgggcctactagtgccaccatggactggatttggcgcatccttttccttgtcggcgctgctaccggcgcccattccgggcccgaagtgcagctggttgaatctggcggaggactggttcaggctggcggatctctgagactgtcttgtgccgccagcggcagaacctttagcatgggctggtttagacaggcccctggcaaagagagagagttcgtcgccgccatcacatactctggcggcagcccttactacgccgactctgtgaagggcagattcaccatcagccgggacaacgccaagaacaccgtgtacctccagatgaacagcctgaagcctgaggacaccgccgtgtactactgcgccgccaatccaacatacggcagcgactggaacgccgagaattggggccagggaacccaagtgacagtgtctagcggatccggcggcggaggatctggcggaggcggatctgggggcggaggctctttcgaagaagttcagctggttgagtctggcggaggactggttcaacctggcggaagcctgagactgtcttgtgccgccagcggcttcaacatcgactactacggaatgcactgggtccgacaggcccctggcaaaggacttgaatgggtcgcctctctgtacggcggcagcgatagcacagattacgccgactctgtgaagggcagattcaccatcagcgccgacaccagcaagaacaccgcctacctccagatgaactccctgagagccgaagataccgccgtgtactactgctccagacagtacagcgcctacttcgactattggggccagggaaccctggtcaccgttagctctacgcgtatccagaaccctgatcctgccgtgtaccagctgcgggatagcaagagcagcgacaagagcgtgtgtctgttcaccgacttcgacagccagaccaacgtgtcccagagcaaggactccgacgtgtacatcaccgataagtgcgtgctggacatgcggagcatggacttcaagagcaactccgccgtggcctggtccaacaagtccgatttcgcctgcgccaacgccttcaacaacagcattatccccgaggacacattcttcccaagccccgagagcagctgcggctttaccagcgagagctaccagcagggcgtgctgagcgccaccatcctgtacgagatcctgctgggcaaggccaccctgtacgccgtgctggtgtctgccctggtgctgatggctatggtcaagcggaaggacagccggggataa

SEQ ID NO: 39587 - DNA, 2277 bp, synthetic construct
  source 1..2277: mol_type = other DNA
atggccttaccagtgaccgccttgctcctgccgctggccttgctgctccacgccgccaggccggacatccagatgacacagagccctagcagcctgtctgccagcgtgggagacagagtgaccatcacctgtagagccagccaggatgtgtctacagccgtggcctggtatcagcagaagcctggaaaggcccctaagctgctgatctacagcgccagctttctgtactccggcgtgcccagcagattcagcggaagcagaagcggcaccgacttcaccctgacaatatccagcctccagcctgaggacttcgccacctactactgccagcagtacctgtaccagccttggacattcggccagggcaccaaggtggaaatcaagagactcgaggacctgaagaacgtgttcccacctgaggtggccgtgttcgagcctagcgaggccgagatcagccacacccagaaagccaccctcgtgtgcctggctaccggcttctaccccgaccatgtggaactgtcttggtgggtcaacggcaaagaggtgcacagcggcgtgtgtaccgacccccagccactgaaagaacagcccgccctgaacgacagccggtactgcctgagcagcagactgagagtgtccgccaccttctggcagaacccccggaaccacttcagatgccaggtgcagttctacggcctgagcgagaacgacgagtggacccaggacagagccaagcccgtgacccagatcgtgtctgccgaagcctggggcagagccgattgcgacgtgaagctggtggaaaagagcttcgagacagacaccaacctgaacttccagaacctgagcgtgatcggcttcagaatcctgctgctgaaagtggccggctttaacctgctgatgaccctgcggctgtggtccagcagggccaagcgatctggatctggagcaacaaacttctcactactcaaacaagcaggtgacgtggaggagaatcccgggcctactagtgccaccatggactggatttggcgcatccttttccttgtcggcgctgctaccggcgcccattccgggcccgaagtgcaactggtggaatctgggggcggactggtgcagccaggcggaagtctgaggctgtcttgtgccgcctccggcagcatcttcggcttcaacgacatggcctggtatcggcaggctcccggaaaacagcgcgagctggtggctctgattagcagagtgggcgtgaccagcagcgccgactctgtgaagggcagattcacaatctccagagtgaacgccaaggatacagtgtacctccagatgaactctctgaaacctgaggatacagcagtgtactattgctacatggaccagcggctggacggcagcacactggcctactggggacagggaactcaagtgacagtgtctagcggatccggcggcggaggatctggcggaggcggatctgggggcggaggctctttcgaagaagttcagctggttgagtctggcggaggactggttcaacctggcggaagcctgagactgtcttgtgccgccagcggcttcaacatcgactactacggaatgcactgggtccgacaggcccctggcaaaggacttgaatgggtcgcctctctgtacggcggcagcgatagcacagattacgccgactctgtgaagggcagattcaccatcagcgccgacaccagcaagaacaccgcctacctccagatgaactccctgagagccgaagataccgccgtgtactactgctccagacagtacagcgcctacttcgactattggggccagggaaccctggtcaccgttagctctacgcgtatccagaaccctgatcctgccgtgtaccagctgcgggatagcaagagcagcgacaagagcgtgtgtctgttcaccgacttcgacagccagaccaacgtgtcccagagcaaggactccgacgtgtacatcaccgataagtgcgtgctggacatgcggagcatggacttcaagagcaactccgccgtggcctggtccaacaagtccgatttcgcctgcgccaacgccttcaacaacagcattatccccgaggacacattcttcccaagccccgagagcagctgcggctttaccagcgagagctaccagcagggcgtgctgagcgccaccatcctgtacgagatcctgctgggcaaggccaccctgtacgccgtgctggtgtctgccctggtgctgatggctatggtcaagcggaaggacagccggggataa

SEQ ID NO: 39588 - DNA, 2265 bp, synthetic construct
  source 1..2265: mol_type = other DNA
atggccttaccagtgaccgccttgctcctgccgctggccttgctgctccacgccgccaggccggacatccagatgacacagagccctagcagcctgtctgccagcgtgggagacagagtgaccatcacctgtagagccagccaggatgtgtctacagccgtggcctggtatcagcagaagcctggaaaggcccctaagctgctgatctacagcgccagctttctgtactccggcgtgcccagcagattcagcggaagcagaagcggcaccgacttcaccctgacaatatccagcctccagcctgaggacttcgccacctactactgccagcagtacctgtaccagccttggacattcggccagggcaccaaggtggaaatcaagagactcgaggacctgaagaacgtgttcccacctgaggtggccgtgttcgagcctagcgaggccgagatcagccacacccagaaagccaccctcgtgtgcctggctaccggcttctaccccgaccatgtggaactgtcttggtgggtcaacggcaaagaggtgcacagcggcgtgtgtaccgacccccagccactgaaagaacagcccgccctgaacgacagccggtactgcctgagcagcagactgagagtgtccgccaccttctggcagaacccccggaaccacttcagatgccaggtgcagttctacggcctgagcgagaacgacgagtggacccaggacagagccaagcccgtgacccagatcgtgtctgccgaagcctggggcagagccgattgcgacgtgaagctggtggaaaagagcttcgagacagacaccaacctgaacttccagaacctgagcgtgatcggcttcagaatcctgctgctgaaagtggccggctttaacctgctgatgaccctgcggctgtggtccagcagggccaagcgatctggatctggagcaacaaacttctcactactcaaacaagcaggtgacgtggaggagaatcccgggcctactagtgccaccatggactggatttggcgcatccttttccttgtcggcgctgctaccggcgcccattccgggcccgaggtgcagctggttgaatctggcggaggactggttcaggctggcggatctctgagactgtcttgtgccgccagcggctctgtgttcagcggcaatgtgatgggctggtacagacaggcccctggcaaagaaagagagtgggttgccgccattgccagcggcggcagcatctactacagagactctgtgaagggcagattcaccatcagccgggacaacgccaagaacaccgtgtacctccagatgaacagcctgaagcctgaggacaccgccgtgtactactgcaactctcaccctcctacactgccctattggggcctgggaacccaagtgacagtgtcctctggatccggcggcggaggatctggcggaggcggatctgggggcggaggctctttcgaagaagttcagctggttgagtctggcggaggactggttcaacctggcggaagcctgagactgtcttgtgccgccagcggcttcaacatcgactactacggaatgcactgggtccgacaggcccctggcaaaggacttgaatgggtcgcctctctgtacggcggcagcgatagcacagattacgccgactctgtgaagggcagattcaccatcagcgccgacaccagcaagaacaccgcctacctccagatgaactccctgagagccgaagataccgccgtgtactactgctccagacagtacagcgcctacttcgactattggggccagggaaccctggtcaccgttagctctacgcgtatccagaaccctgatcctgccgtgtaccagctgcgggatagcaagagcagcgacaagagcgtgtgtctgttcaccgacttcgacagccagaccaacgtgtcccagagcaaggactccgacgtgtacatcaccgataagtgcgtgctggacatgcggagcatggacttcaagagcaactccgccgtggcctggtccaacaagtccgatttcgcctgcgccaacgccttcaacaacagcattatccccgaggacacattcttcccaagccccgagagcagctgcggctttaccagcgagagctaccagcagggcgtgctgagcgccaccatcctgtacgagatcctgctgggcaaggccaccctgtacgccgtgctggtgtctgccctggtgctgatggctatggtcaagcggaaggacagccggggataa

SEQ ID NO: 39589 - DNA, 2259 bp, synthetic construct
  source 1..2259: mol_type = other DNA
atggccttaccagtgaccgccttgctcctgccgctggccttgctgctccacgccgccaggccggacatccagatgacacagagccctagcagcctgtctgccagcgtgggagacagagtgaccatcacctgtagagccagccaggatgtgtctacagccgtggcctggtatcagcagaagcctggaaaggcccctaagctgctgatctacagcgccagctttctgtactccggcgtgcccagcagattcagcggaagcagaagcggcaccgacttcaccctgacaatatccagcctccagcctgaggacttcgccacctactactgccagcagtacctgtaccagccttggacattcggccagggcaccaaggtggaaatcaagagactcgaggacctgaagaacgtgttcccacctgaggtggccgtgttcgagcctagcgaggccgagatcagccacacccagaaagccaccctcgtgtgcctggctaccggcttctaccccgaccatgtggaactgtcttggtgggtcaacggcaaagaggtgcacagcggcgtgtgtaccgacccccagccactgaaagaacagcccgccctgaacgacagccggtactgcctgagcagcagactgagagtgtccgccaccttctggcagaacccccggaaccacttcagatgccaggtgcagttctacggcctgagcgagaacgacgagtggacccaggacagagccaagcccgtgacccagatcgtgtctgccgaagcctggggcagagccgattgcgacgtgaagctggtggaaaagagcttcgagacagacaccaacctgaacttccagaacctgagcgtgatcggcttcagaatcctgctgctgaaagtggccggctttaacctgctgatgaccctgcggctgtggtccagcagggccaagcgatctggatctggagcaacaaacttctcactactcaaacaagcaggtgacgtggaggagaatcccgggcctactagtgccaccatggactggatttggcgcatccttttccttgtcggcgctgctaccggcgcccattccgggcccgaagttcagctgctggaatctggcggaggactcgttcaacctggcggctctctgagactgagctgtgccgcttctggcttcagcttctctagctacgccctgagctgggttcgacaagctcccggaaagggccttgaatgggtgtccagcatcggcgagaatgacggcaccacagactatgccgatgccgtgaaaggccggtttaccatcagcagagacaattccaagaacacgctctatctgcaaatgaactccctgcgcgtggaagatacagccgtgtattattgcgtgaaggacggcatccactggggacagggaaccctggttacagtgtctagcggatccggcggcggaggatctggcggaggcggatctgggggcggaggctctttcgaagaagttcagctggttgagtctggcggaggactggttcaacctggcggaagcctgagactgtcttgtgccgccagcggcttcaacatcgactactacggaatgcactgggtccgacaggcccctggcaaaggacttgaatgggtcgcctctctgtacggcggcagcgatagcacagattacgccgactctgtgaagggcagattcaccatcagcgccgacaccagcaagaacaccgcctacctccagatgaactccctgagagccgaagataccgccgtgtactactgctccagacagtacagcgcctacttcgactattggggccagggaaccctggtcaccgttagctctacgcgtatccagaaccctgatcctgccgtgtaccagctgcgggatagcaagagcagcgacaagagcgtgtgtctgttcaccgacttcgacagccagaccaacgtgtcccagagcaaggactccgacgtgtacatcaccgataagtgcgtgctggacatgcggagcatggacttcaagagcaactccgccgtggcctggtccaacaagtccgatttcgcctgcgccaacgccttcaacaacagcattatccccgaggacacattcttcccaagccccgagagcagctgcggctttaccagcgagagctaccagcagggcgtgctgagcgccaccatcctgtacgagatcctgctgggcaaggccaccctgtacgccgtgctggtgtctgccctggtgctgatggctatggtcaagcggaaggacagccggggataa

SEQ ID NO: 39590 - DNA, 3366 bp, synthetic construct
  source 1..3366: mol_type = other DNA
atgggacccagactgctgttttgggctctgctgtgtctgctcggcacaggacctgttgaagctggcgtgacacagagccccacacacctgattaagaccagaggccagcaggccacactgagatgcagccctatcagcggccacaccagcgtgtactggtatcagcaggctctcggactgggcctccagttcctgctttggtacgacgagggcgaagagagaaaccggggcaacttccctcctcggttttccggcagacagttccccaactacagcagcgagctgaacgtgaacgccctggaactggaagatagcgccctgtacctgtgtgcctcttctcttggtggacctcgcggactggctggactgagaggggatgagcagtttttcggccctggcaccagactgaccgtgctggaaggtaccggcggaggcggatctggcggcggagaattcgacatccagatgacacagagccctagcagcctgtctgccagcgtgggagacagagtgaccatcacctgtagagccagccaggatgtgtctacagccgtggcctggtatcagcagaagcctggaaaggcccctaagctgctgatctacagcgccagctttctgtactccggcgtgcccagcagattcagcggaagcagaagcggcaccgacttcaccctgacaatatccagcctccagcctgaggacttcgccacctactactgccagcagtacctgtaccagccttggacattcggccagggcaccaaggtggaaatcaagagactcgaggacctgaagaacgtgttcccacctgaggtggccgtgttcgagcctagcgaggccgagatcagccacacccagaaagccaccctcgtgtgcctggctaccggcttctaccccgaccatgtggaactgtcttggtgggtcaacggcaaagaggtgcacagcggcgtgtgtaccgacccccagccactgaaagaacagcccgccctgaacgacagccggtactgcctgagcagcagactgagagtgtccgccaccttctggcagaacccccggaaccacttcagatgccaggtgcagttctacggcctgagcgagaacgacgagtggacccaggacagagccaagcccgtgacccagatcgtgtctgccgaagcctggggcagagccgattgcgacgtgaagctggtggaaaagagcttcgagacagacaccaacctgaacttccagaacctgagcgtgatcggcttcagaatcctgctgctgaaagtggccggctttaacctgctgatgaccctgcggctgtggtccagcagggccaagcgatctggatctggagcaacaaacttctcactactcaaacaagcaggtgacgtggaggagaatcccgggcctactagtgccaccatggactggatttggcgcatccttttccttgtcggcgctgctaccggcgcccattccgggcccgaagtgcagctggttgaatctggcggaggactggttcaggctggcggatctctgagactgtcttgtgccgccagcggcagaacctttagcatgggctggtttagacaggcccctggcaaagagagagagttcgtcgccgccatcacatactctggcggcagcccttactacgccgactctgtgaagggcagattcaccatcagccgggacaacgccaagaacaccgtgtacctccagatgaacagcctgaagcctgaggacaccgccgtgtactactgcgccgccaatccaacatacggcagcgactggaacgccgagaattggggccagggaacccaagtgacagtgtctagcggatccggcggcggaggatctggcggaggcggatctgggggcggaggctctttcgaagaagttcagctggttgagtctggcggaggactggttcaacctggcggaagcctgagactgtcttgtgccgccagcggcttcaacatcgactactacggaatgcactgggtccgacaggcccctggcaaaggacttgaatgggtcgcctctctgtacggcggcagcgatagcacagattacgccgactctgtgaagggcagattcaccatcagcgccgacaccagcaagaacaccgcctacctccagatgaactccctgagagccgaagataccgccgtgtactactgctccagacagtacagcgcctacttcgactattggggccagggaaccctggtcaccgttagctctacgcgtatccagaaccctgatcctgccgtgtaccagctgcgggatagcaagagcagcgacaagagcgtgtgtctgttcaccgacttcgacagccagaccaacgtgtcccagagcaaggactccgacgtgtacatcaccgataagtgcgtgctggacatgcggagcatggacttcaagagcaactccgccgtggcctggtccaacaagtccgatttcgcctgcgccaacgccttcaacaacagcattatccccgaggacacattcttcccaagccccgagagcagctgcggctttaccagcgagagctaccagcagggcgtgctgagcgccaccatcctgtacgagatcctgctgggcaaggccaccctgtacgccgtgctggtgtctgccctggtgctgatggctatggtcaagcggaaggacagccggggacgcgccaagagaagcggatctggcgtgaagcagaccctgaatttcgacctgctgaagctggctggcgacgtggaatccaacccaggcccttctagaggccatatgaccgagtacaagcccacggtgcgcctcgccacccgcgacgacgtccccagggccgtacgcaccctcgccgccgcgttcgccgactaccccgccacgcgccacaccgtcgatccggaccgccacatcgagcgggtcaccgagctgcaagaactcttcctcacgcgcgtcgggctcgacatcggcaaggtgtgggtcgcggacgacggcgccgcggtggcggtctggaccacgccggagagcgtcgaagcgggggcggtgttcgccgagatcggcccgcgcatggccgagttgagcggttcccggctggccgcgcagcaacagatggaaggcctcctggcgccgcaccggcccaaggagcccgcgtggttcctggccaccgtcggcgtctcgcccgaccaccagggcaagggtctgggcagcgccgtcgtgctccccggagtggaggcggccgagcgcgccggggtgcccgccttcctggagacctccgcgccccgcaacctccccttctacgagcggctcggcttcaccgtcaccgccgacgtcgaggtgcccgaaggaccgcgcacctggtgcatgacccgcaagcccggtgcctga

SEQ ID NO: 39591 - DNA, 3363 bp, synthetic construct
  source 1..3363: mol_type = other DNA
atgggacccagactgctgttttgggctctgctgtgtctgctcggcacaggacctgttgaagctggcgtgacacagagccccacacacctgattaagaccagaggccagcaggccacactgagatgcagccctatcagcggccacaccagcgtgtactggtatcagcaggctctcggactgggcctccagttcctgctttggtacgacgagggcgaagagagaaaccggggcaacttccctcctcggttttccggcagacagttccccaactacagcagcgagctgaacgtgaacgccctggaactggaagatagcgccctgtacctgtgtgccagctctctcggcggagatgaactgggagccgatggcaacgagcagttctttggccctggcaccagactgaccgtgctggaaggtaccggcggaggcggatctggcggcggaagcgaattcgacatccagatgacacagagccctagcagcctgtctgccagcgtgggagacagagtgaccatcacctgtagagccagccaggatgtgtctacagccgtggcctggtatcagcagaagcctggaaaggcccctaagctgctgatctacagcgccagctttctgtactccggcgtgcccagcagattcagcggaagcagaagcggcaccgacttcaccctgacaatatccagcctccagcctgaggacttcgccacctactactgccagcagtacctgtaccagccttggacattcggccagggcaccaaggtggaaatcaagagactcgaggacctgaagaacgtgttcccacctgaggtggccgtgttcgagcctagcgaggccgagatcagccacacccagaaagccaccctcgtgtgcctggctaccggcttctaccccgaccatgtggaactgtcttggtgggtcaacggcaaagaggtgcacagcggcgtgtgtaccgacccccagccactgaaagaacagcccgccctgaacgacagccggtactgcctgagcagcagactgagagtgtccgccaccttctggcagaacccccggaaccacttcagatgccaggtgcagttctacggcctgagcgagaacgacgagtggacccaggacagagccaagcccgtgacccagatcgtgtctgccgaagcctggggcagagccgattgcgacgtgaagctggtggaaaagagcttcgagacagacaccaacctgaacttccagaacctgagcgtgatcggcttcagaatcctgctgctgaaagtggccggctttaacctgctgatgaccctgcggctgtggtccagcagggccaagcgatctggatctggagcaacaaacttctcactactcaaacaagcaggtgacgtggaggagaatcccgggcctactagtgccaccatggactggatttggcgcatccttttccttgtcggcgctgctaccggcgcccattccgggcccgaagtgcagctggttgaatctggcggaggactggttcaggctggcggatctctgagactgtcttgtgccgccagcggcagaacctttagcatgggctggtttagacaggcccctggcaaagagagagagttcgtcgccgccatcacatactctggcggcagcccttactacgccgactctgtgaagggcagattcaccatcagccgggacaacgccaagaacaccgtgtacctccagatgaacagcctgaagcctgaggacaccgccgtgtactactgcgccgccaatccaacatacggcagcgactggaacgccgagaattggggccagggaacccaagtgacagtgtctagcggatccggcggcggaggatctggcggaggcggatctgggggcggaggctctttcgaagaagttcagctggttgagtctggcggaggactggttcaacctggcggaagcctgagactgtcttgtgccgccagcggcttcaacatcgactactacggaatgcactgggtccgacaggcccctggcaaaggacttgaatgggtcgcctctctgtacggcggcagcgatagcacagattacgccgactctgtgaagggcagattcaccatcagcgccgacaccagcaagaacaccgcctacctccagatgaactccctgagagccgaagataccgccgtgtactactgctccagacagtacagcgcctacttcgactattggggccagggaaccctggtcaccgttagctctacgcgtatccagaaccctgatcctgccgtgtaccagctgcgggatagcaagagcagcgacaagagcgtgtgtctgttcaccgacttcgacagccagaccaacgtgtcccagagcaaggactccgacgtgtacatcaccgataagtgcgtgctggacatgcggagcatggacttcaagagcaactccgccgtggcctggtccaacaagtccgatttcgcctgcgccaacgccttcaacaacagcattatccccgaggacacattcttcccaagccccgagagcagctgcggctttaccagcgagagctaccagcagggcgtgctgagcgccaccatcctgtacgagatcctgctgggcaaggccaccctgtacgccgtgctggtgtctgccctggtgctgatggctatggtcaagcggaaggacagccggggacgcgccaagagaagcggatctggcgtgaagcagaccctgaatttcgacctgctgaagctggctggcgacgtggaatccaacccaggcccttctagaggccatatgaccgagtacaagcccacggtgcgcctcgccacccgcgacgacgtccccagggccgtacgcaccctcgccgccgcgttcgccgactaccccgccacgcgccacaccgtcgatccggaccgccacatcgagcgggtcaccgagctgcaagaactcttcctcacgcgcgtcgggctcgacatcggcaaggtgtgggtcgcggacgacggcgccgcggtggcggtctggaccacgccggagagcgtcgaagcgggggcggtgttcgccgagatcggcccgcgcatggccgagttgagcggttcccggctggccgcgcagcaacagatggaaggcctcctggcgccgcaccggcccaaggagcccgcgtggttcctggccaccgtcggcgtctcgcccgaccaccagggcaagggtctgggcagcgccgtcgtgctccccggagtggaggcggccgagcgcgccggggtgcccgccttcctggagacctccgcgccccgcaacctccccttctacgagcggctcggcttcaccgtcaccgccgacgtcgaggtgcccgaaggaccgcgcacctggtgcatgacccgcaagcccggtgcctga

SEQ ID NO: 39592 - DNA, 2838 bp, synthetic construct
  source 1..2838: mol_type = other DNA
atggccttaccagtgaccgccttgctcctgccgctggccttgctgctccacgccgccaggccggacatccagatgacacagagccctagcagcctgtctgccagcgtgggagacagagtgaccatcacctgtagagccagccaggatgtgtctacagccgtggcctggtatcagcagaagcctggaaaggcccctaagctgctgatctacagcgccagctttctgtactccggcgtgcccagcagattcagcggaagcagaagcggcaccgacttcaccctgacaatatccagcctccagcctgaggacttcgccacctactactgccagcagtacctgtaccagccttggacattcggccagggcaccaaggtggaaatcaagagactcgaggacctgaagaacgtgttcccacctgaggtggccgtgttcgagcctagcgaggccgagatcagccacacccagaaagccaccctcgtgtgcctggctaccggcttctaccccgaccatgtggaactgtcttggtgggtcaacggcaaagaggtgcacagcggcgtgtgtaccgacccccagccactgaaagaacagcccgccctgaacgacagccggtactgcctgagcagcagactgagagtgtccgccaccttctggcagaacccccggaaccacttcagatgccaggtgcagttctacggcctgagcgagaacgacgagtggacccaggacagagccaagcccgtgacccagatcgtgtctgccgaagcctggggcagagccgattgcgacgtgaagctggtggaaaagagcttcgagacagacaccaacctgaacttccagaacctgagcgtgatcggcttcagaatcctgctgctgaaagtggccggctttaacctgctgatgaccctgcggctgtggtccagcagggccaagcgatctggatctggagcaacaaacttctcactactcaaacaagcaggtgacgtggaggagaatcccgggcctactagtgccaccatggactggatttggcgcatccttttccttgtcggcgctgctaccggcgcccattccgggcccatgggaagctggcttgagttctaccacagactcaacgccattgacagcaggctgtgggcacttggcggaagcgaagctgaactcgccgcttttgaaaaagaaattgccgctttcgagtccgagcttcaggcttacaaaggcaaagggaatcctgaggtcgagagcctgagagatcacgctgcccacattagagagtggttgcaggcataccggcacaatggatccggcggcggaggatctggcggaggcggatctgggggcggaggctctttcgaagaagttcagctggttgagtctggcggaggactggttcaacctggcggaagcctgagactgtcttgtgccgccagcggcttcaacatcgactactacggaatgcactgggtccgacaggcccctggcaaaggacttgaatgggtcgcctctctgtacggcggcagcgatagcacagattacgccgactctgtgaagggcagattcaccatcagcgccgacaccagcaagaacaccgcctacctccagatgaactccctgagagccgaagataccgccgtgtactactgctccagacagtacagcgcctacttcgactattggggccagggaaccctggtcaccgttagctctacgcgtatccagaaccctgatcctgccgtgtaccagctgcgggatagcaagagcagcgacaagagcgtgtgtctgttcaccgacttcgacagccagaccaacgtgtcccagagcaaggactccgacgtgtacatcaccgataagtgcgtgctggacatgcggagcatggacttcaagagcaactccgccgtggcctggtccaacaagtccgatttcgcctgcgccaacgccttcaacaacagcattatccccgaggacacattcttcccaagccccgagagcagctgcggctttaccagcgagagctaccagcagggcgtgctgagcgccaccatcctgtacgagatcctgctgggcaaggccaccctgtacgccgtgctggtgtctgccctggtgctgatggctatggtcaagcggaaggacagccggggacgcgccaagagaagcggatctggcgtgaagcagaccctgaatttcgacctgctgaagctggctggcgacgtggaatccaacccaggcccttctagaggccatatgaccgagtacaagcccacggtgcgcctcgccacccgcgacgacgtccccagggccgtacgcaccctcgccgccgcgttcgccgactaccccgccacgcgccacaccgtcgatccggaccgccacatcgagcgggtcaccgagctgcaagaactcttcctcacgcgcgtcgggctcgacatcggcaaggtgtgggtcgcggacgacggcgccgcggtggcggtctggaccacgccggagagcgtcgaagcgggggcggtgttcgccgagatcggcccgcgcatggccgagttgagcggttcccggctggccgcgcagcaacagatggaaggcctcctggcgccgcaccggcccaaggagcccgcgtggttcctggccaccgtcggcgtctcgcccgaccaccagggcaagggtctgggcagcgccgtcgtgctccccggagtggaggcggccgagcgcgccggggtgcccgccttcctggagacctccgcgccccgcaacctccccttctacgagcggctcggcttcaccgtcaccgccgacgtcgaggtgcccgaaggaccgcgcacctggtgcatgacccgcaagcccggtgcctga

SEQ ID NO: 39593 - DNA, 2838 bp, synthetic construct
  source 1..2838: mol_type = other DNA
atggccttaccagtgaccgccttgctcctgccgctggccttgctgctccacgccgccaggccggcatgcatgggcagttggttcgagttctacgaccggctgaatgccatcgacgccagactgtgggctctcggaggatctgaagctgagctggccgccttcgagaaagagatcgccgcctttgagagcgagctgcaagcctacaaaggcaagggcaaccccgaggtggaaaacctgagagtgcacgccgctgccatcagagaatggctccaggcttacagacacaacggtaccggcggaggcggatctggcggcggaggtagcggtggcggaggatctgaattcgacatccagatgacacagagccctagcagcctgtctgccagcgtgggagacagagtgaccatcacctgtagagccagccaggatgtgtctacagccgtggcctggtatcagcagaagcctggaaaggcccctaagctgctgatctacagcgccagctttctgtactccggcgtgcccagcagattcagcggaagcagaagcggcaccgacttcaccctgacaatatccagcctccagcctgaggacttcgccacctactactgccagcagtacctgtaccagccttggacattcggccagggcaccaaggtggaaatcaagagactcgaggacctgaagaacgtgttcccacctgaggtggccgtgttcgagcctagcgaggccgagatcagccacacccagaaagccaccctcgtgtgcctggctaccggcttctaccccgaccatgtggaactgtcttggtgggtcaacggcaaagaggtgcacagcggcgtgtgtaccgacccccagccactgaaagaacagcccgccctgaacgacagccggtactgcctgagcagcagactgagagtgtccgccaccttctggcagaacccccggaaccacttcagatgccaggtgcagttctacggcctgagcgagaacgacgagtggacccaggacagagccaagcccgtgacccagatcgtgtctgccgaagcctggggcagagccgattgcgacgtgaagctggtggaaaagagcttcgagacagacaccaacctgaacttccagaacctgagcgtgatcggcttcagaatcctgctgctgaaagtggccggctttaacctgctgatgaccctgcggctgtggtccagcagggccaagcgatctggatctggagcaacaaacttctcactactcaaacaagcaggtgacgtggaggagaatcccgggcctactagtatggactggatttggcgcatccttttccttgtcggcgctgctaccggcgcgcattccttcgaagaagttcagctggttgagtctggcggaggactggttcaacctggcggaagcctgagactgtcttgtgccgccagcggcttcaacatcgactactacggaatgcactgggtccgacaggcccctggcaaaggacttgaatgggtcgcctctctgtacggcggcagcgatagcacagattacgccgactctgtgaagggcagattcaccatcagcgccgacaccagcaagaacaccgcctacctccagatgaactccctgagagccgaagataccgccgtgtactactgctccagacagtacagcgcctacttcgactattggggccagggaaccctggtcaccgttagctctacgcgtatccagaaccctgatcctgccgtgtaccagctgcgggatagcaagagcagcgacaagagcgtgtgtctgttcaccgacttcgacagccagaccaacgtgtcccagagcaaggactccgacgtgtacatcaccgataagtgcgtgctggacatgcggagcatggacttcaagagcaactccgccgtggcctggtccaacaagtccgatttcgcctgcgccaacgccttcaacaacagcattatccccgaggacacattcttcccaagccccgagagcagctgcggctttaccagcgagagctaccagcagggcgtgctgagcgccaccatcctgtacgagatcctgctgggcaaggccaccctgtacgccgtgctggtgtctgccctggtgctgatggctatggtcaagcggaaggacagccggggacgcgccaagagaagcggatctggcgtgaagcagaccctgaatttcgacctgctgaagctggctggcgacgtggaatccaacccaggcccttctagaggccatatgaccgagtacaagcccacggtgcgcctcgccacccgcgacgacgtccccagggccgtacgcaccctcgccgccgcgttcgccgactaccccgccacgcgccacaccgtcgatccggaccgccacatcgagcgggtcaccgagctgcaagaactcttcctcacgcgcgtcgggctcgacatcggcaaggtgtgggtcgcggacgacggcgccgcggtggcggtctggaccacgccggagagcgtcgaagcgggggcggtgttcgccgagatcggcccgcgcatggccgagttgagcggttcccggctggccgcgcagcaacagatggaaggcctcctggcgccgcaccggcccaaggagcccgcgtggttcctggccaccgtcggcgtctcgcccgaccaccagggcaagggtctgggcagcgccgtcgtgctccccggagtggaggcggccgagcgcgccggggtgcccgccttcctggagacctccgcgccccgcaacctccccttctacgagcggctcggcttcaccgtcaccgccgacgtcgaggtgcccgaaggaccgcgcacctggtgcatgacccgcaagcccggtgcctga

SEQ ID NO: 39594 - DNA, 3189 bp, synthetic construct
  source 1..3189: mol_type = other DNA
atggccttaccagtgaccgccttgctcctgccgctggccttgctgctccacgccgccaggccggcatgcatggaccccgacctggaaatcagagccgccttcctgcggcagagaaacacagccctgagaacagaggtggccgagctggaacaagaggtgcagcggctggaaaacgaggtgtcccagtacgagacaagatacggccctctcggaggcggaaaaggtaccggcggaggcggatctggcggcggaggtagcggtggcggaggatctgaattcgacatccagatgacacagagccctagcagcctgtctgccagcgtgggagacagagtgaccatcacctgtagagccagccaggatgtgtctacagccgtggcctggtatcagcagaagcctggaaaggcccctaagctgctgatctacagcgccagctttctgtactccggcgtgcccagcagattcagcggaagcagaagcggcaccgacttcaccctgacaatatccagcctccagcctgaggacttcgccacctactactgccagcagtacctgtaccagccttggacattcggccagggcaccaaggtggaaatcaagagactcgaggacctgaagaacgtgttcccacctgaggtggccgtgttcgagcctagcgaggccgagatcagccacacccagaaagccaccctcgtgtgcctggctaccggcttctaccccgaccatgtggaactgtcttggtgggtcaacggcaaagaggtgcacagcggcgtgtgtaccgacccccagccactgaaagaacagcccgccctgaacgacagccggtactgcctgagcagcagactgagagtgtccgccaccttctggcagaacccccggaaccacttcagatgccaggtgcagttctacggcctgagcgagaacgacgagtggacccaggacagagccaagcccgtgacccagatcgtgtctgccgaagcctggggcagagccgattgcgacgtgaagctggtggaaaagagcttcgagacagacaccaacctgaacttccagaacctgagcgtgatcggcttcagaatcctgctgctgaaagtggccggctttaacctgctgatgaccctgcggctgtggtccagcagggccaagcgatctggatctggagcaacaaacttctcactactcaaacaagcaggtgacgtggaggagaatcccgggcctactagtgccaccatggactggatttggcgcatccttttccttgtcggcgctgctaccggcgcccattccgggcccgaagtgcagctggttgaatctggcggaggactggttcaggctggcggatctctgagactgtcttgtgccgccagcggcagaacctttagcatgggctggtttagacaggcccctggcaaagagagagagttcgtcgccgccatcacatactctggcggcagcccttactacgccgactctgtgaagggcagattcaccatcagccgggacaacgccaagaacaccgtgtacctccagatgaacagcctgaagcctgaggacaccgccgtgtactactgcgccgccaatccaacatacggcagcgactggaacgccgagaattggggccagggaacccaagtgacagtgtctagcggatccggcggcggaggatctggcggaggcggatctgggggcggaggctctttcgaagaagttcagctggttgagtctggcggaggactggttcaacctggcggaagcctgagactgtcttgtgccgccagcggcttcaacatcgactactacggaatgcactgggtccgacaggcccctggcaaaggacttgaatgggtcgcctctctgtacggcggcagcgatagcacagattacgccgactctgtgaagggcagattcaccatcagcgccgacaccagcaagaacaccgcctacctccagatgaactccctgagagccgaagataccgccgtgtactactgctccagacagtacagcgcctacttcgactattggggccagggaaccctggtcaccgttagctctacgcgtatccagaaccctgatcctgccgtgtaccagctgcgggatagcaagagcagcgacaagagcgtgtgtctgttcaccgacttcgacagccagaccaacgtgtcccagagcaaggactccgacgtgtacatcaccgataagtgcgtgctggacatgcggagcatggacttcaagagcaactccgccgtggcctggtccaacaagtccgatttcgcctgcgccaacgccttcaacaacagcattatccccgaggacacattcttcccaagccccgagagcagctgcggctttaccagcgagagctaccagcagggcgtgctgagcgccaccatcctgtacgagatcctgctgggcaaggccaccctgtacgccgtgctggtgtctgccctggtgctgatggctatggtcaagcggaaggacagccggggacgcgccaagagaagcggatctggcgtgaagcagaccctgaatttcgacctgctgaagctggctggcgacgtggaatccaacccaggcccttctagaggccatatgaccgagtacaagcccacggtgcgcctcgccacccgcgacgacgtccccagggccgtacgcaccctcgccgccgcgttcgccgactaccccgccacgcgccacaccgtcgatccggaccgccacatcgagcgggtcaccgagctgcaagaactcttcctcacgcgcgtcgggctcgacatcggcaaggtgtgggtcgcggacgacggcgccgcggtggcggtctggaccacgccggagagcgtcgaagcgggggcggtgttcgccgagatcggcccgcgcatggccgagttgagcggttcccggctggccgcgcagcaacagatggaaggcctcctggcgccgcaccggcccaaggagcccgcgtggttcctggccaccgtcggcgtctcgcccgaccaccagggcaagggtctgggcagcgccgtcgtgctccccggagtggaggcggccgagcgcgccggggtgcccgccttcctggagacctccgcgccccgcaacctccccttctacgagcggctcggcttcaccgtcaccgccgacgtcgaggtgcccgaaggaccgcgcacctggtgcatgacccgcaagcccggtgcctga

SEQ ID NO: 39595 - DNA, 2838 bp, synthetic construct
  source 1..2838: mol_type = other DNA
atggccttaccagtgaccgccttgctcctgccgctggccttgctgctccacgccgccaggccggacatccagatgacacagagccctagcagcctgtctgccagcgtgggagacagagtgaccatcacctgtagagccagccaggatgtgtctacagccgtggcctggtatcagcagaagcctggaaaggcccctaagctgctgatctacagcgccagctttctgtactccggcgtgcccagcagattcagcggaagcagaagcggcaccgacttcaccctgacaatatccagcctccagcctgaggacttcgccacctactactgccagcagtacctgtaccagccttggacattcggccagggcaccaaggtggaaatcaagagactcgaggacctgaagaacgtgttcccacctgaggtggccgtgttcgagcctagcgaggccgagatcagccacacccagaaagccaccctcgtgtgcctggctaccggcttctaccccgaccatgtggaactgtcttggtgggtcaacggcaaagaggtgcacagcggcgtgtgtaccgacccccagccactgaaagaacagcccgccctgaacgacagccggtactgcctgagcagcagactgagagtgtccgccaccttctggcagaacccccggaaccacttcagatgccaggtgcagttctacggcctgagcgagaacgacgagtggacccaggacagagccaagcccgtgacccagatcgtgtctgccgaagcctggggcagagccgattgcgacgtgaagctggtggaaaagagcttcgagacagacaccaacctgaacttccagaacctgagcgtgatcggcttcagaatcctgctgctgaaagtggccggctttaacctgctgatgaccctgcggctgtggtccagcagggccaagcgatctggatctggagcaacaaacttctcactactcaaacaagcaggtgacgtggaggagaatcccgggcctactagtgccaccatggactggatttggcgcatccttttccttgtcggcgctgctaccggcgcccattccgggcccatgggatcttggagcgagttttacgatcggctgcacgccattcaccaccggctgtatgctctcggaggaagcgaagctgagctggccgcttttgaaaaagaaattgccgctttcgagtccgagcttcaggcttacaaaggcaaagggaatcctgaggtcgaggccctgagagataccgccgccttcatcagaacccggttgcaggcataccggcacaacggatccggcggcggaggatctggcggaggcggatctgggggcggaggctctttcgaagaagttcagctggttgagtctggcggaggactggttcaacctggcggaagcctgagactgtcttgtgccgccagcggcttcaacatcgactactacggaatgcactgggtccgacaggcccctggcaaaggacttgaatgggtcgcctctctgtacggcggcagcgatagcacagattacgccgactctgtgaagggcagattcaccatcagcgccgacaccagcaagaacaccgcctacctccagatgaactccctgagagccgaagataccgccgtgtactactgctccagacagtacagcgcctacttcgactattggggccagggaaccctggtcaccgttagctctacgcgtatccagaaccctgatcctgccgtgtaccagctgcgggatagcaagagcagcgacaagagcgtgtgtctgttcaccgacttcgacagccagaccaacgtgtcccagagcaaggactccgacgtgtacatcaccgataagtgcgtgctggacatgcggagcatggacttcaagagcaactccgccgtggcctggtccaacaagtccgatttcgcctgcgccaacgccttcaacaacagcattatccccgaggacacattcttcccaagccccgagagcagctgcggctttaccagcgagagctaccagcagggcgtgctgagcgccaccatcctgtacgagatcctgctgggcaaggccaccctgtacgccgtgctggtgtctgccctggtgctgatggctatggtcaagcggaaggacagccggggacgcgccaagagaagcggatctggcgtgaagcagaccctgaatttcgacctgctgaagctggctggcgacgtggaatccaacccaggcccttctagaggccatatgaccgagtacaagcccacggtgcgcctcgccacccgcgacgacgtccccagggccgtacgcaccctcgccgccgcgttcgccgactaccccgccacgcgccacaccgtcgatccggaccgccacatcgagcgggtcaccgagctgcaagaactcttcctcacgcgcgtcgggctcgacatcggcaaggtgtgggtcgcggacgacggcgccgcggtggcggtctggaccacgccggagagcgtcgaagcgggggcggtgttcgccgagatcggcccgcgcatggccgagttgagcggttcccggctggccgcgcagcaacagatggaaggcctcctggcgccgcaccggcccaaggagcccgcgtggttcctggccaccgtcggcgtctcgcccgaccaccagggcaagggtctgggcagcgccgtcgtgctccccggagtggaggcggccgagcgcgccggggtgcccgccttcctggagacctccgcgccccgcaacctccccttctacgagcggctcggcttcaccgtcaccgccgacgtcgaggtgcccgaaggaccgcgcacctggtgcatgacccgcaagcccggtgcctga

SEQ ID NO: 39596 - DNA, 3468 bp, synthetic construct
  source 1..3468: mol_type = other DNA
atggccttaccagtgaccgccttgctcctgccgctggccttgctgctccacgccgccaggccggacatccagatgacacagagccctagcagcctgtctgccagcgtgggagacagagtgaccatcacctgtagagccagccaggatgtgtctacagccgtggcctggtatcagcagaagcctggaaaggcccctaagctgctgatctacagcgccagctttctgtactccggcgtgcccagcagattcagcggaagcagaagcggcaccgacttcaccctgacaatatccagcctccagcctgaggacttcgccacctactactgccagcagtacctgtaccagccttggacattcggccagggcaccaaggtggaaatcaagagactcgaggacctgaagaacgtgttcccacctgaggtggccgtgttcgagcctagcgaggccgagatcagccacacccagaaagccaccctcgtgtgcctggctaccggcttctaccccgaccatgtggaactgtcttggtgggtcaacggcaaagaggtgcacagcggcgtgtgtaccgacccccagccactgaaagaacagcccgccctgaacgacagccggtactgcctgagcagcagactgagagtgtccgccaccttctggcagaacccccggaaccacttcagatgccaggtgcagttctacggcctgagcgagaacgacgagtggacccaggacagagccaagcccgtgacccagatcgtgtctgccgaagcctggggcagagccgattgcgacgtgaagctggtggaaaagagcttcgagacagacaccaacctgaacttccagaacctgagcgtgatcggcttcagaatcctgctgctgaaagtggccggctttaacctgctgatgaccctgcggctgtggtccagcagggccaagcgatctggatctggagcaacaaacttctcactactcaaacaagcaggtgacgtggaggagaatcccgggcctactagtaccatggactggatttggcgcatccttttccttgtcggcgctgctaccggcgcccattccctgttcaatcaagaggtgcagatccctctgaccgagagctactgtggcccctgtcctaagaactggatctgctacaagaacaactgctaccagttcttcgacgagagcaagaattggtacgagagccaggccagctgcatgagccagaatgccagcctgctgaaggtgtacagcaaagaggaccaggacctgctgaaactggtcaagagcgcccactggatgggccttgtgcacatccccaccaatggctcttggcagtgggaggacggcagcattctgagccctaacctgctgaccatcatcgagatgcagaagggcgactgcgccctgtacgccagcagctttaagggctacatcgagaattgcagcaccccgaacacctacatctgtatgcagagaaccgtttctggcggaggcggctctggaggaggcggaagtggcggcggaggcgacctctttaatcaagaagtccagattccactcaccgaatcctactgcggaccttgtccaaaaaattggatttgttataagaacaactgttatcaattctttgatgagtctaaaaattggtatgagtcccaggcttcctgcatgtctcagaacgcttctctgctgaaagtctactctaaagaagatcaggatctcctgaagctcgtcaagtctgcccattggatggggctcgtccacattcctaccaacggaagctggcaatgggaagatggctccatcctgtctccaaatctgctcacgattattgaaatgcagaaaggggattgtgctctctacgccagctccttcaagggatatattgagaactgtagcacgcccaatacttatatctgtatgcaacggaccgtgggatccggcggcggaggatctggcggaggcggatctgggggcggaggctctttcgaagaagttcagctggttgagtctggcggaggactggttcaacctggcggaagcctgagactgtcttgtgccgccagcggcttcaacatcgactactacggaatgcactgggtccgacaggcccctggcaaaggacttgaatgggtcgcctctctgtacggcggcagcgatagcacagattacgccgactctgtgaagggcagattcaccatcagcgccgacaccagcaagaacaccgcctacctccagatgaactccctgagagccgaagataccgccgtgtactactgctccagacagtacagcgcctacttcgactattggggccagggaaccctggtcaccgttagctctacgcgtatccagaaccctgatcctgccgtgtaccagctgcgggatagcaagagcagcgacaagagcgtgtgtctgttcaccgacttcgacagccagaccaacgtgtcccagagcaaggactccgacgtgtacatcaccgataagtgcgtgctggacatgcggagcatggacttcaagagcaactccgccgtggcctggtccaacaagtccgatttcgcctgcgccaacgccttcaacaacagcattatccccgaggacacattcttcccaagccccgagagcagctgcggctttaccagcgagagctaccagcagggcgtgctgagcgccaccatcctgtacgagatcctgctgggcaaggccaccctgtacgccgtgctggtgtctgccctggtgctgatggctatggtcaagcggaaggacagccggggacgcgccaagagaagcggatctggcgtgaagcagaccctgaatttcgacctgctgaagctggctggcgacgtggaatccaacccaggcccttctagaggccatatgaccgagtacaagcccacggtgcgcctcgccacccgcgacgacgtccccagggccgtacgcaccctcgccgccgcgttcgccgactaccccgccacgcgccacaccgtcgatccggaccgccacatcgagcgggtcaccgagctgcaagaactcttcctcacgcgcgtcgggctcgacatcggcaaggtgtgggtcgcggacgacggcgccgcggtggcggtctggaccacgccggagagcgtcgaagcgggggcggtgttcgccgagatcggcccgcgcatggccgagttgagcggttcccggctggccgcgcagcaacagatggaaggcctcctggcgccgcaccggcccaaggagcccgcgtggttcctggccaccgtcggcgtctcgcccgaccaccagggcaagggtctgggcagcgccgtcgtgctccccggagtggaggcggccgagcgcgccggggtgcccgccttcctggagacctccgcgccccgcaacctccccttctacgagcggctcggcttcaccgtcaccgccgacgtcgaggtgcccgaaggaccgcgcacctggtgcatgacccgcaagcccggtgcctga

SEQ ID NO: 39597 - DNA, 1854 bp, synthetic construct
  source 1..1854: mol_type = other DNA
atggccttaccagtgaccgccttgctcctgccgctggccttgctgctccacgccgccaggccggacatccagatgacacagagccctagcagcctgtctgccagcgtgggagacagagtgaccatcacctgtagagccagccaggatgtgtctacagccgtggcctggtatcagcagaagcctggaaaggcccctaagctgctgatctacagcgccagctttctgtactccggcgtgcccagcagattcagcggaagcagaagcggcaccgacttcaccctgacaatatccagcctccagcctgaggacttcgccacctactactgccagcagtacctgtaccagccttggacattcggccagggcaccaaggtggaaatcaagagactcgaggacctgaagaacgtgttcccacctgaggtggccgtgttcgagcctagcgaggccgagatcagccacacccagaaagccaccctcgtgtgcctggctaccggcttctaccccgaccatgtggaactgtcttggtgggtcaacggcaaagaggtgcacagcggcgtgtgtaccgacccccagccactgaaagaacagcccgccctgaacgacagccggtactgcctgagcagcagactgagagtgtccgccaccttctggcagaacccccggaaccacttcagatgccaggtgcagttctacggcctgagcgagaacgacgagtggacccaggacagagccaagcccgtgacccagatcgtgtctgccgaagcctggggcagagccgattgcggctttaccagcgagagctaccagcagggcgtgctgagcgccaccaacctgagcgtgatcggcttcagaatcctgctgctgaaagtggccggctttaacctgctgatgaccctgcggctgtggtccagcagggccaagcgatctggatctggagcaacaaacttctcactactcaaacaagcaggtgacgtggaggagaatcccgggcctactagtatggactggatttggcgcatccttttccttgtcggcgctgctaccggcgcgcattccttcgaagaagttcagctggttgagtctggcggaggactggttcaacctggcggaagcctgagactgtcttgtgccgccagcggcttcaacatcgactactacggaatgcactgggtccgacaggcccctggcaaaggacttgaatgggtcgcctctctgtacggcggcagcgatagcacagattacgccgactctgtgaagggcagattcaccatcagcgccgacaccagcaagaacaccgcctacctccagatgaactccctgagagccgaagataccgccgtgtactactgctccagacagtacagcgcctacttcgactattggggccagggaaccctggtcaccgttagctctacgcgtatccagaaccctgatcctgccgtgtaccagctgcgggatagcaagagcagcgacaagagcgtgtgtctgttcaccgacttcgacagccagaccaacgtgtcccagagcaaggactccgacgtgtacatcaccgataagtgcgtgctggacatgcggagcatggacttcaagagcaactccgccgtggcctggtccaacaagtccgatttcgcctgcgccaacgccttcaacaacagcattatccccgaggacacattcttcccaagccccgagagcagctgcgacgtgaagctggtggaaaagagcttcgagacagacaccaacctgaacttccagatcctgtacgagatcctgctgggcaaggccaccctgtacgccgtgctggtgtctgccctggtgctgatggctatggtcaagcggaaggacagccgggga

SEQ ID NO: 39598 - DNA, 1866 bp, synthetic construct
  source 1..1866: mol_type = other DNA
atggccttaccagtgaccgccttgctcctgccgctggccttgctgctccacgccgccaggccggacatccagatgacacagagccctagcagcctgtctgccagcgtgggagacagagtgaccatcacctgtagagccagccaggatgtgtctacagccgtggcctggtatcagcagaagcctggaaaggcccctaagctgctgatctacagcgccagctttctgtactccggcgtgcccagcagattcagcggaagcagaagcggcaccgacttcaccctgacaatatccagcctccagcctgaggacttcgccacctactactgccagcagtacctgtaccagccttggacattcggccagggcaccaaggtggaaatcaagagactcgagatccagaaccctgatcctgccgtgtaccagctgcgggatagcaagagcagcgacaagagcgtgtgtctgttcaccgacttcgacagccagaccaacgtgtcccagagcaaggactccgacgtgtacatcaccgataagtgcgtgctggacatgcggagcatggacttcaagagcaactccgccgtggcctggtccaacaagtccgatttcgcctgcgccaacgccttcaacaacagcattatccccgaggacacattcttcccaagccccgagagcagctgcgacgtgaagctggtggaaaagagcttcgagacagacaccaacctgaacttccagatcctgtacgagatcctgctgggcaaggccaccctgtacgccgtgctggtgtctgccctggtgctgatggctatggtcaagcggaaggacagccggggacgcgccaagagaagcggatctggcgtgaagcagaccctgaatttcgacctgctgaagctggctggcgacgtggaatccaacccaggccctactagtatggactggatttggcgcatccttttccttgtcggcgctgctaccggcgcgcattccttcgaagaagttcagctggttgagtctggcggaggactggttcaacctggcggaagcctgagactgtcttgtgccgccagcggcttcaacatcgactactacggaatgcactgggtccgacaggcccctggcaaaggacttgaatgggtcgcctctctgtacggcggcagcgatagcacagattacgccgactctgtgaagggcagattcaccatcagcgccgacaccagcaagaacaccgcctacctccagatgaactccctgagagccgaagataccgccgtgtactactgctccagacagtacagcgcctacttcgactattggggccagggaaccctggtcaccgttagctctacgcgtgaggacctgaagaacgtgttcccacctgaggtggccgtgttcgagcctagcgaggccgagatcagccacacccagaaagccaccctcgtgtgcctggctaccggcttctaccccgaccatgtggaactgtcttggtgggtcaacggcaaagaggtgcacagcggcgtgtgtaccgacccccagccactgaaagaacagcccgccctgaacgacagccggtactgcctgagcagcagactgagagtgtccgccaccttctggcagaacccccggaaccacttcagatgccaggtgcagttctacggcctgagcgagaacgacgagtggacccaggacagagccaagcccgtgacccagatcgtgtctgccgaagcctggggcagagccgattgcggctttaccagcgagagctaccagcagggcgtgctgagcgccaccaacctgagcgtgatcggcttcagaatcctgctgctgaaagtggccggctttaacctgctgatgaccctgcggctgtggtccagc

SEQ ID NO: 39599 - DNA, 2259 bp, synthetic construct
  source 1..2259: mol_type = other DNA
atggccttaccagtgaccgccttgctcctgccgctggccttgctgctccacgccgccaggccggaagtgcagctggttgaatctggcggaggactggttcagcctggcggatctctgagactgtcttgtgccgccagcggcttcagcttcagcgacttttggatgagctgggtccgacaggcccctggcaaaggacttgaatgggtcgccacaatcagccaggccggcagcgagaaggactacgtggactctgtgaagggcagattcaccatcagccgggacaacgccaagaagtccctgtacctccagatgaacagcctgagagccgaggacaccgccgtgtactattgtgcctctggcgtgtacagcttcgactacagaggccagggcaccctggtcacagtctcttctggtaccggcggaggcggatctggcggcggaggtagcggtggcggaggatctgaattcgacatccagatgacacagagccctagcagcctgtctgccagcgtgggagacagagtgaccatcacctgtagagccagccaggatgtgtctacagccgtggcctggtatcagcagaagcctggaaaggcccctaagctgctgatctacagcgccagctttctgtactccggcgtgcccagcagattcagcggaagcagaagcggcaccgacttcaccctgacaatatccagcctccagcctgaggacttcgccacctactactgccagcagtacctgtaccagccttggacattcggccagggcaccaaggtggaaatcaagagactcgaggacctgaagaacgtgttcccacctgaggtggccgtgttcgagcctagcgaggccgagatcagccacacccagaaagccaccctcgtgtgcctggctaccggcttctaccccgaccatgtggaactgtcttggtgggtcaacggcaaagaggtgcacagcggcgtgtgtaccgacccccagccactgaaagaacagcccgccctgaacgacagccggtactgcctgagcagcagactgagagtgtccgccaccttctggcagaacccccggaaccacttcagatgccaggtgcagttctacggcctgagcgagaacgacgagtggacccaggacagagccaagcccgtgacccagatcgtgtctgccgaagcctggggcagagccgattgcggctttaccagcgagagctaccagcagggcgtgctgagcgccaccaacctgagcgtgatcggcttcagaatcctgctgctgaaagtggccggctttaacctgctgatgaccctgcggctgtggtccagcagggccaagcgatctggatctggagcaacaaacttctcactactcaaacaagcaggtgacgtggaggagaatcccgggcctactagtatggactggatttggcgcatccttttccttgtcggcgctgctaccggcgcgcattccttcgaagaagttcagctggttgagtctggcggaggactggttcaacctggcggaagcctgagactgtcttgtgccgccagcggcttcaacatcgactactacggaatgcactgggtccgacaggcccctggcaaaggacttgaatgggtcgcctctctgtacggcggcagcgatagcacagattacgccgactctgtgaagggcagattcaccatcagcgccgacaccagcaagaacaccgcctacctccagatgaactccctgagagccgaagataccgccgtgtactactgctccagacagtacagcgcctacttcgactattggggccagggaaccctggtcaccgttagctctacgcgtatccagaaccctgatcctgccgtgtaccagctgcgggatagcaagagcagcgacaagagcgtgtgtctgttcaccgacttcgacagccagaccaacgtgtcccagagcaaggactccgacgtgtacatcaccgataagtgcgtgctggacatgcggagcatggacttcaagagcaactccgccgtggcctggtccaacaagtccgatttcgcctgcgccaacgccttcaacaacagcattatccccgaggacacattcttcccaagccccgagagcagctgcgacgtgaagctggtggaaaagagcttcgagacagacaccaacctgaacttccagatcctgtacgagatcctgctgggcaaggccaccctgtacgccgtgctggtgtctgccctggtgctgatggctatggtcaagcggaaggacagccgggga

SEQ ID NO: 39600 - DNA, 2271 bp, synthetic construct
  source 1..2271: mol_type = other DNA
atggccttaccagtgaccgccttgctcctgccgctggccttgctgctccacgccgccaggccggaagtgcagctggttgaatctggcggaggactggttcagcctggcggatctctgagactgtcttgtgccgccagcggcttcagcttcagcgacttttggatgagctgggtccgacaggcccctggcaaaggacttgaatgggtcgccacaatcagccaggccggcagcgagaaggactacgtggactctgtgaagggcagattcaccatcagccgggacaacgccaagaagtccctgtacctccagatgaacagcctgagagccgaggacaccgccgtgtactattgtgcctctggcgtgtacagcttcgactacagaggccagggcaccctggtcacagtctcttctggtaccggcggaggcggatctggcggcggaggtagcggtggcggaggatctgaattcgacatccagatgacacagagccctagcagcctgtctgccagcgtgggagacagagtgaccatcacctgtagagccagccaggatgtgtctacagccgtggcctggtatcagcagaagcctggaaaggcccctaagctgctgatctacagcgccagctttctgtactccggcgtgcccagcagattcagcggaagcagaagcggcaccgacttcaccctgacaatatccagcctccagcctgaggacttcgccacctactactgccagcagtacctgtaccagccttggacattcggccagggcaccaaggtggaaatcaagagactcgagatccagaaccctgatcctgccgtgtaccagctgcgggatagcaagagcagcgacaagagcgtgtgtctgttcaccgacttcgacagccagaccaacgtgtcccagagcaaggactccgacgtgtacatcaccgataagtgcgtgctggacatgcggagcatggacttcaagagcaactccgccgtggcctggtccaacaagtccgatttcgcctgcgccaacgccttcaacaacagcattatccccgaggacacattcttcccaagccccgagagcagctgcgacgtgaagctggtggaaaagagcttcgagacagacaccaacctgaacttccagatcctgtacgagatcctgctgggcaaggccaccctgtacgccgtgctggtgtctgccctggtgctgatggctatggtcaagcggaaggacagccggggacgcgccaagagaagcggatctggcgtgaagcagaccctgaatttcgacctgctgaagctggctggcgacgtggaatccaacccaggccctactagtatggactggatttggcgcatccttttccttgtcggcgctgctaccggcgcgcattccttcgaagaagttcagctggttgagtctggcggaggactggttcaacctggcggaagcctgagactgtcttgtgccgccagcggcttcaacatcgactactacggaatgcactgggtccgacaggcccctggcaaaggacttgaatgggtcgcctctctgtacggcggcagcgatagcacagattacgccgactctgtgaagggcagattcaccatcagcgccgacaccagcaagaacaccgcctacctccagatgaactccctgagagccgaagataccgccgtgtactactgctccagacagtacagcgcctacttcgactattggggccagggaaccctggtcaccgttagctctacgcgtgaggacctgaagaacgtgttcccacctgaggtggccgtgttcgagcctagcgaggccgagatcagccacacccagaaagccaccctcgtgtgcctggctaccggcttctaccccgaccatgtggaactgtcttggtgggtcaacggcaaagaggtgcacagcggcgtgtgtaccgacccccagccactgaaagaacagcccgccctgaacgacagccggtactgcctgagcagcagactgagagtgtccgccaccttctggcagaacccccggaaccacttcagatgccaggtgcagttctacggcctgagcgagaacgacgagtggacccaggacagagccaagcccgtgacccagatcgtgtctgccgaagcctggggcagagccgattgcggctttaccagcgagagctaccagcagggcgtgctgagcgccaccaacctgagcgtgatcggcttcagaatcctgctgctgaaagtggccggctttaacctgctgatgaccctgcggctgtggtccagc

SEQ ID NO: 39601 - DNA, 2670 bp, synthetic construct
  source 1..2670: mol_type = other DNA
atggccttaccagtgaccgccttgctcctgccgctggccttgctgctccacgccgccaggccggaagtgcagctggttgaatctggcggaggactggttcagcctggcggatctctgagactgtcttgtgccgccagcggcttcagcttcagcgacttttggatgagctgggtccgacaggcccctggcaaaggacttgaatgggtcgccacaatcagccaggccggcagcgagaaggactacgtggactctgtgaagggcagattcaccatcagccgggacaacgccaagaagtccctgtacctccagatgaacagcctgagagccgaggacaccgccgtgtactattgtgcctctggcgtgtacagcttcgactacagaggccagggcaccctggtcacagtctcttctggtaccggcggaggcggatctggcggcggaggtagcggtggcggaggatctgaattcgacatccagatgacacagagccctagcagcctgtctgccagcgtgggagacagagtgaccatcacctgtagagccagccaggatgtgtctacagccgtggcctggtatcagcagaagcctggaaaggcccctaagctgctgatctacagcgccagctttctgtactccggcgtgcccagcagattcagcggaagcagaagcggcaccgacttcaccctgacaatatccagcctccagcctgaggacttcgccacctactactgccagcagtacctgtaccagccttggacattcggccagggcaccaaggtggaaatcaagagactcgaggacctgaagaacgtgttcccacctgaggtggccgtgttcgagcctagcgaggccgagatcagccacacccagaaagccaccctcgtgtgcctggctaccggcttctaccccgaccatgtggaactgtcttggtgggtcaacggcaaagaggtgcacagcggcgtgtgtaccgacccccagccactgaaagaacagcccgccctgaacgacagccggtactgcctgagcagcagactgagagtgtccgccaccttctggcagaacccccggaaccacttcagatgccaggtgcagttctacggcctgagcgagaacgacgagtggacccaggacagagccaagcccgtgacccagatcgtgtctgccgaagcctggggcagagccgattgcggctttaccagcgagagctaccagcagggcgtgctgagcgccaccaacctgagcgtgatcggcttcagaatcctgctgctgaaagtggccggctttaacctgctgatgaccctgcggctgtggtccagcagggccaagcgatctggatctggagcaacaaacttctcactactcaaacaagcaggtgacgtggaggagaatcccgggcctactagtatggactggatttggcgcatccttttccttgtcggcgctgctaccggcgcgcattccgggccccagctccagctgcaagagtctggacctggcctggtcaagcctagcgagacactgagcctgacctgtaccgtgtccggcgatagcatcagcagcggcgattactactggggctggatcagacagcctcctggcaaaggactggaatggatcggccacatctactacagcggcgtgacctactacaaccccagcctgaagtccagagtgaccatcagcgtggacaccagccggaaccagttctccctgaagctgtctagcgtgacagccgccgataccgccgtgtactactgcaccagagaggacagcagcaactggcggagtagaggccagggaacactggtcacagttagctctggatccggcggaggcggaagtggaggcggaggatctggcggcggaggctctttcgaagaagttcagctggttgagtctggcggaggactggttcaacctggcggaagcctgagactgtcttgtgccgccagcggcttcaacatcgactactacggaatgcactgggtccgacaggcccctggcaaaggacttgaatgggtcgcctctctgtacggcggcagcgatagcacagattacgccgactctgtgaagggcagattcaccatcagcgccgacaccagcaagaacaccgcctacctccagatgaactccctgagagccgaagataccgccgtgtactactgctccagacagtacagcgcctacttcgactattggggccagggaaccctggtcaccgttagctctacgcgtatccagaaccctgatcctgccgtgtaccagctgcgggatagcaagagcagcgacaagagcgtgtgtctgttcaccgacttcgacagccagaccaacgtgtcccagagcaaggactccgacgtgtacatcaccgataagtgcgtgctggacatgcggagcatggacttcaagagcaactccgccgtggcctggtccaacaagtccgatttcgcctgcgccaacgccttcaacaacagcattatccccgaggacacattcttcccaagccccgagagcagctgcgacgtgaagctggtggaaaagagcttcgagacagacaccaacctgaacttccagatcctgtacgagatcctgctgggcaaggccaccctgtacgccgtgctggtgtctgccctggtgctgatggctatggtcaagcggaaggacagccgggga

SEQ ID NO: 39602 - DNA, 2682 bp, synthetic construct
  source 1..2682: mol_type = other DNA
atggccttaccagtgaccgccttgctcctgccgctggccttgctgctccacgccgccaggccggaagtgcagctggttgaatctggcggaggactggttcagcctggcggatctctgagactgtcttgtgccgccagcggcttcagcttcagcgacttttggatgagctgggtccgacaggcccctggcaaaggacttgaatgggtcgccacaatcagccaggccggcagcgagaaggactacgtggactctgtgaagggcagattcaccatcagccgggacaacgccaagaagtccctgtacctccagatgaacagcctgagagccgaggacaccgccgtgtactattgtgcctctggcgtgtacagcttcgactacagaggccagggcaccctggtcacagtctcttctggtaccggcggaggcggatctggcggcggaggtagcggtggcggaggatctgaattcgacatccagatgacacagagccctagcagcctgtctgccagcgtgggagacagagtgaccatcacctgtagagccagccaggatgtgtctacagccgtggcctggtatcagcagaagcctggaaaggcccctaagctgctgatctacagcgccagctttctgtactccggcgtgcccagcagattcagcggaagcagaagcggcaccgacttcaccctgacaatatccagcctccagcctgaggacttcgccacctactactgccagcagtacctgtaccagccttggacattcggccagggcaccaaggtggaaatcaagagactcgagatccagaaccctgatcctgccgtgtaccagctgcgggatagcaagagcagcgacaagagcgtgtgtctgttcaccgacttcgacagccagaccaacgtgtcccagagcaaggactccgacgtgtacatcaccgataagtgcgtgctggacatgcggagcatggacttcaagagcaactccgccgtggcctggtccaacaagtccgatttcgcctgcgccaacgccttcaacaacagcattatccccgaggacacattcttcccaagccccgagagcagctgcgacgtgaagctggtggaaaagagcttcgagacagacaccaacctgaacttccagatcctgtacgagatcctgctgggcaaggccaccctgtacgccgtgctggtgtctgccctggtgctgatggctatggtcaagcggaaggacagccggggacgcgccaagagaagcggatctggcgtgaagcagaccctgaatttcgacctgctgaagctggctggcgacgtggaatccaacccaggccctactagtatggactggatttggcgcatccttttccttgtcggcgctgctaccggcgcgcattccgggccccagctccagctgcaagagtctggacctggcctggtcaagcctagcgagacactgagcctgacctgtaccgtgtccggcgatagcatcagcagcggcgattactactggggctggatcagacagcctcctggcaaaggactggaatggatcggccacatctactacagcggcgtgacctactacaaccccagcctgaagtccagagtgaccatcagcgtggacaccagccggaaccagttctccctgaagctgtctagcgtgacagccgccgataccgccgtgtactactgcaccagagaggacagcagcaactggcggagtagaggccagggaacactggtcacagttagctctggatccggcggaggcggaagtggaggcggaggatctggcggcggaggctctttcgaagaagttcagctggttgagtctggcggaggactggttcaacctggcggaagcctgagactgtcttgtgccgccagcggcttcaacatcgactactacggaatgcactgggtccgacaggcccctggcaaaggacttgaatgggtcgcctctctgtacggcggcagcgatagcacagattacgccgactctgtgaagggcagattcaccatcagcgccgacaccagcaagaacaccgcctacctccagatgaactccctgagagccgaagataccgccgtgtactactgctccagacagtacagcgcctacttcgactattggggccagggaaccctggtcaccgttagctctacgcgtgaggacctgaagaacgtgttcccacctgaggtggccgtgttcgagcctagcgaggccgagatcagccacacccagaaagccaccctcgtgtgcctggctaccggcttctaccccgaccatgtggaactgtcttggtgggtcaacggcaaagaggtgcacagcggcgtgtgtaccgacccccagccactgaaagaacagcccgccctgaacgacagccggtactgcctgagcagcagactgagagtgtccgccaccttctggcagaacccccggaaccacttcagatgccaggtgcagttctacggcctgagcgagaacgacgagtggacccaggacagagccaagcccgtgacccagatcgtgtctgccgaagcctggggcagagccgattgcggctttaccagcgagagctaccagcagggcgtgctgagcgccaccaacctgagcgtgatcggcttcagaatcctgctgctgaaagtggccggctttaacctgctgatgaccctgcggctgtggtccagc

SEQ ID NO: 39603 - DNA, 2166 bp, synthetic construct
  source 1..2166: mol_type = other DNA
atggccttaccagtgaccgccttgctcctgccgctggccttgctgctccacgccgccaggccggacatccagatgacacagagccctagcagcctgtctgccagcgtgggagacagagtgaccatcacctgtagagccagccaggatgtgtctacagccgtggcctggtatcagcagaagcctggaaaggcccctaagctgctgatctacagcgccagctttctgtactccggcgtgcccagcagattcagcggaagcagaagcggcaccgacttcaccctgacaatatccagcctccagcctgaggacttcgccacctactactgccagcagtacctgtaccagccttggacattcggccagggcaccaaggtggaaatcaagagactcgaggacctgaagaacgtgttcccacctgaggtggccgtgttcgagcctagcgaggccgagatcagccacacccagaaagccaccctcgtgtgcctggctaccggcttctaccccgaccatgtggaactgtcttggtgggtcaacggcaaagaggtgcacagcggcgtgtgtaccgacccccagccactgaaagaacagcccgccctgaacgacagccggtactgcctgagcagcagactgagagtgtccgccaccttctggcagaacccccggaaccacttcagatgccaggtgcagttctacggcctgagcgagaacgacgagtggacccaggacagagccaagcccgtgacccagatcgtgtctgccgaagcctggggcagagccgatgatgtgattaagatccactggcaggaaaagaagtccaacaccatcctgggcagccaggaaggcaacaccatgaagaccaacgacacctacatgaagttcagctggctgaccgtgcccgagaagtccctggacaaagaacacagatgcatcgtgcggcacgaaaacaacaagaacggcgtggaccaggaaatcatcttcccacccatcaagaccgatgtgattacaatggaccccaaggacaactgctccaaggacgccaacgataccctgctgctccagctgaccaacaccagcgcctactacatgtacttgttgctgctgctgaagtccgtggtgtacttcgccatcatcacatgctgcctgctgatggctatggtcaagcggaaggacagccggggaagggccaagcgatctggatctggagcaacaaacttctcactactcaaacaagcaggtgacgtggaggagaatcccgggcctactagtatggactggatttggcgcatccttttccttgtcggcgctgctaccggcgcgcattccttcgaagaagttcagctggttgagtctggcggaggactggttcaacctggcggaagcctgagactgtcttgtgccgccagcggcttcaacatcgactactacggaatgcactgggtccgacaggcccctggcaaaggacttgaatgggtcgcctctctgtacggcggcagcgatagcacagattacgccgactctgtgaagggcagattcaccatcagcgccgacaccagcaagaacaccgcctacctccagatgaactccctgagagccgaagataccgccgtgtactactgctccagacagtacagcgcctacttcgactattggggccagggaaccctggtcaccgttagctctacgcgtatccagaaccctgatcctgccgtgtaccagctgcgggatagcaagagcagcgacaagagcgtgtgtctgttcaccgacttcgacagccagaccaacgtgtcccagagcaaggactccgacgtgtacatcaccgataagtgcgtgctggacatgcggagcatggacttcaagagcaactccgccgtggcctggtccaacaagtccgatttcgcctgcgccaacgccttcaacaacagcattatccccgaggacacattcttcccaagccccgagagcagcgactccaccgaccacgtgaagcccaaagagacagagaacaccaagcagcccagcaagagctgccacaagcccaaggccatcgtgcacaccgagaaagtgaacatgatgagcctgaccgtgctgggcctgcggatgctgttcgccaaaaccgtggccgtgaacttcctgctgaccgccaagctgttcttcctcctcaccgcc

SEQ ID NO: 39604 - DNA, 2178 bp, synthetic construct
  source 1..2178: mol_type = other DNA
atggccttaccagtgaccgccttgctcctgccgctggccttgctgctccacgccgccaggccggacatccagatgacacagagccctagcagcctgtctgccagcgtgggagacagagtgaccatcacctgtagagccagccaggatgtgtctacagccgtggcctggtatcagcagaagcctggaaaggcccctaagctgctgatctacagcgccagctttctgtactccggcgtgcccagcagattcagcggaagcagaagcggcaccgacttcaccctgacaatatccagcctccagcctgaggacttcgccacctactactgccagcagtacctgtaccagccttggacattcggccagggcaccaaggtggaaatcaagagactcgagatccagaaccctgatcctgccgtgtaccagctgcgggatagcaagagcagcgacaagagcgtgtgtctgttcaccgacttcgacagccagaccaacgtgtcccagagcaaggactccgacgtgtacatcaccgataagtgcgtgctggacatgcggagcatggacttcaagagcaactccgccgtggcctggtccaacaagtccgatttcgcctgcgccaacgccttcaacaacagcattatccccgaggacacattcttcccaagccccgagagcagcgactccaccgaccacgtgaagcccaaagagacagagaacaccaagcagcccagcaagagctgccacaagcccaaggccatcgtgcacaccgagaaagtgaacatgatgagcctgaccgtgctgggcctgcggatgctgttcgccaaaaccgtggccgtgaacttcctgctgaccgccaagctgttcttcctcctcaccgcccgcgccaagagaagcggatctggcgtgaagcagaccctgaatttcgacctgctgaagctggctggcgacgtggaatccaacccaggccctactagtatggactggatttggcgcatccttttccttgtcggcgctgctaccggcgcgcattccttcgaagaagttcagctggttgagtctggcggaggactggttcaacctggcggaagcctgagactgtcttgtgccgccagcggcttcaacatcgactactacggaatgcactgggtccgacaggcccctggcaaaggacttgaatgggtcgcctctctgtacggcggcagcgatagcacagattacgccgactctgtgaagggcagattcaccatcagcgccgacaccagcaagaacaccgcctacctccagatgaactccctgagagccgaagataccgccgtgtactactgctccagacagtacagcgcctacttcgactattggggccagggaaccctggtcaccgttagctctacgcgtgaggacctgaagaacgtgttcccacctgaggtggccgtgttcgagcctagcgaggccgagatcagccacacccagaaagccaccctcgtgtgcctggctaccggcttctaccccgaccatgtggaactgtcttggtgggtcaacggcaaagaggtgcacagcggcgtgtgtaccgacccccagccactgaaagaacagcccgccctgaacgacagccggtactgcctgagcagcagactgagagtgtccgccaccttctggcagaacccccggaaccacttcagatgccaggtgcagttctacggcctgagcgagaacgacgagtggacccaggacagagccaagcccgtgacccagatcgtgtctgccgaagcctggggcagagccgatgatgtgattaagatccactggcaggaaaagaagtccaacaccatcctgggcagccaggaaggcaacaccatgaagaccaacgacacctacatgaagttcagctggctgaccgtgcccgagaagtccctggacaaagaacacagatgcatcgtgcggcacgaaaacaacaagaacggcgtggaccaggaaatcatcttcccacccatcaagaccgatgtgattacaatggaccccaaggacaactgctccaaggacgccaacgataccctgctgctccagctgaccaacaccagcgcctactacatgtacttgttgctgctgctgaagtccgtggtgtacttcgccatcatcacatgctgcctgctgatggctatggtcaagcggaaggacagccgggga

SEQ ID NO: 39605 - DNA, 2571 bp, synthetic construct
  source 1..2571: mol_type = other DNA
atggccttaccagtgaccgccttgctcctgccgctggccttgctgctccacgccgccaggccggaagtgcagctggttgaatctggcggaggactggttcagcctggcggatctctgagactgtcttgtgccgccagcggcttcagcttcagcgacttttggatgagctgggtccgacaggcccctggcaaaggacttgaatgggtcgccacaatcagccaggccggcagcgagaaggactacgtggactctgtgaagggcagattcaccatcagccgggacaacgccaagaagtccctgtacctccagatgaacagcctgagagccgaggacaccgccgtgtactattgtgcctctggcgtgtacagcttcgactacagaggccagggcaccctggtcacagtctcttctggtaccggcggaggcggatctggcggcggaggtagcggtggcggaggatctgaattcgacatccagatgacacagagccctagcagcctgtctgccagcgtgggagacagagtgaccatcacctgtagagccagccaggatgtgtctacagccgtggcctggtatcagcagaagcctggaaaggcccctaagctgctgatctacagcgccagctttctgtactccggcgtgcccagcagattcagcggaagcagaagcggcaccgacttcaccctgacaatatccagcctccagcctgaggacttcgccacctactactgccagcagtacctgtaccagccttggacattcggccagggcaccaaggtggaaatcaagagactcgaggacctgaagaacgtgttcccacctgaggtggccgtgttcgagcctagcgaggccgagatcagccacacccagaaagccaccctcgtgtgcctggctaccggcttctaccccgaccatgtggaactgtcttggtgggtcaacggcaaagaggtgcacagcggcgtgtgtaccgacccccagccactgaaagaacagcccgccctgaacgacagccggtactgcctgagcagcagactgagagtgtccgccaccttctggcagaacccccggaaccacttcagatgccaggtgcagttctacggcctgagcgagaacgacgagtggacccaggacagagccaagcccgtgacccagatcgtgtctgccgaagcctggggcagagccgatgatgtgattaagatccactggcaggaaaagaagtccaacaccatcctgggcagccaggaaggcaacaccatgaagaccaacgacacctacatgaagttcagctggctgaccgtgcccgagaagtccctggacaaagaacacagatgcatcgtgcggcacgaaaacaacaagaacggcgtggaccaggaaatcatcttcccacccatcaagaccgatgtgattacaatggaccccaaggacaactgctccaaggacgccaacgataccctgctgctccagctgaccaacaccagcgcctactacatgtacttgttgctgctgctgaagtccgtggtgtacttcgccatcatcacatgctgcctgctgatggctatggtcaagcggaaggacagccggggaagggccaagcgatctggatctggagcaacaaacttctcactactcaaacaagcaggtgacgtggaggagaatcccgggcctactagtatggactggatttggcgcatccttttccttgtcggcgctgctaccggcgcgcattccttcgaagaagttcagctggttgagtctggcggaggactggttcaacctggcggaagcctgagactgtcttgtgccgccagcggcttcaacatcgactactacggaatgcactgggtccgacaggcccctggcaaaggacttgaatgggtcgcctctctgtacggcggcagcgatagcacagattacgccgactctgtgaagggcagattcaccatcagcgccgacaccagcaagaacaccgcctacctccagatgaactccctgagagccgaagataccgccgtgtactactgctccagacagtacagcgcctacttcgactattggggccagggaaccctggtcaccgttagctctacgcgtatccagaaccctgatcctgccgtgtaccagctgcgggatagcaagagcagcgacaagagcgtgtgtctgttcaccgacttcgacagccagaccaacgtgtcccagagcaaggactccgacgtgtacatcaccgataagtgcgtgctggacatgcggagcatggacttcaagagcaactccgccgtggcctggtccaacaagtccgatttcgcctgcgccaacgccttcaacaacagcattatccccgaggacacattcttcccaagccccgagagcagcgactccaccgaccacgtgaagcccaaagagacagagaacaccaagcagcccagcaagagctgccacaagcccaaggccatcgtgcacaccgagaaagtgaacatgatgagcctgaccgtgctgggcctgcggatgctgttcgccaaaaccgtggccgtgaacttcctgctgaccgccaagctgttcttcctcctcaccgcc

SEQ ID NO: 39606 - DNA, 2583 bp, synthetic construct
  source 1..2583: mol_type = other DNA
atggccttaccagtgaccgccttgctcctgccgctggccttgctgctccacgccgccaggccggaagtgcagctggttgaatctggcggaggactggttcagcctggcggatctctgagactgtcttgtgccgccagcggcttcagcttcagcgacttttggatgagctgggtccgacaggcccctggcaaaggacttgaatgggtcgccacaatcagccaggccggcagcgagaaggactacgtggactctgtgaagggcagattcaccatcagccgggacaacgccaagaagtccctgtacctccagatgaacagcctgagagccgaggacaccgccgtgtactattgtgcctctggcgtgtacagcttcgactacagaggccagggcaccctggtcacagtctcttctggtaccggcggaggcggatctggcggcggaggtagcggtggcggaggatctgaattcgacatccagatgacacagagccctagcagcctgtctgccagcgtgggagacagagtgaccatcacctgtagagccagccaggatgtgtctacagccgtggcctggtatcagcagaagcctggaaaggcccctaagctgctgatctacagcgccagctttctgtactccggcgtgcccagcagattcagcggaagcagaagcggcaccgacttcaccctgacaatatccagcctccagcctgaggacttcgccacctactactgccagcagtacctgtaccagccttggacattcggccagggcaccaaggtggaaatcaagagactcgagatccagaaccctgatcctgccgtgtaccagctgcgggatagcaagagcagcgacaagagcgtgtgtctgttcaccgacttcgacagccagaccaacgtgtcccagagcaaggactccgacgtgtacatcaccgataagtgcgtgctggacatgcggagcatggacttcaagagcaactccgccgtggcctggtccaacaagtccgatttcgcctgcgccaacgccttcaacaacagcattatccccgaggacacattcttcccaagccccgagagcagcgactccaccgaccacgtgaagcccaaagagacagagaacaccaagcagcccagcaagagctgccacaagcccaaggccatcgtgcacaccgagaaagtgaacatgatgagcctgaccgtgctgggcctgcggatgctgttcgccaaaaccgtggccgtgaacttcctgctgaccgccaagctgttcttcctcctcaccgcccgcgccaagagaagcggatctggcgtgaagcagaccctgaatttcgacctgctgaagctggctggcgacgtggaatccaacccaggccctactagtatggactggatttggcgcatccttttccttgtcggcgctgctaccggcgcgcattccttcgaagaagttcagctggttgagtctggcggaggactggttcaacctggcggaagcctgagactgtcttgtgccgccagcggcttcaacatcgactactacggaatgcactgggtccgacaggcccctggcaaaggacttgaatgggtcgcctctctgtacggcggcagcgatagcacagattacgccgactctgtgaagggcagattcaccatcagcgccgacaccagcaagaacaccgcctacctccagatgaactccctgagagccgaagataccgccgtgtactactgctccagacagtacagcgcctacttcgactattggggccagggaaccctggtcaccgttagctctacgcgtgaggacctgaagaacgtgttcccacctgaggtggccgtgttcgagcctagcgaggccgagatcagccacacccagaaagccaccctcgtgtgcctggctaccggcttctaccccgaccatgtggaactgtcttggtgggtcaacggcaaagaggtgcacagcggcgtgtgtaccgacccccagccactgaaagaacagcccgccctgaacgacagccggtactgcctgagcagcagactgagagtgtccgccaccttctggcagaacccccggaaccacttcagatgccaggtgcagttctacggcctgagcgagaacgacgagtggacccaggacagagccaagcccgtgacccagatcgtgtctgccgaagcctggggcagagccgatgatgtgattaagatccactggcaggaaaagaagtccaacaccatcctgggcagccaggaaggcaacaccatgaagaccaacgacacctacatgaagttcagctggctgaccgtgcccgagaagtccctggacaaagaacacagatgcatcgtgcggcacgaaaacaacaagaacggcgtggaccaggaaatcatcttcccacccatcaagaccgatgtgattacaatggaccccaaggacaactgctccaaggacgccaacgataccctgctgctccagctgaccaacaccagcgcctactacatgtacttgttgctgctgctgaagtccgtggtgtacttcgccatcatcacatgctgcctgctgatggctatggtcaagcggaaggacagccgggga

SEQ ID NO: 39607 - DNA, 2982 bp, synthetic construct
  source 1..2982: mol_type = other DNA
atggccttaccagtgaccgccttgctcctgccgctggccttgctgctccacgccgccaggccggaagtgcagctggttgaatctggcggaggactggttcagcctggcggatctctgagactgtcttgtgccgccagcggcttcagcttcagcgacttttggatgagctgggtccgacaggcccctggcaaaggacttgaatgggtcgccacaatcagccaggccggcagcgagaaggactacgtggactctgtgaagggcagattcaccatcagccgggacaacgccaagaagtccctgtacctccagatgaacagcctgagagccgaggacaccgccgtgtactattgtgcctctggcgtgtacagcttcgactacagaggccagggcaccctggtcacagtctcttctggtaccggcggaggcggatctggcggcggaggtagcggtggcggaggatctgaattcgacatccagatgacacagagccctagcagcctgtctgccagcgtgggagacagagtgaccatcacctgtagagccagccaggatgtgtctacagccgtggcctggtatcagcagaagcctggaaaggcccctaagctgctgatctacagcgccagctttctgtactccggcgtgcccagcagattcagcggaagcagaagcggcaccgacttcaccctgacaatatccagcctccagcctgaggacttcgccacctactactgccagcagtacctgtaccagccttggacattcggccagggcaccaaggtggaaatcaagagactcgaggacctgaagaacgtgttcccacctgaggtggccgtgttcgagcctagcgaggccgagatcagccacacccagaaagccaccctcgtgtgcctggctaccggcttctaccccgaccatgtggaactgtcttggtgggtcaacggcaaagaggtgcacagcggcgtgtgtaccgacccccagccactgaaagaacagcccgccctgaacgacagccggtactgcctgagcagcagactgagagtgtccgccaccttctggcagaacccccggaaccacttcagatgccaggtgcagttctacggcctgagcgagaacgacgagtggacccaggacagagccaagcccgtgacccagatcgtgtctgccgaagcctggggcagagccgatgatgtgattaagatccactggcaggaaaagaagtccaacaccatcctgggcagccaggaaggcaacaccatgaagaccaacgacacctacatgaagttcagctggctgaccgtgcccgagaagtccctggacaaagaacacagatgcatcgtgcggcacgaaaacaacaagaacggcgtggaccaggaaatcatcttcccacccatcaagaccgatgtgattacaatggaccccaaggacaactgctccaaggacgccaacgataccctgctgctccagctgaccaacaccagcgcctactacatgtacttgttgctgctgctgaagtccgtggtgtacttcgccatcatcacatgctgcctgctgatggctatggtcaagcggaaggacagccggggaagggccaagcgatctggatctggagcaacaaacttctcactactcaaacaagcaggtgacgtggaggagaatcccgggcctactagtatggactggatttggcgcatccttttccttgtcggcgctgctaccggcgcgcattccgggccccagctccagctgcaagagtctggacctggcctggtcaagcctagcgagacactgagcctgacctgtaccgtgtccggcgatagcatcagcagcggcgattactactggggctggatcagacagcctcctggcaaaggactggaatggatcggccacatctactacagcggcgtgacctactacaaccccagcctgaagtccagagtgaccatcagcgtggacaccagccggaaccagttctccctgaagctgtctagcgtgacagccgccgataccgccgtgtactactgcaccagagaggacagcagcaactggcggagtagaggccagggaacactggtcacagttagctctggatccggcggaggcggaagtggaggcggaggatctggcggcggaggctctttcgaagaagttcagctggttgagtctggcggaggactggttcaacctggcggaagcctgagactgtcttgtgccgccagcggcttcaacatcgactactacggaatgcactgggtccgacaggcccctggcaaaggacttgaatgggtcgcctctctgtacggcggcagcgatagcacagattacgccgactctgtgaagggcagattcaccatcagcgccgacaccagcaagaacaccgcctacctccagatgaactccctgagagccgaagataccgccgtgtactactgctccagacagtacagcgcctacttcgactattggggccagggaaccctggtcaccgttagctctacgcgtatccagaaccctgatcctgccgtgtaccagctgcgggatagcaagagcagcgacaagagcgtgtgtctgttcaccgacttcgacagccagaccaacgtgtcccagagcaaggactccgacgtgtacatcaccgataagtgcgtgctggacatgcggagcatggacttcaagagcaactccgccgtggcctggtccaacaagtccgatttcgcctgcgccaacgccttcaacaacagcattatccccgaggacacattcttcccaagccccgagagcagcgactccaccgaccacgtgaagcccaaagagacagagaacaccaagcagcccagcaagagctgccacaagcccaaggccatcgtgcacaccgagaaagtgaacatgatgagcctgaccgtgctgggcctgcggatgctgttcgccaaaaccgtggccgtgaacttcctgctgaccgccaagctgttcttcctcctcaccgcc

SEQ ID NO: 39608 - DNA, 2994 bp, synthetic construct
  source 1..2994: mol_type = other DNA
atggccttaccagtgaccgccttgctcctgccgctggccttgctgctccacgccgccaggccggaagtgcagctggttgaatctggcggaggactggttcagcctggcggatctctgagactgtcttgtgccgccagcggcttcagcttcagcgacttttggatgagctgggtccgacaggcccctggcaaaggacttgaatgggtcgccacaatcagccaggccggcagcgagaaggactacgtggactctgtgaagggcagattcaccatcagccgggacaacgccaagaagtccctgtacctccagatgaacagcctgagagccgaggacaccgccgtgtactattgtgcctctggcgtgtacagcttcgactacagaggccagggcaccctggtcacagtctcttctggtaccggcggaggcggatctggcggcggaggtagcggtggcggaggatctgaattcgacatccagatgacacagagccctagcagcctgtctgccagcgtgggagacagagtgaccatcacctgtagagccagccaggatgtgtctacagccgtggcctggtatcagcagaagcctggaaaggcccctaagctgctgatctacagcgccagctttctgtactccggcgtgcccagcagattcagcggaagcagaagcggcaccgacttcaccctgacaatatccagcctccagcctgaggacttcgccacctactactgccagcagtacctgtaccagccttggacattcggccagggcaccaaggtggaaatcaagagactcgagatccagaaccctgatcctgccgtgtaccagctgcgggatagcaagagcagcgacaagagcgtgtgtctgttcaccgacttcgacagccagaccaacgtgtcccagagcaaggactccgacgtgtacatcaccgataagtgcgtgctggacatgcggagcatggacttcaagagcaactccgccgtggcctggtccaacaagtccgatttcgcctgcgccaacgccttcaacaacagcattatccccgaggacacattcttcccaagccccgagagcagcgactccaccgaccacgtgaagcccaaagagacagagaacaccaagcagcccagcaagagctgccacaagcccaaggccatcgtgcacaccgagaaagtgaacatgatgagcctgaccgtgctgggcctgcggatgctgttcgccaaaaccgtggccgtgaacttcctgctgaccgccaagctgttcttcctcctcaccgcccgcgccaagagaagcggatctggcgtgaagcagaccctgaatttcgacctgctgaagctggctggcgacgtggaatccaacccaggccctactagtatggactggatttggcgcatccttttccttgtcggcgctgctaccggcgcgcattccgggccccagctccagctgcaagagtctggacctggcctggtcaagcctagcgagacactgagcctgacctgtaccgtgtccggcgatagcatcagcagcggcgattactactggggctggatcagacagcctcctggcaaaggactggaatggatcggccacatctactacagcggcgtgacctactacaaccccagcctgaagtccagagtgaccatcagcgtggacaccagccggaaccagttctccctgaagctgtctagcgtgacagccgccgataccgccgtgtactactgcaccagagaggacagcagcaactggcggagtagaggccagggaacactggtcacagttagctctggatccggcggaggcggaagtggaggcggaggatctggcggcggaggctctttcgaagaagttcagctggttgagtctggcggaggactggttcaacctggcggaagcctgagactgtcttgtgccgccagcggcttcaacatcgactactacggaatgcactgggtccgacaggcccctggcaaaggacttgaatgggtcgcctctctgtacggcggcagcgatagcacagattacgccgactctgtgaagggcagattcaccatcagcgccgacaccagcaagaacaccgcctacctccagatgaactccctgagagccgaagataccgccgtgtactactgctccagacagtacagcgcctacttcgactattggggccagggaaccctggtcaccgttagctctacgcgtgaggacctgaagaacgtgttcccacctgaggtggccgtgttcgagcctagcgaggccgagatcagccacacccagaaagccaccctcgtgtgcctggctaccggcttctaccccgaccatgtggaactgtcttggtgggtcaacggcaaagaggtgcacagcggcgtgtgtaccgacccccagccactgaaagaacagcccgccctgaacgacagccggtactgcctgagcagcagactgagagtgtccgccaccttctggcagaacccccggaaccacttcagatgccaggtgcagttctacggcctgagcgagaacgacgagtggacccaggacagagccaagcccgtgacccagatcgtgtctgccgaagcctggggcagagccgatgatgtgattaagatccactggcaggaaaagaagtccaacaccatcctgggcagccaggaaggcaacaccatgaagaccaacgacacctacatgaagttcagctggctgaccgtgcccgagaagtccctggacaaagaacacagatgcatcgtgcggcacgaaaacaacaagaacggcgtggaccaggaaatcatcttcccacccatcaagaccgatgtgattacaatggaccccaaggacaactgctccaaggacgccaacgataccctgctgctccagctgaccaacaccagcgcctactacatgtacttgttgctgctgctgaagtccgtggtgtacttcgccatcatcacatgctgcctgctgatggctatggtcaagcggaaggacagccgggga

SEQ ID NO: 39609 - DNA, 2160 bp, synthetic construct
  source 1..2160: mol_type = other DNA
atggccttaccagtgaccgccttgctcctgccgctggccttgctgctccacgccgccaggccggacatccagatgacacagagccctagcagcctgtctgccagcgtgggagacagagtgaccatcacctgtagagccagccaggatgtgtctacagccgtggcctggtatcagcagaagcctggaaaggcccctaagctgctgatctacagcgccagctttctgtactccggcgtgcccagcagattcagcggaagcagaagcggcaccgacttcaccctgacaatatccagcctccagcctgaggacttcgccacctactactgccagcagtacctgtaccagccttggacattcggccagggcaccaaggtggaaatcaagagactcgaggacctgaagaacgtgttcccacctgaggtggccgtgttcgagcctagcgaggccgagatcagccacacccagaaagccaccctcgtgtgcctggctaccggcttctaccccgaccatgtggaactgtcttggtgggtcaacggcaaagaggtgcacagcggcgtgtgtaccgacccccagccactgaaagaacagcccgccctgaacgacagccggtactgcctgagcagcagactgagagtgtccgccaccttctggcagaacccccggaaccacttcagatgccaggtgcagttctacggcctgagcgagaacgacgagtggacccaggacagagccaagcccgtgacccagatcgtgtctgccgaagcctggggcagagccgatgatgtgattaagatccactggcaggaaaagaagtccaacaccatcctgggcagccaggaaggcaacaccatgaagaccaacgacacctacatgaagttcagctggctgaccgtgcccgagaagtccctggacaaagaacacagatgcatcgtgcggcacgaaaacaacaagaacggcgtggaccaggaaatcatcttcccacccatcaagaccgatgtgattacaatggaccccaaggacaactgctccaaggacgccaacgataccctgctgctccagctgaccaacaccagcgcctactacatgtacttgttgctgctgctgaagtccgtggtgtacttcgccatcatcacatgctgcctgctgcggagaaccgccttctgctgcaacggcgagaagtctagggccaagcgatctggatctggagcaacaaacttctcactactcaaacaagcaggtgacgtggaggagaatcccgggcctactagtatggactggatttggcgcatccttttccttgtcggcgctgctaccggcgcgcattccttcgaagaagttcagctggttgagtctggcggaggactggttcaacctggcggaagcctgagactgtcttgtgccgccagcggcttcaacatcgactactacggaatgcactgggtccgacaggcccctggcaaaggacttgaatgggtcgcctctctgtacggcggcagcgatagcacagattacgccgactctgtgaagggcagattcaccatcagcgccgacaccagcaagaacaccgcctacctccagatgaactccctgagagccgaagataccgccgtgtactactgctccagacagtacagcgcctacttcgactattggggccagggaaccctggtcaccgttagctctacgcgtatccagaaccctgatcctgccgtgtaccagctgcgggatagcaagagcagcgacaagagcgtgtgtctgttcaccgacttcgacagccagaccaacgtgtcccagagcaaggactccgacgtgtacatcaccgataagtgcgtgctggacatgcggagcatggacttcaagagcaactccgccgtggcctggtccaacaagtccgatttcgcctgcgccaacgccttcaacaacagcattatccccgaggacacattcttcccaagccccgagagcagcgactccaccgaccacgtgaagcccaaagagacagagaacaccaagcagcccagcaagagctgccacaagcccaaggccatcgtgcacaccgagaaagtgaacatgatgagcctgaccgtgctgggcctgcggatgctgttcgccaaaaccgtggccgtgaacttcctgctgaccgccaagctgttcttcctc

SEQ ID NO: 39610 - DNA, 2172 bp, synthetic construct
  source 1..2172: mol_type = other DNA
atggccttaccagtgaccgccttgctcctgccgctggccttgctgctccacgccgccaggccggacatccagatgacacagagccctagcagcctgtctgccagcgtgggagacagagtgaccatcacctgtagagccagccaggatgtgtctacagccgtggcctggtatcagcagaagcctggaaaggcccctaagctgctgatctacagcgccagctttctgtactccggcgtgcccagcagattcagcggaagcagaagcggcaccgacttcaccctgacaatatccagcctccagcctgaggacttcgccacctactactgccagcagtacctgtaccagccttggacattcggccagggcaccaaggtggaaatcaagagactcgagatccagaaccctgatcctgccgtgtaccagctgcgggatagcaagagcagcgacaagagcgtgtgtctgttcaccgacttcgacagccagaccaacgtgtcccagagcaaggactccgacgtgtacatcaccgataagtgcgtgctggacatgcggagcatggacttcaagagcaactccgccgtggcctggtccaacaagtccgatttcgcctgcgccaacgccttcaacaacagcattatccccgaggacacattcttcccaagccccgagagcagcgactccaccgaccacgtgaagcccaaagagacagagaacaccaagcagcccagcaagagctgccacaagcccaaggccatcgtgcacaccgagaaagtgaacatgatgagcctgaccgtgctgggcctgcggatgctgttcgccaaaaccgtggccgtgaacttcctgctgaccgccaagctgttcttcctccgcgccaagagaagcggatctggcgtgaagcagaccctgaatttcgacctgctgaagctggctggcgacgtggaatccaacccaggccctactagtatggactggatttggcgcatccttttccttgtcggcgctgctaccggcgcgcattccttcgaagaagttcagctggttgagtctggcggaggactggttcaacctggcggaagcctgagactgtcttgtgccgccagcggcttcaacatcgactactacggaatgcactgggtccgacaggcccctggcaaaggacttgaatgggtcgcctctctgtacggcggcagcgatagcacagattacgccgactctgtgaagggcagattcaccatcagcgccgacaccagcaagaacaccgcctacctccagatgaactccctgagagccgaagataccgccgtgtactactgctccagacagtacagcgcctacttcgactattggggccagggaaccctggtcaccgttagctctacgcgtgaggacctgaagaacgtgttcccacctgaggtggccgtgttcgagcctagcgaggccgagatcagccacacccagaaagccaccctcgtgtgcctggctaccggcttctaccccgaccatgtggaactgtcttggtgggtcaacggcaaagaggtgcacagcggcgtgtgtaccgacccccagccactgaaagaacagcccgccctgaacgacagccggtactgcctgagcagcagactgagagtgtccgccaccttctggcagaacccccggaaccacttcagatgccaggtgcagttctacggcctgagcgagaacgacgagtggacccaggacagagccaagcccgtgacccagatcgtgtctgccgaagcctggggcagagccgatgatgtgattaagatccactggcaggaaaagaagtccaacaccatcctgggcagccaggaaggcaacaccatgaagaccaacgacacctacatgaagttcagctggctgaccgtgcccgagaagtccctggacaaagaacacagatgcatcgtgcggcacgaaaacaacaagaacggcgtggaccaggaaatcatcttcccacccatcaagaccgatgtgattacaatggaccccaaggacaactgctccaaggacgccaacgataccctgctgctccagctgaccaacaccagcgcctactacatgtacttgttgctgctgctgaagtccgtggtgtacttcgccatcatcacatgctgcctgctgcggagaaccgccttctgctgcaacggcgagaagtct

SEQ ID NO: 39611 - DNA, 2565 bp, synthetic construct
  source 1..2565: mol_type = other DNA
atggccttaccagtgaccgccttgctcctgccgctggccttgctgctccacgccgccaggccggaagtgcagctggttgaatctggcggaggactggttcagcctggcggatctctgagactgtcttgtgccgccagcggcttcagcttcagcgacttttggatgagctgggtccgacaggcccctggcaaaggacttgaatgggtcgccacaatcagccaggccggcagcgagaaggactacgtggactctgtgaagggcagattcaccatcagccgggacaacgccaagaagtccctgtacctccagatgaacagcctgagagccgaggacaccgccgtgtactattgtgcctctggcgtgtacagcttcgactacagaggccagggcaccctggtcacagtctcttctggtaccggcggaggcggatctggcggcggaggtagcggtggcggaggatctgaattcgacatccagatgacacagagccctagcagcctgtctgccagcgtgggagacagagtgaccatcacctgtagagccagccaggatgtgtctacagccgtggcctggtatcagcagaagcctggaaaggcccctaagctgctgatctacagcgccagctttctgtactccggcgtgcccagcagattcagcggaagcagaagcggcaccgacttcaccctgacaatatccagcctccagcctgaggacttcgccacctactactgccagcagtacctgtaccagccttggacattcggccagggcaccaaggtggaaatcaagagactcgaggacctgaagaacgtgttcccacctgaggtggccgtgttcgagcctagcgaggccgagatcagccacacccagaaagccaccctcgtgtgcctggctaccggcttctaccccgaccatgtggaactgtcttggtgggtcaacggcaaagaggtgcacagcggcgtgtgtaccgacccccagccactgaaagaacagcccgccctgaacgacagccggtactgcctgagcagcagactgagagtgtccgccaccttctggcagaacccccggaaccacttcagatgccaggtgcagttctacggcctgagcgagaacgacgagtggacccaggacagagccaagcccgtgacccagatcgtgtctgccgaagcctggggcagagccgatgatgtgattaagatccactggcaggaaaagaagtccaacaccatcctgggcagccaggaaggcaacaccatgaagaccaacgacacctacatgaagttcagctggctgaccgtgcccgagaagtccctggacaaagaacacagatgcatcgtgcggcacgaaaacaacaagaacggcgtggaccaggaaatcatcttcccacccatcaagaccgatgtgattacaatggaccccaaggacaactgctccaaggacgccaacgataccctgctgctccagctgaccaacaccagcgcctactacatgtacttgttgctgctgctgaagtccgtggtgtacttcgccatcatcacatgctgcctgctgcggagaaccgccttctgctgcaacggcgagaagtctagggccaagcgatctggatctggagcaacaaacttctcactactcaaacaagcaggtgacgtggaggagaatcccgggcctactagtatggactggatttggcgcatccttttccttgtcggcgctgctaccggcgcgcattccttcgaagaagttcagctggttgagtctggcggaggactggttcaacctggcggaagcctgagactgtcttgtgccgccagcggcttcaacatcgactactacggaatgcactgggtccgacaggcccctggcaaaggacttgaatgggtcgcctctctgtacggcggcagcgatagcacagattacgccgactctgtgaagggcagattcaccatcagcgccgacaccagcaagaacaccgcctacctccagatgaactccctgagagccgaagataccgccgtgtactactgctccagacagtacagcgcctacttcgactattggggccagggaaccctggtcaccgttagctctacgcgtatccagaaccctgatcctgccgtgtaccagctgcgggatagcaagagcagcgacaagagcgtgtgtctgttcaccgacttcgacagccagaccaacgtgtcccagagcaaggactccgacgtgtacatcaccgataagtgcgtgctggacatgcggagcatggacttcaagagcaactccgccgtggcctggtccaacaagtccgatttcgcctgcgccaacgccttcaacaacagcattatccccgaggacacattcttcccaagccccgagagcagcgactccaccgaccacgtgaagcccaaagagacagagaacaccaagcagcccagcaagagctgccacaagcccaaggccatcgtgcacaccgagaaagtgaacatgatgagcctgaccgtgctgggcctgcggatgctgttcgccaaaaccgtggccgtgaacttcctgctgaccgccaagctgttcttcctc

SEQ ID NO: 39612 - DNA, 2976 bp, synthetic construct
  source 1..2976: mol_type = other DNA
atggccttaccagtgaccgccttgctcctgccgctggccttgctgctccacgccgccaggccggaagtgcagctggttgaatctggcggaggactggttcagcctggcggatctctgagactgtcttgtgccgccagcggcttcagcttcagcgacttttggatgagctgggtccgacaggcccctggcaaaggacttgaatgggtcgccacaatcagccaggccggcagcgagaaggactacgtggactctgtgaagggcagattcaccatcagccgggacaacgccaagaagtccctgtacctccagatgaacagcctgagagccgaggacaccgccgtgtactattgtgcctctggcgtgtacagcttcgactacagaggccagggcaccctggtcacagtctcttctggtaccggcggaggcggatctggcggcggaggtagcggtggcggaggatctgaattcgacatccagatgacacagagccctagcagcctgtctgccagcgtgggagacagagtgaccatcacctgtagagccagccaggatgtgtctacagccgtggcctggtatcagcagaagcctggaaaggcccctaagctgctgatctacagcgccagctttctgtactccggcgtgcccagcagattcagcggaagcagaagcggcaccgacttcaccctgacaatatccagcctccagcctgaggacttcgccacctactactgccagcagtacctgtaccagccttggacattcggccagggcaccaaggtggaaatcaagagactcgaggacctgaagaacgtgttcccacctgaggtggccgtgttcgagcctagcgaggccgagatcagccacacccagaaagccaccctcgtgtgcctggctaccggcttctaccccgaccatgtggaactgtcttggtgggtcaacggcaaagaggtgcacagcggcgtgtgtaccgacccccagccactgaaagaacagcccgccctgaacgacagccggtactgcctgagcagcagactgagagtgtccgccaccttctggcagaacccccggaaccacttcagatgccaggtgcagttctacggcctgagcgagaacgacgagtggacccaggacagagccaagcccgtgacccagatcgtgtctgccgaagcctggggcagagccgatgatgtgattaagatccactggcaggaaaagaagtccaacaccatcctgggcagccaggaaggcaacaccatgaagaccaacgacacctacatgaagttcagctggctgaccgtgcccgagaagtccctggacaaagaacacagatgcatcgtgcggcacgaaaacaacaagaacggcgtggaccaggaaatcatcttcccacccatcaagaccgatgtgattacaatggaccccaaggacaactgctccaaggacgccaacgataccctgctgctccagctgaccaacaccagcgcctactacatgtacttgttgctgctgctgaagtccgtggtgtacttcgccatcatcacatgctgcctgctgcggagaaccgccttctgctgcaacggcgagaagtctagggccaagcgatctggatctggagcaacaaacttctcactactcaaacaagcaggtgacgtggaggagaatcccgggcctactagtatggactggatttggcgcatccttttccttgtcggcgctgctaccggcgcgcattccgggccccagctccagctgcaagagtctggacctggcctggtcaagcctagcgagacactgagcctgacctgtaccgtgtccggcgatagcatcagcagcggcgattactactggggctggatcagacagcctcctggcaaaggactggaatggatcggccacatctactacagcggcgtgacctactacaaccccagcctgaagtccagagtgaccatcagcgtggacaccagccggaaccagttctccctgaagctgtctagcgtgacagccgccgataccgccgtgtactactgcaccagagaggacagcagcaactggcggagtagaggccagggaacactggtcacagttagctctggatccggcggaggcggaagtggaggcggaggatctggcggcggaggctctttcgaagaagttcagctggttgagtctggcggaggactggttcaacctggcggaagcctgagactgtcttgtgccgccagcggcttcaacatcgactactacggaatgcactgggtccgacaggcccctggcaaaggacttgaatgggtcgcctctctgtacggcggcagcgatagcacagattacgccgactctgtgaagggcagattcaccatcagcgccgacaccagcaagaacaccgcctacctccagatgaactccctgagagccgaagataccgccgtgtactactgctccagacagtacagcgcctacttcgactattggggccagggaaccctggtcaccgttagctctacgcgtatccagaaccctgatcctgccgtgtaccagctgcgggatagcaagagcagcgacaagagcgtgtgtctgttcaccgacttcgacagccagaccaacgtgtcccagagcaaggactccgacgtgtacatcaccgataagtgcgtgctggacatgcggagcatggacttcaagagcaactccgccgtggcctggtccaacaagtccgatttcgcctgcgccaacgccttcaacaacagcattatccccgaggacacattcttcccaagccccgagagcagcgactccaccgaccacgtgaagcccaaagagacagagaacaccaagcagcccagcaagagctgccacaagcccaaggccatcgtgcacaccgagaaagtgaacatgatgagcctgaccgtgctgggcctgcggatgctgttcgccaaaaccgtggccgtgaacttcctgctgaccgccaagctgttcttcctc

SEQ ID NO: 39613 - DNA, 1854 bp, synthetic construct
  source 1..1854: mol_type = other DNA
atggccttaccagtgaccgccttgctcctgccgctggccttgctgctccacgccgccaggccggacatccagatgacacagagccctagcagcctgtctgccagcgtgggagacagagtgaccatcacctgtagagccagccaggatgtgtctacagccgtggcctggtatcagcagaagcctggaaaggcccctaagctgctgatctacagcgccagctttctgtactccggcgtgcccagcagattcagcggaagcagaagcggcaccgacttcaccctgacaatatccagcctccagcctgaggacttcgccacctactactgccagcagtacctgtaccagccttggacattcggccagggcaccaaggtggaaatcaagagactcgaggacctgaagaacgtgttcccacctgaggtggccgtgttcgagcctagcgaggccgagatcagccacacccagaaagccaccctcgtgtgcctggctaccggcttctaccccgaccatgtggaactgtcttggtgggtcaacggcaaagaggtgcacagcggcgtgtctaccgacccccagccactgaaagaacagcccgccctgaacgacagccggtactgcctgagcagcagactgagagtgtccgccaccttctggcagaacccccggaaccacttcagatgccaggtgcagttctacggcctgagcgagaacgacgagtggacccaggacagagccaagcccgtgacccagatcgtgtctgccgaagcctggggcagagccgattgcgacgtgaagctggtggaaaagagcttcgagacagacaccaacctgaacttccagaacctgagcgtgatcggcttcagaatcctgctgctgaaagtggccggctttaacctgctgatgaccctgcggctgtggtccagcagggccaagcgatctggatctggagcaacaaacttctcactactcaaacaagcaggtgacgtggaggagaatcccgggcctactagtatggactggatttggcgcatccttttccttgtcggcgctgctaccggcgcgcattccttcgaagaagttcagctggttgagtctggcggaggactggttcaacctggcggaagcctgagactgtcttgtgccgccagcggcttcaacatcgactactacggaatgcactgggtccgacaggcccctggcaaaggacttgaatgggtcgcctctctgtacggcggcagcgatagcacagattacgccgactctgtgaagggcagattcaccatcagcgccgacaccagcaagaacaccgcctacctccagatgaactccctgagagccgaagataccgccgtgtactactgctccagacagtacagcgcctacttcgactattggggccagggaaccctggtcaccgttagctctacgcgtatccagaaccctgatcctgccgtgtaccagctgcgggatagcaagagcagcgacaagagcgtgtgtctgttcaccgacttcgacagccagaccaacgtgtcccagagcaaggactccgacgtgtacatcaccgataagaccgtgctggacatgcggagcatggacttcaagagcaactccgccgtggcctggtccaacaagtccgatttcgcctgcgccaacgccttcaacaacagcattatccccgaggacacattcttcccaagccccgagagcagctgcggctttaccagcgagagctaccagcagggcgtgctgagcgccaccatcctgtacgagatcctgctgggcaaggccaccctgtacgccgtgctggtgtctgccctggtgctgatggctatggtcaagcggaaggacagccgggga

SEQ ID NO: 39614 - DNA, 1854 bp, synthetic construct
  source 1..1854: mol_type = other DNA
atggccttaccagtgaccgccttgctcctgccgctggccttgctgctccacgccgccaggccggacatccagatgacacagagccctagcagcctgtctgccagcgtgggagacagagtgaccatcacctgtagagccagccaggatgtgtctacagccgtggcctggtatcagcagaagcctggaaaggcccctaagctgctgatctacagcgccagctttctgtactccggcgtgcccagcagattcagcggaagcagaagcggcaccgacttcaccctgacaatatccagcctccagcctgaggacttcgccacctactactgccagcagtacctgtaccagccttggacattcggccagggcaccaaggtggaaatcaagagactcgaggacctgaagaacgtgttcccacctgaggtggccgtgttcgagcctagcgaggccgagatcagccacacccagaaagccaccctcgtgtgcctggctaccggcttctaccccgaccatgtggaactgtcttggtgggtcaacggcaaagaggtgcacagcggcgtgtctaccgacccccagccactgaaagaacagcccgccctgaacgacagccggtactgcctgagcagcagactgagagtgtccgccaccttctggcagaacccccggaaccacttcagatgccaggtgcagttctacggcctgagcgagaacgacgagtggacccaggacagagccaagcccgtgacccagatcgtgtctgccgaagcctggggcagagccgattgcggctttaccagcgagagctaccagcagggcgtgctgagcgccaccaacctgagcgtgatcggcttcagaatcctgctgctgaaagtggccggctttaacctgctgatgaccctgcggctgtggtccagcagggccaagcgatctggatctggagcaacaaacttctcactactcaaacaagcaggtgacgtggaggagaatcccgggcctactagtatggactggatttggcgcatccttttccttgtcggcgctgctaccggcgcgcattccttcgaagaagttcagctggttgagtctggcggaggactggttcaacctggcggaagcctgagactgtcttgtgccgccagcggcttcaacatcgactactacggaatgcactgggtccgacaggcccctggcaaaggacttgaatgggtcgcctctctgtacggcggcagcgatagcacagattacgccgactctgtgaagggcagattcaccatcagcgccgacaccagcaagaacaccgcctacctccagatgaactccctgagagccgaagataccgccgtgtactactgctccagacagtacagcgcctacttcgactattggggccagggaaccctggtcaccgttagctctacgcgtatccagaaccctgatcctgccgtgtaccagctgcgggatagcaagagcagcgacaagagcgtgtgtctgttcaccgacttcgacagccagaccaacgtgtcccagagcaaggactccgacgtgtacatcaccgataagaccgtgctggacatgcggagcatggacttcaagagcaactccgccgtggcctggtccaacaagtccgatttcgcctgcgccaacgccttcaacaacagcattatccccgaggacacattcttcccaagccccgagagcagctgcgacgtgaagctggtggaaaagagcttcgagacagacaccaacctgaacttccagatcctgtacgagatcctgctgggcaaggccaccctgtacgccgtgctggtgtctgccctggtgctgatggctatggtcaagcggaaggacagccgggga

SEQ ID NO: 39615 - DNA, 2166 bp, synthetic construct
  source 1..2166: mol_type = other DNA
atggccttaccagtgaccgccttgctcctgccgctggccttgctgctccacgccgccaggccggacatccagatgacacagagccctagcagcctgtctgccagcgtgggagacagagtgaccatcacctgtagagccagccaggatgtgtctacagccgtggcctggtatcagcagaagcctggaaaggcccctaagctgctgatctacagcgccagctttctgtactccggcgtgcccagcagattcagcggaagcagaagcggcaccgacttcaccctgacaatatccagcctccagcctgaggacttcgccacctactactgccagcagtacctgtaccagccttggacattcggccagggcaccaaggtggaaatcaagagactcgaggacctgaagaacgtgttcccacctgaggtggccgtgttcgagcctagcgaggccgagatcagccacacccagaaagccaccctcgtgtgcctggctaccggcttctaccccgaccatgtggaactgtcttggtgggtcaacggcaaagaggtgcacagcggcgtgtctaccgacccccagccactgaaagaacagcccgccctgaacgacagccggtactgcctgagcagcagactgagagtgtccgccaccttctggcagaacccccggaaccacttcagatgccaggtgcagttctacggcctgagcgagaacgacgagtggacccaggacagagccaagcccgtgacccagatcgtgtctgccgaagcctggggcagagccgatgatgtgattaagatccactggcaggaaaagaagtccaacaccatcctgggcagccaggaaggcaacaccatgaagaccaacgacacctacatgaagttcagctggctgaccgtgcccgagaagtccctggacaaagaacacagatgcatcgtgcggcacgaaaacaacaagaacggcgtggaccaggaaatcatcttcccacccatcaagaccgatgtgattacaatggaccccaaggacaactgctccaaggacgccaacgataccctgctgctccagctgaccaacaccagcgcctactacatgtacttgttgctgctgctgaagtccgtggtgtacttcgccatcatcacatgctgcctgctgatggctatggtcaagcggaaggacagccggggaagggccaagcgatctggatctggagcaacaaacttctcactactcaaacaagcaggtgacgtggaggagaatcccgggcctactagtatggactggatttggcgcatccttttccttgtcggcgctgctaccggcgcgcattccttcgaagaagttcagctggttgagtctggcggaggactggttcaacctggcggaagcctgagactgtcttgtgccgccagcggcttcaacatcgactactacggaatgcactgggtccgacaggcccctggcaaaggacttgaatgggtcgcctctctgtacggcggcagcgatagcacagattacgccgactctgtgaagggcagattcaccatcagcgccgacaccagcaagaacaccgcctacctccagatgaactccctgagagccgaagataccgccgtgtactactgctccagacagtacagcgcctacttcgactattggggccagggaaccctggtcaccgttagctctacgcgtatccagaaccctgatcctgccgtgtaccagctgcgggatagcaagagcagcgacaagagcgtgtgtctgttcaccgacttcgacagccagaccaacgtgtcccagagcaaggactccgacgtgtacatcaccgataagaccgtgctggacatgcggagcatggacttcaagagcaactccgccgtggcctggtccaacaagtccgatttcgcctgcgccaacgccttcaacaacagcattatccccgaggacacattcttcccaagccccgagagcagcgactccaccgaccacgtgaagcccaaagagacagagaacaccaagcagcccagcaagagctgccacaagcccaaggccatcgtgcacaccgagaaagtgaacatgatgagcctgaccgtgctgggcctgcggatgctgttcgccaaaaccgtggccgtgaacttcctgctgaccgccaagctgttcttcctcctcaccgcc

SEQ ID NO: 39616 - DNA, 2160 bp, synthetic construct
  source 1..2160: mol_type = other DNA
atggccttaccagtgaccgccttgctcctgccgctggccttgctgctccacgccgccaggccggacatccagatgacacagagccctagcagcctgtctgccagcgtgggagacagagtgaccatcacctgtagagccagccaggatgtgtctacagccgtggcctggtatcagcagaagcctggaaaggcccctaagctgctgatctacagcgccagctttctgtactccggcgtgcccagcagattcagcggaagcagaagcggcaccgacttcaccctgacaatatccagcctccagcctgaggacttcgccacctactactgccagcagtacctgtaccagccttggacattcggccagggcaccaaggtggaaatcaagagactcgaggacctgaagaacgtgttcccacctgaggtggccgtgttcgagcctagcgaggccgagatcagccacacccagaaagccaccctcgtgtgcctggctaccggcttctaccccgaccatgtggaactgtcttggtgggtcaacggcaaagaggtgcacagcggcgtgtctaccgacccccagccactgaaagaacagcccgccctgaacgacagccggtactgcctgagcagcagactgagagtgtccgccaccttctggcagaacccccggaaccacttcagatgccaggtgcagttctacggcctgagcgagaacgacgagtggacccaggacagagccaagcccgtgacccagatcgtgtctgccgaagcctggggcagagccgatgatgtgattaagatccactggcaggaaaagaagtccaacaccatcctgggcagccaggaaggcaacaccatgaagaccaacgacacctacatgaagttcagctggctgaccgtgcccgagaagtccctggacaaagaacacagatgcatcgtgcggcacgaaaacaacaagaacggcgtggaccaggaaatcatcttcccacccatcaagaccgatgtgattacaatggaccccaaggacaactgctccaaggacgccaacgataccctgctgctccagctgaccaacaccagcgcctactacatgtacttgttgctgctgctgaagtccgtggtgtacttcgccatcatcacatgctgcctgctgcggagaaccgccttctgctgcaacggcgagaagtctagggccaagcgatctggatctggagcaacaaacttctcactactcaaacaagcaggtgacgtggaggagaatcccgggcctactagtatggactggatttggcgcatccttttccttgtcggcgctgctaccggcgcgcattccttcgaagaagttcagctggttgagtctggcggaggactggttcaacctggcggaagcctgagactgtcttgtgccgccagcggcttcaacatcgactactacggaatgcactgggtccgacaggcccctggcaaaggacttgaatgggtcgcctctctgtacggcggcagcgatagcacagattacgccgactctgtgaagggcagattcaccatcagcgccgacaccagcaagaacaccgcctacctccagatgaactccctgagagccgaagataccgccgtgtactactgctccagacagtacagcgcctacttcgactattggggccagggaaccctggtcaccgttagctctacgcgtatccagaaccctgatcctgccgtgtaccagctgcgggatagcaagagcagcgacaagagcgtgtgtctgttcaccgacttcgacagccagaccaacgtgtcccagagcaaggactccgacgtgtacatcaccgataagaccgtgctggacatgcggagcatggacttcaagagcaactccgccgtggcctggtccaacaagtccgatttcgcctgcgccaacgccttcaacaacagcattatccccgaggacacattcttcccaagccccgagagcagcgactccaccgaccacgtgaagcccaaagagacagagaacaccaagcagcccagcaagagctgccacaagcccaaggccatcgtgcacaccgagaaagtgaacatgatgagcctgaccgtgctgggcctgcggatgctgttcgccaaaaccgtggccgtgaacttcctgctgaccgccaagctgttcttcctc

SEQ ID NO: 39617 - DNA, 2592 bp, synthetic construct
  source 1..2592: mol_type = other DNA
atggccttaccagtgaccgccttgctcctgccgctggccttgctgctccacgccgccaggccgctcgaggaggacctgaagaacgtgttcccacctgaggtggccgtgttcgagcctagcgaggccgagatcagccacacccagaaagccaccctcgtgtgcctggctaccggcttctaccccgaccatgtggaactgtcttggtgggtcaacggcaaagaggtgcacagcggcgtgtgtaccgacccccagccactgaaagaacagcccgccctgaacgacagccggtactgcctgagcagcagactgagagtgtccgccaccttctggcagaacccccggaaccacttcagatgccaggtgcagttctacggcctgagcgagaacgacgagtggacccaggacagagccaagcccgtgacccagatcgtgtctgccgaagcctggggcagagccgattgcggctttaccagcgagagctaccagcagggcgtgctgagcgccaccaacctgagcgtgatcggcttcagaatcctgctgctgaaagtggccggctttaacctgctgatgaccctgcggctgtggtccagcagggccaagcgatctggatctggagcaacaaacttctcactactcaaacaagcaggtgacgtggaggagaatcccgggcctactagcatggccttaccagtgaccgccttgctcctgccgctggccttgctgctccacgccgccaggccggacatccagatgacacagagccctagcagcctgtctgccagcgtgggagacagagtgaccatcacctgtagagccagccaggatgtgtctacagccgtggcctggtatcagcagaagcctggaaaggcccctaagctgctgatctacagcgccagctttctgtactccggcgtgcccagcagattcagcggaagcagaagcggcaccgacttcaccctgacaatatccagcctccagcctgaggacttcgccacctactactgccagcagtacctgtaccagccttggacattcggccagggcaccaaggtggaaatcaagagaggcggaggcggaagtggaggcggaggatctggcggcggaggctctgaagttcagctggttgagtctggcggaggactggttcaacctggcggaagcctgagactgtcttgtgccgccagcggcttcaacatcgactactacggaatgcactgggtccgacaggcccctggcaaaggacttgaatgggtcgcctctctgtacggcggcagcgatagcacagattacgccgactctgtgaagggcagattcaccatcagcgccgacaccagcaagaacaccgcctacctccagatgaactccctgagagccgaagataccgccgtgtactactgctccagacagtacagcgcctacttcgactattggggccagggaaccctggtcaccgttagctctacgcgtatccagaaccctgatcctgccgtgtaccagctgcgggatagcaagagcagcgacaagagcgtgtgtctgttcaccgacttcgacagccagaccaacgtgtcccagagcaaggactccgacgtgtacatcaccgataagtgcgtgctggacatgcggagcatggacttcaagagcaactccgccgtggcctggtccaacaagtccgatttcgcctgcgccaacgccttcaacaacagcattatccccgaggacacattcttcccaagccccgagagcagctgcgacgtgaagctggtggaaaagagcttcgagacagacaccaacctgaacttccagatcctgtacgaggtgatcggcttcagaatcctgctgctgaaagtggccggctttaacctgctgatgaccctgcggctgtggtccagccgcgccaagagaagcggatctggcgtgaagcagaccctgaatttcgacctgctgaagctggctggcgacgtggaatccaacccaggcccttctagaggccatatgaccgagtacaagcccacggtgcgcctcgccacccgcgacgacgtccccagggccgtacgcaccctcgccgccgcgttcgccgactaccccgccacgcgccacaccgtcgatccggaccgccacatcgagcgggtcaccgagctgcaagaactcttcctcacgcgcgtcgggctcgacatcggcaaggtgtgggtcgcggacgacggcgccgcggtggcggtctggaccacgccggagagcgtcgaagcgggggcggtgttcgccgagatcggcccgcgcatggccgagttgagcggttcccggctggccgcgcagcaacagatggaaggcctcctggcgccgcaccggcccaaggagcccgcgtggttcctggccaccgtcggcgtctcgcccgaccaccagggcaagggtctgggcagcgccgtcgtgctccccggagtggaggcggccgagcgcgccggggtgcccgccttcctggagacctccgcgccccgcaacctccccttctacgagcggctcggcttcaccgtcaccgccgacgtcgaggtgcccgaaggaccgcgcacctggtgcatgacccgcaagcccggtgcctga

SEQ ID NO: 39618 - DNA, 2592 bp, synthetic construct
  source 1..2592: mol_type = other DNA
atggccttaccagtgaccgccttgctcctgccgctggccttgctgctccacgccgccaggccgctcgagatccagaaccctgatcctgccgtgtaccagctgcgggatagcaagagcagcgacaagagcgtgtgtctgttcaccgacttcgacagccagaccaacgtgtcccagagcaaggactccgacgtgtacatcaccgataagtgcgtgctggacatgcggagcatggacttcaagagcaactccgccgtggcctggtccaacaagtccgatttcgcctgcgccaacgccttcaacaacagcattatccccgaggacacattcttcccaagccccgagagcagctgcgacgtgaagctggtggaaaagagcttcgagacagacaccaacctgaacttccagatcctgtacgaggtgatcggcttcagaatcctgctgctgaaagtggccggctttaacctgctgatgaccctgcggctgtggtccagcagggccaagcgatctggatctggagcaacaaacttctcactactcaaacaagcaggtgacgtggaggagaatcccgggcctactagcatggccttaccagtgaccgccttgctcctgccgctggccttgctgctccacgccgccaggccggacatccagatgacacagagccctagcagcctgtctgccagcgtgggagacagagtgaccatcacctgtagagccagccaggatgtgtctacagccgtggcctggtatcagcagaagcctggaaaggcccctaagctgctgatctacagcgccagctttctgtactccggcgtgcccagcagattcagcggaagcagaagcggcaccgacttcaccctgacaatatccagcctccagcctgaggacttcgccacctactactgccagcagtacctgtaccagccttggacattcggccagggcaccaaggtggaaatcaagagaggcggaggcggaagtggaggcggaggatctggcggcggaggctctgaagttcagctggttgagtctggcggaggactggttcaacctggcggaagcctgagactgtcttgtgccgccagcggcttcaacatcgactactacggaatgcactgggtccgacaggcccctggcaaaggacttgaatgggtcgcctctctgtacggcggcagcgatagcacagattacgccgactctgtgaagggcagattcaccatcagcgccgacaccagcaagaacaccgcctacctccagatgaactccctgagagccgaagataccgccgtgtactactgctccagacagtacagcgcctacttcgactattggggccagggaaccctggtcaccgttagctctacgcgtgaggacctgaagaacgtgttcccacctgaggtggccgtgttcgagcctagcgaggccgagatcagccacacccagaaagccaccctcgtgtgcctggctaccggcttctaccccgaccatgtggaactgtcttggtgggtcaacggcaaagaggtgcacagcggcgtgtgtaccgacccccagccactgaaagaacagcccgccctgaacgacagccggtactgcctgagcagcagactgagagtgtccgccaccttctggcagaacccccggaaccacttcagatgccaggtgcagttctacggcctgagcgagaacgacgagtggacccaggacagagccaagcccgtgacccagatcgtgtctgccgaagcctggggcagagccgattgcggctttaccagcgagagctaccagcagggcgtgctgagcgccaccaacctgagcgtgatcggcttcagaatcctgctgctgaaagtggccggctttaacctgctgatgaccctgcggctgtggtccagccgcgccaagagaagcggatctggcgtgaagcagaccctgaatttcgacctgctgaagctggctggcgacgtggaatccaacccaggcccttctagaggccatatgaccgagtacaagcccacggtgcgcctcgccacccgcgacgacgtccccagggccgtacgcaccctcgccgccgcgttcgccgactaccccgccacgcgccacaccgtcgatccggaccgccacatcgagcgggtcaccgagctgcaagaactcttcctcacgcgcgtcgggctcgacatcggcaaggtgtgggtcgcggacgacggcgccgcggtggcggtctggaccacgccggagagcgtcgaagcgggggcggtgttcgccgagatcggcccgcgcatggccgagttgagcggttcccggctggccgcgcagcaacagatggaaggcctcctggcgccgcaccggcccaaggagcccgcgtggttcctggccaccgtcggcgtctcgcccgaccaccagggcaagggtctgggcagcgccgtcgtgctccccggagtggaggcggccgagcgcgccggggtgcccgccttcctggagacctccgcgccccgcaacctccccttctacgagcggctcggcttcaccgtcaccgccgacgtcgaggtgcccgaaggaccgcgcacctggtgcatgacccgcaagcccggtgcctga

SEQ ID NO: 39619 - DNA, 2592 bp, synthetic construct; identical to SEQ ID NO: 39617
  source 1..2592: mol_type = other DNA

SEQ ID NO: 39620 - DNA, 2916 bp, synthetic construct
  source 1..2916: mol_type = other DNA
atggccttaccagtgaccgccttgctcctgccgctggccttgctgctccacgccgccaggccgctcgaggaggacctgaagaacgtgttcccacctgaggtggccgtgttcgagcctagcgaggccgagatcagccacacccagaaagccaccctcgtgtgcctggctaccggcttctaccccgaccatgtggaactgtcttggtgggtcaacggcaaagaggtgcacagcggcgtgtctaccgacccccagccactgaaagaacagcccgccctgaacgacagccggtactgcctgagcagcagactgagagtgtccgccaccttctggcagaacccccggaaccacttcagatgccaggtgcagttctacggcctgagcgagaacgacgagtggacccaggacagagccaagcccgtgacccagatcgtgtctgccgaagcctggggcagagccgatgatgtgattaagatccactggcaggaaaagaagtccaacaccatcctgggcagccaggaaggcaacaccatgaagaccaacgacacctacatgaagttcagctggctgaccgtgcccgagaagtccctggacaaagaacacagatgcatcgtgcggcacgaaaacaacaagaacggcgtggaccaggaaatcatcttcccacccatcaagaccgatgtgattacaatggaccccaaggacaactgctccaaggacgccaacgataccctgctgctccagctgaccaacaccagcgcctactacatgtacttgttgctgctgctgaagtccgtggtgtacttcgccatcatcacatgctgcctgctgatggctatggtcaagcggaaggacagccggggaagggccaagcgatctggatctggagcaacaaacttctcactactcaaacaagcaggtgacgtggaggagaatcccgggcctactagcatggccttaccagtgaccgccttgctcctgccgctggccttgctgctccacgccgccaggccggacatccagatgacacagagccctagcagcctgtctgccagcgtgggagacagagtgaccatcacctgtagagccagccaggatgtgtctacagccgtggcctggtatcagcagaagcctggaaaggcccctaagctgctgatctacagcgccagctttctgtactccggcgtgcccagcagattcagcggaagcagaagcggcaccgacttcaccctgacaatatccagcctccagcctgaggacttcgccacctactactgccagcagtacctgtaccagccttggacattcggccagggcaccaaggtggaaatcaagagaggcggaggcggaagtggaggcggaggatctggcggcggaggctctgaagttcagctggttgagtctggcggaggactggttcaacctggcggaagcctgagactgtcttgtgccgccagcggcttcaacatcgactactacggaatgcactgggtccgacaggcccctggcaaaggacttgaatgggtcgcctctctgtacggcggcagcgatagcacagattacgccgactctgtgaagggcagattcaccatcagcgccgacaccagcaagaacaccgcctacctccagatgaactccctgagagccgaagataccgccgtgtactactgctccagacagtacagcgcctacttcgactattggggccagggaaccctggtcaccgttagctctacgcgtatccagaaccctgatcctgccgtgtaccagctgcgggatagcaagagcagcgacaagagcgtgtgtctgttcaccgacttcgacagccagaccaacgtgtcccagagcaaggactccgacgtgtacatcaccgataagaccgtgctggacatgcggagcatggacttcaagagcaactccgccgtggcctggtccaacaagtccgatttcgcctgcgccaacgccttcaacaacagcattatccccgaggacacattcttcccaagccccgagagcagcgactccaccgaccacgtgaagcccaaagagacagagaacaccaagcagcccagcaagagctgccacaagcccaaggccatcgtgcacaccgagaaagtgaacatgatgagcctgaccgtgctgggcctgcggatgctgttcgccaaaaccgtggccgtgaacttcctgctgaccgccaagctgttcttcctcctcaccgcccgcgccaagagaagcggatctggcgtgaagcagaccctgaatttcgacctgctgaagctggctggcgacgtggaatccaacccaggcccttctagaggccatatgaccgagtacaagcccacggtgcgcctcgccacccgcgacgacgtccccagggccgtacgcaccctcgccgccgcgttcgccgactaccccgccacgcgccacaccgtcgatccggaccgccacatcgagcgggtcaccgagctgcaagaactcttcctcacgcgcgtcgggctcgacatcggcaaggtgtgggtcgcggacgacggcgccgcggtggcggtctggaccacgccggagagcgtcgaagcgggggcggtgttcgccgagatcggcccgcgcatggccgagttgagcggttcccggctggccgcgcagcaacagatggaaggcctcctggcgccgcaccggcccaaggagcccgcgtggttcctggccaccgtcggcgtctcgcccgaccaccagggcaagggtctgggcagcgccgtcgtgctccccggagtggaggcggccgagcgcgccggggtgcccgccttcctggagacctccgcgccccgcaacctccccttctacgagcggctcggcttcaccgtcaccgccgacgtcgaggtgcccgaaggaccgcgcacctggtgcatgacccgcaagcccggtgcctga

SEQ ID NO: 39621 - DNA, 2916 bp, synthetic construct
  source 1..2916: mol_type = other DNA
atggccttaccagtgaccgccttgctcctgccgctggccttgctgctccacgccgccaggccgctcgagatccagaaccctgatcctgccgtgtaccagctgcgggatagcaagagcagcgacaagagcgtgtgtctgttcaccgacttcgacagccagaccaacgtgtcccagagcaaggactccgacgtgtacatcaccgataagaccgtgctggacatgcggagcatggacttcaagagcaactccgccgtggcctggtccaacaagtccgatttcgcctgcgccaacgccttcaacaacagcattatccccgaggacacattcttcccaagccccgagagcagcgactccaccgaccacgtgaagcccaaagagacagagaacaccaagcagcccagcaagagctgccacaagcccaaggccatcgtgcacaccgagaaagtgaacatgatgagcctgaccgtgctgggcctgcggatgctgttcgccaaaaccgtggccgtgaacttcctgctgaccgccaagctgttcttcctcctcaccgccagggccaagcgatctggatctggagcaacaaacttctcactactcaaacaagcaggtgacgtggaggagaatcccgggcctactagcatggccttaccagtgaccgccttgctcctgccgctggccttgctgctccacgccgccaggccggacatccagatgacacagagccctagcagcctgtctgccagcgtgggagacagagtgaccatcacctgtagagccagccaggatgtgtctacagccgtggcctggtatcagcagaagcctggaaaggcccctaagctgctgatctacagcgccagctttctgtactccggcgtgcccagcagattcagcggaagcagaagcggcaccgacttcaccctgacaatatccagcctccagcctgaggacttcgccacctactactgccagcagtacctgtaccagccttggacattcggccagggcaccaaggtggaaatcaagagaggcggaggcggaagtggaggcggaggatctggcggcggaggctctgaagttcagctggttgagtctggcggaggactggttcaacctggcggaagcctgagactgtcttgtgccgccagcggcttcaacatcgactactacggaatgcactgggtccgacaggcccctggcaaaggacttgaatgggtcgcctctctgtacggcggcagcgatagcacagattacgccgactctgtgaagggcagattcaccatcagcgccgacaccagcaagaacaccgcctacctccagatgaactccctgagagccgaagataccgccgtgtactactgctccagacagtacagcgcctacttcgactattggggccagggaaccctggtcaccgttagctctacgcgtgaggacctgaagaacgtgttcccacctgaggtggccgtgttcgagcctagcgaggccgagatcagccacacccagaaagccaccctcgtgtgcctggctaccggcttctaccccgaccatgtggaactgtcttggtgggtcaacggcaaagaggtgcacagcggcgtgtctaccgacccccagccactgaaagaacagcccgccctgaacgacagccggtactgcctgagcagcagactgagagtgtccgccaccttctggcagaacccccggaaccacttcagatgccaggtgcagttctacggcctgagcgagaacgacgagtggacccaggacagagccaagcccgtgacccagatcgtgtctgccgaagcctggggcagagccgatgatgtgattaagatccactggcaggaaaagaagtccaacaccatcctgggcagccaggaaggcaacaccatgaagaccaacgacacctacatgaagttcagctggctgaccgtgcccgagaagtccctggacaaagaacacagatgcatcgtgcggcacgaaaacaacaagaacggcgtggaccaggaaatcatcttcccacccatcaagaccgatgtgattacaatggaccccaaggacaactgctccaaggacgccaacgataccctgctgctccagctgaccaacaccagcgcctactacatgtacttgttgctgctgctgaagtccgtggtgtacttcgccatcatcacatgctgcctgctgatggctatggtcaagcggaaggacagccggggacgcgccaagagaagcggatctggcgtgaagcagaccctgaatttcgacctgctgaagctggctggcgacgtggaatccaacccaggcccttctagaggccatatgaccgagtacaagcccacggtgcgcctcgccacccgcgacgacgtccccagggccgtacgcaccctcgccgccgcgttcgccgactaccccgccacgcgccacaccgtcgatccggaccgccacatcgagcgggtcaccgagctgcaagaactcttcctcacgcgcgtcgggctcgacatcggcaaggtgtgggtcgcggacgacggcgccgcggtggcggtctggaccacgccggagagcgtcgaagcgggggcggtgttcgccgagatcggcccgcgcatggccgagttgagcggttcccggctggccgcgcagcaacagatggaaggcctcctggcgccgcaccggcccaaggagcccgcgtggttcctggccaccgtcggcgtctcgcccgaccaccagggcaagggtctgggcagcgccgtcgtgctccccggagtggaggcggccgagcgcgccggggtgcccgccttcctggagacctccgcgccccgcaacctccccttctacgagcggctcggcttcaccgtcaccgccgacgtcgaggtgcccgaaggaccgcgcacctggtgcatgacccgcaagcccggtgcctga

SEQ ID NO: 39622 - DNA, 2910 bp, synthetic construct
  source 1..2910: mol_type = other DNA
atggccttaccagtgaccgccttgctcctgccgctggccttgctgctccacgccgccaggccgctcgaggaggacctgaagaacgtgttcccacctgaggtggccgtgttcgagcctagcgaggccgagatcagccacacccagaaagccaccctcgtgtgcctggctaccggcttctaccccgaccatgtggaactgtcttggtgggtcaacggcaaagaggtgcacagcggcgtgtgtaccgacccccagccactgaaagaacagcccgccctgaacgacagccggtactgcctgagcagcagactgagagtgtccgccaccttctggcagaacccccggaaccacttcagatgccaggtgcagttctacggcctgagcgagaacgacgagtggacccaggacagagccaagcccgtgacccagatcgtgtctgccgaagcctggggcagagccgatgatgtgattaagatccactggcaggaaaagaagtccaacaccatcctgggcagccaggaaggcaacaccatgaagaccaacgacacctacatgaagttcagctggctgaccgtgcccgagaagtccctggacaaagaacacagatgcatcgtgcggcacgaaaacaacaagaacggcgtggaccaggaaatcatcttcccacccatcaagaccgatgtgattacaatggaccccaaggacaactgctccaaggacgccaacgataccctgctgctccagctgaccaacaccagcgcctactacatgtacttgttgctgctgctgaagtccgtggtgtacttcgccatcatcacatgctgcctgctgcggagaaccgccttctgctgcaacggcgagaagtctagggccaagcgatctggatctggagcaacaaacttctcactactcaaacaagcaggtgacgtggaggagaatcccgggcctactagcatggccttaccagtgaccgccttgctcctgccgctggccttgctgctccacgccgccaggccggacatccagatgacacagagccctagcagcctgtctgccagcgtgggagacagagtgaccatcacctgtagagccagccaggatgtgtctacagccgtggcctggtatcagcagaagcctggaaaggcccctaagctgctgatctacagcgccagctttctgtactccggcgtgcccagcagattcagcggaagcagaagcggcaccgacttcaccctgacaatatccagcctccagcctgaggacttcgccacctactactgccagcagtacctgtaccagccttggacattcggccagggcaccaaggtggaaatcaagagaggcggaggcggaagtggaggcggaggatctggcggcggaggctctgaagttcagctggttgagtctggcggaggactggttcaacctggcggaagcctgagactgtcttgtgccgccagcggcttcaacatcgactactacggaatgcactgggtccgacaggcccctggcaaaggacttgaatgggtcgcctctctgtacggcggcagcgatagcacagattacgccgactctgtgaagggcagattcaccatcagcgccgacaccagcaagaacaccgcctacctccagatgaactccctgagagccgaagataccgccgtgtactactgctccagacagtacagcgcctacttcgactattggggccagggaaccctggtcaccgttagctctacgcgtatccagaaccctgatcctgccgtgtaccagctgcgggatagcaagagcagcgacaagagcgtgtgtctgttcaccgacttcgacagccagaccaacgtgtcccagagcaaggactccgacgtgtacatcaccgataagtgcgtgctggacatgcggagcatggacttcaagagcaactccgccgtggcctggtccaacaagtccgatttcgcctgcgccaacgccttcaacaacagcattatccccgaggacacattcttcccaagccccgagagcagcgactccaccgaccacgtgaagcccaaagagacagagaacaccaagcagcccagcaagagctgccacaagcccaaggccatcgtgcacaccgagaaagtgaacatgatgagcctgaccgtgctgggcctgcggatgctgttcgccaaaaccgtggccgtgaacttcctgctgaccgccaagctgttcttcctccgcgccaagagaagcggatctggcgtgaagcagaccctgaatttcgacctgctgaagctggctggcgacgtggaatccaacccaggcccttctagaggccatatgaccgagtacaagcccacggtgcgcctcgccacccgcgacgacgtccccagggccgtacgcaccctcgccgccgcgttcgccgactaccccgccacgcgccacaccgtcgatccggaccgccacatcgagcgggtcaccgagctgcaagaactcttcctcacgcgcgtcgggctcgacatcggcaaggtgtgggtcgcggacgacggcgccgcggtggcggtctggaccacgccggagagcgtcgaagcgggggcggtgttcgccgagatcggcccgcgcatggccgagttgagcggttcccggctggccgcgcagcaacagatggaaggcctcctggcgccgcaccggcccaaggagcccgcgtggttcctggccaccgtcggcgtctcgcccgaccaccagggcaagggtctgggcagcgccgtcgtgctccccggagtggaggcggccgagcgcgccggggtgcccgccttcctggagacctccgcgccccgcaacctccccttctacgagcggctcggcttcaccgtcaccgccgacgtcgaggtgcccgaaggaccgcgcacctggtgcatgacccgcaagcccggtgcctga

SEQ ID NO: 39623 - DNA, 2910 bp, synthetic construct
  source 1..2910: mol_type = other DNA
atggccttaccagtgaccgccttgctcctgccgctggccttgctgctccacgccgccaggccgctcgagatccagaaccctgatcctgccgtgtaccagctgcgggatagcaagagcagcgacaagagcgtgtgtctgttcaccgacttcgacagccagaccaacgtgtcccagagcaaggactccgacgtgtacatcaccgataagtgcgtgctggacatgcggagcatggacttcaagagcaactccgccgtggcctggtccaacaagtccgatttcgcctgcgccaacgccttcaacaacagcattatccccgaggacacattcttcccaagccccgagagcagcgactccaccgaccacgtgaagcccaaagagacagagaacaccaagcagcccagcaagagctgccacaagcccaaggccatcgtgcacaccgagaaagtgaacatgatgagcctgaccgtgctgggcctgcggatgctgttcgccaaaaccgtggccgtgaacttcctgctgaccgccaagctgttcttcctcagggccaagcgatctggatctggagcaacaaacttctcactactcaaacaagcaggtgacgtggaggagaatcccgggcctactagcatggccttaccagtgaccgccttgctcctgccgctggccttgctgctccacgccgccaggccggacatccagatgacacagagccctagcagcctgtctgccagcgtgggagacagagtgaccatcacctgtagagccagccaggatgtgtctacagccgtggcctggtatcagcagaagcctggaaaggcccctaagctgctgatctacagcgccagctttctgtactccggcgtgcccagcagattcagcggaagcagaagcggcaccgacttcaccctgacaatatccagcctccagcctgaggacttcgccacctactactgccagcagtacctgtaccagccttggacattcggccagggcaccaaggtggaaatcaagagaggcggaggcggaagtggaggcggaggatctggcggcggaggctctgaagttcagctggttgagtctggcggaggactggttcaacctggcggaagcctgagactgtcttgtgccgccagcggcttcaacatcgactactacggaatgcactgggtccgacaggcccctggcaaaggacttgaatgggtcgcctctctgtacggcggcagcgatagcacagattacgccgactctgtgaagggcagattcaccatcagcgccgacaccagcaagaacaccgcctacctccagatgaactccctgagagccgaagataccgccgtgtactactgctccagacagtacagcgcctacttcgactattggggccagggaaccctggtcaccgttagctctacgcgtgaggacctgaagaacgtgttcccacctgaggtggccgtgttcgagcctagcgaggccgagatcagccacacccagaaagccaccctcgtgtgcctggctaccggcttctaccccgaccatgtggaactgtcttggtgggtcaacggcaaagaggtgcacagcggcgtgtgtaccgacccccagccactgaaagaacagcccgccctgaacgacagccggtactgcctgagcagcagactgagagtgtccgccaccttctggcagaacccccggaaccacttcagatgccaggtgcagttctacggcctgagcgagaacgacgagtggacccaggacagagccaagcccgtgacccagatcgtgtctgccgaagcctggggcagagccgatgatgtgattaagatccactggcaggaaaagaagtccaacaccatcctgggcagccaggaaggcaacaccatgaagaccaacgacacctacatgaagttcagctggctgaccgtgcccgagaagtccctggacaaagaacacagatgcatcgtgcggcacgaaaacaacaagaacggcgtggaccaggaaatcatcttcccacccatcaagaccgatgtgattacaatggaccccaaggacaactgctccaaggacgccaacgataccctgctgctccagctgaccaacaccagcgcctactacatgtacttgttgctgctgctgaagtccgtggtgtacttcgccatcatcacatgctgcctgctgcggagaaccgccttctgctgcaacggcgagaagtctcgcgccaagagaagcggatctggcgtgaagcagaccctgaatttcgacctgctgaagctggctggcgacgtggaatccaacccaggcccttctagaggccatatgaccgagtacaagcccacggtgcgcctcgccacccgcgacgacgtccccagggccgtacgcaccctcgccgccgcgttcgccgactaccccgccacgcgccacaccgtcgatccggaccgccacatcgagcgggtcaccgagctgcaagaactcttcctcacgcgcgtcgggctcgacatcggcaaggtgtgggtcgcggacgacggcgccgcggtggcggtctggaccacgccggagagcgtcgaagcgggggcggtgttcgccgagatcggcccgcgcatggccgagttgagcggttcccggctggccgcgcagcaacagatggaaggcctcctggcgccgcaccggcccaaggagcccgcgtggttcctggccaccgtcggcgtctcgcccgaccaccagggcaagggtctgggcagcgccgtcgtgctccccggagtggaggcggccgagcgcgccggggtgcccgccttcctggagacctccgcgccccgcaacctccccttctacgagcggctcggcttcaccgtcaccgccgacgtcgaggtgcccgaaggaccgcgcacctggtgcatgacccgcaagcccggtgcctga

SEQ ID NO: 39624 - DNA, 2910 bp, synthetic construct
  source 1..2910: mol_type = other DNA
atggccttaccagtgaccgccttgctcctgccgctggccttgctgctccacgccgccaggccgctcgaggaggacctgaagaacgtgttcccacctgaggtggccgtgttcgagcctagcgaggccgagatcagccacacccagaaagccaccctcgtgtgcctggctaccggcttctaccccgaccatgtggaactgtcttggtgggtcaacggcaaagaggtgcacagcggcgtgtctaccgacccccagccactgaaagaacagcccgccctgaacgacagccggtactgcctgagcagcagactgagagtgtccgccaccttctggcagaacccccggaaccacttcagatgccaggtgcagttctacggcctgagcgagaacgacgagtggacccaggacagagccaagcccgtgacccagatcgtgtctgccgaagcctggggcagagccgatgatgtgattaagatccactggcaggaaaagaagtccaacaccatcctgggcagccaggaaggcaacaccatgaagaccaacgacacctacatgaagttcagctggctgaccgtgcccgagaagtccctggacaaagaacacagatgcatcgtgcggcacgaaaacaacaagaacggcgtggaccaggaaatcatcttcccacccatcaagaccgatgtgattacaatggaccccaaggacaactgctccaaggacgccaacgataccctgctgctccagctgaccaacaccagcgcctactacatgtacttgttgctgctgctgaagtccgtggtgtacttcgccatcatcacatgctgcctgctgcggagaaccgccttctgctgcaacggcgagaagtctagggccaagcgatctggatctggagcaacaaacttctcactactcaaacaagcaggtgacgtggaggagaatcccgggcctactagcatggccttaccagtgaccgccttgctcctgccgctggccttgctgctccacgccgccaggccggacatccagatgacacagagccctagcagcctgtctgccagcgtgggagacagagtgaccatcacctgtagagccagccaggatgtgtctacagccgtggcctggtatcagcagaagcctggaaaggcccctaagctgctgatctacagcgccagctttctgtactccggcgtgcccagcagattcagcggaagcagaagcggcaccgacttcaccctgacaatatccagcctccagcctgaggacttcgccacctactactgccagcagtacctgtaccagccttggacattcggccagggcaccaaggtggaaatcaagagaggcggaggcggaagtggaggcggaggatctggcggcggaggctctgaagttcagctggttgagtctggcggaggactggttcaacctggcggaagcctgagactgtcttgtgccgccagcggcttcaacatcgactactacggaatgcactgggtccgacaggcccctggcaaaggacttgaatgggtcgcctctctgtacggcggcagcgatagcacagattacgccgactctgtgaagggcagattcaccatcagcgccgacaccagcaagaacaccgcctacctccagatgaactccctgagagccgaagataccgccgtgtactactgctccagacagtacagcgcctacttcgactattggggccagggaaccctggtcaccgttagctctacgcgtatccagaaccctgatcctgccgtgtaccagctgcgggatagcaagagcagcgacaagagcgtgtgtctgttcaccgacttcgacagccagaccaacgtgtcccagagcaaggactccgacgtgtacatcaccgataagaccgtgctggacatgcggagcatggacttcaagagcaactccgccgtggcctggtccaacaagtccgatttcgcctgcgccaacgccttcaacaacagcattatccccgaggacacattcttcccaagccccgagagcagcgactccaccgaccacgtgaagcccaaagagacagagaacaccaagcagcccagcaagagctgccacaagcccaaggccatcgtgcacaccgagaaagtgaacatgatgagcctgaccgtgctgggcctgcggatgctgttcgccaaaaccgtggccgtgaacttcctgctgaccgccaagctgttcttcctccgcgccaagagaagcggatctggcgtgaagcagaccctgaatttcgacctgctgaagctggctggcgacgtggaatccaacccaggcccttctagaggccatatgaccgagtacaagcccacggtgcgcctcgccacccgcgacgacgtccccagggccgtacgcaccctcgccgccgcgttcgccgactaccccgccacgcgccacaccgtcgatccggaccgccacatcgagcgggtcaccgagctgcaagaactcttcctcacgcgcgtcgggctcgacatcggcaaggtgtgggtcgcggacgacggcgccgcggtggcggtctggaccacgccggagagcgtcgaagcgggggcggtgttcgccgagatcggcccgcgcatggccgagttgagcggttcccggctggccgcgcagcaacagatggaaggcctcctggcgccgcaccggcccaaggagcccgcgtggttcctggccaccgtcggcgtctcgcccgaccaccagggcaagggtctgggcagcgccgtcgtgctccccggagtggaggcggccgagcgcgccggggtgcccgccttcctggagacctccgcgccccgcaacctccccttctacgagcggctcggcttcaccgtcaccgccgacgtcgaggtgcccgaaggaccgcgcacctggtgcatgacccgcaagcccggtgcctga

SEQ ID NO: 39625 - DNA, 2910 bp, synthetic construct
  source 1..2910: mol_type = other DNA
atggccttaccagtgaccgccttgctcctgccgctggccttgctgctccacgccgccaggccgctcgagatccagaaccctgatcctgccgtgtaccagctgcgggatagcaagagcagcgacaagagcgtgtgtctgttcaccgacttcgacagccagaccaacgtgtcccagagcaaggactccgacgtgtacatcaccgataagaccgtgctggacatgcggagcatggacttcaagagcaactccgccgtggcctggtccaacaagtccgatttcgcctgcgccaacgccttcaacaacagcattatccccgaggacacattcttcccaagccccgagagcagcgactccaccgaccacgtgaagcccaaagagacagagaacaccaagcagcccagcaagagctgccacaagcccaaggccatcgtgcacaccgagaaagtgaacatgatgagcctgaccgtgctgggcctgcggatgctgttcgccaaaaccgtggccgtgaacttcctgctgaccgccaagctgttcttcctcagggccaagcgatctggatctggagcaacaaacttctcactactcaaacaagcaggtgacgtggaggagaatcccgggcctactagcatggccttaccagtgaccgccttgctcctgccgctggccttgctgctccacgccgccaggccggacatccagatgacacagagccctagcagcctgtctgccagcgtgggagacagagtgaccatcacctgtagagccagccaggatgtgtctacagccgtggcctggtatcagcagaagcctggaaaggcccctaagctgctgatctacagcgccagctttctgtactccggcgtgcccagcagattcagcggaagcagaagcggcaccgacttcaccctgacaatatccagcctccagcctgaggacttcgccacctactactgccagcagtacctgtaccagccttggacattcggccagggcaccaaggtggaaatcaagagaggcggaggcggaagtggaggcggaggatctggcggcggaggctctgaagttcagctggttgagtctggcggaggactggttcaacctggcggaagcctgagactgtcttgtgccgccagcggcttcaacatcgactactacggaatgcactgggtccgacaggcccctggcaaaggacttgaatgggtcgcctctctgtacggcggcagcgatagcacagattacgccgactctgtgaagggcagattcaccatcagcgccgacaccagcaagaacaccgcctacctccagatgaactccctgagagccgaagataccgccgtgtactactgctccagacagtacagcgcctacttcgactattggggccagggaaccctggtcaccgttagctctacgcgtgaggacctgaagaacgtgttcccacctgaggtggccgtgttcgagcctagcgaggccgagatcagccacacccagaaagccaccctcgtgtgcctggctaccggcttctaccccgaccatgtggaactgtcttggtgggtcaacggcaaagaggtgcacagcggcgtgtctaccgacccccagccactgaaagaacagcccgccctgaacgacagccggtactgcctgagcagcagactgagagtgtccgccaccttctggcagaacccccggaaccacttcagatgccaggtgcagttctacggcctgagcgagaacgacgagtggacccaggacagagccaagcccgtgacccagatcgtgtctgccgaagcctggggcagagccgatgatgtgattaagatccactggcaggaaaagaagtccaacaccatcctgggcagccaggaaggcaacaccatgaagaccaacgacacctacatgaagttcagctggctgaccgtgcccgagaagtccctggacaaagaacacagatgcatcgtgcggcacgaaaacaacaagaacggcgtggaccaggaaatcatcttcccacccatcaagaccgatgtgattacaatggaccccaaggacaactgctccaaggacgccaacgataccctgctgctccagctgaccaacaccagcgcctactacatgtacttgttgctgctgctgaagtccgtggtgtacttcgccatcatcacatgctgcctgctgcggagaaccgccttctgctgcaacggcgagaagtctcgcgccaagagaagcggatctggcgtgaagcagaccctgaatttcgacctgctgaagctggctggcgacgtggaatccaacccaggcccttctagaggccatatgaccgagtacaagcccacggtgcgcctcgccacccgcgacgacgtccccagggccgtacgcaccctcgccgccgcgttcgccgactaccccgccacgcgccacaccgtcgatccggaccgccacatcgagcgggtcaccgagctgcaagaactcttcctcacgcgcgtcgggctcgacatcggcaaggtgtgggtcgcggacgacggcgccgcggtggcggtctggaccacgccggagagcgtcgaagcgggggcggtgttcgccgagatcggcccgcgcatggccgagttgagcggttcccggctggccgcgcagcaacagatggaaggcctcctggcgccgcaccggcccaaggagcccgcgtggttcctggccaccgtcggcgtctcgcccgaccaccagggcaagggtctgggcagcgccgtcgtgctccccggagtggaggcggccgagcgcgccggggtgcccgccttcctggagacctccgcgccccgcaacctccccttctacgagcggctcggcttcaccgtcaccgccgacgtcgaggtgcccgaaggaccgcgcacctggtgcatgacccgcaagcccggtgcctga

SEQ ID NO: 39626 - DNA, 2604 bp, synthetic construct
  source 1..2604: mol_type = other DNA
atggccttaccagtgaccgccttgctcctgccgctggccttgctgctccacgccgccaggccgctcgaggaggacctgaagaacgtgttcccacctgaggtggccgtgttcgagcctagcaaggccgagatcgcccacacccagaaagccaccctcgtgtgcctggctaccggcttctaccccgaccatgtggaactgtcttggtgggtcaacggcaaagaggtgcacagcggcgtgtgtaccgacccccagccactgaaagaacagcccgccctgaacgacagccggtactgcctgagcagcagactgagagtgtccgccaccttctggcagaacccccggaaccacttcagatgccaggtgcagttctacggcctgagcgagaacgacgagtggacccaggacagagccaagcccgtgacccagatcgtgtctgccgaagcctggggcagagccgattgcggcatcaccagcgccagctaccaccagggcgtgctgagcgccaccatcctgtacgagatcctgctgggcaaggccaccctgtacgccgtgctggtgtctgccctggtgctgatggctatggtcaagcggaaggacagccggggaagggccaagcgatctggatctggagcaacaaacttctcactactcaaacaagcaggtgacgtggaggagaatcccgggcctactagcatggccttaccagtgaccgccttgctcctgccgctggccttgctgctccacgccgccaggccggacatccagatgacacagagccctagcagcctgtctgccagcgtgggagacagagtgaccatcacctgtagagccagccaggatgtgtctacagccgtggcctggtatcagcagaagcctggaaaggcccctaagctgctgatctacagcgccagctttctgtactccggcgtgcccagcagattcagcggaagcagaagcggcaccgacttcaccctgacaatatccagcctccagcctgaggacttcgccacctactactgccagcagtacctgtaccagccttggacattcggccagggcaccaaggtggaaatcaagagaggcggaggcggaagtggaggcggaggatctggcggcggaggctctgaagttcagctggttgagtctggcggaggactggttcaacctggcggaagcctgagactgtcttgtgccgccagcggcttcaacatcgactactacggaatgcactgggtccgacaggcccctggcaaaggacttgaatgggtcgcctctctgtacggcggcagcgatagcacagattacgccgactctgtgaagggcagattcaccatcagcgccgacaccagcaagaacaccgcctacctccagatgaactccctgagagccgaagataccgccgtgtactactgctccagacagtacagcgcctacttcgactattggggccagggaaccctggtcaccgttagctctacgcgtatccagaaccctgatcctgccgtgtaccagctgcgggatagcaagagcagcgacaagagcgtgtgtctgttcaccgacttcgacagccagaccaacgtgtcccagagcaaggactccgacgtgtacatcaccgataagtgcgtgctggacatgcggagcatggacttcaagagcaactccgccgtggcctggtccaacaagtccgatttcgcctgcgccaacgccttcaacaacagcattatccccgaggacacattcttcccaagcagcgacgtgccctgcgacgtgaagctggtggaaaagagcttcgagacagacaccaacctgaacttccagaacctgagcgtgatcggcttcagaatcctgctgctgaaagtggccggctttaacctgctgatgaccctgcggctgtggtccagccgcgccaagagaagcggatctggcgtgaagcagaccctgaatttcgacctgctgaagctggctggcgacgtggaatccaacccaggcccttctagaggccatatgaccgagtacaagcccacggtgcgcctcgccacccgcgacgacgtccccagggccgtacgcaccctcgccgccgcgttcgccgactaccccgccacgcgccacaccgtcgatccggaccgccacatcgagcgggtcaccgagctgcaagaactcttcctcacgcgcgtcgggctcgacatcggcaaggtgtgggtcgcggacgacggcgccgcggtggcggtctggaccacgccggagagcgtcgaagcgggggcggtgttcgccgagatcggcccgcgcatggccgagttgagcggttcccggctggccgcgcagcaacagatggaaggcctcctggcgccgcaccggcccaaggagcccgcgtggttcctggccaccgtcggcgtctcgcccgaccaccagggcaagggtctgggcagcgccgtcgtgctccccggagtggaggcggccgagcgcgccggggtgcccgccttcctggagacctccgcgccccgcaacctccccttctacgagcggctcggcttcaccgtcaccgccgacgtcgaggtgcccgaaggaccgcgcacctggtgcatgacccgcaagcccggtgcctga

SEQ ID NO: 39627 - DNA, 2604 bp, synthetic construct
  source 1..2604: mol_type = other DNA
atggccttaccagtgaccgccttgctcctgccgctggccttgctgctccacgccgccaggccgctcgagatccagaaccctgatcctgccgtgtaccagctgcgggatagcaagagcagcgacaagagcgtgtgtctgttcaccgacttcgacagccagaccaacgtgtcccagagcaaggactccgacgtgtacatcaccgataagtgcgtgctggacatgcggagcatggacttcaagagcaactccgccgtggcctggtccaacaagtccgatttcgcctgcgccaacgccttcaacaacagcattatccccgaggacacattcttcccaagcagcgacgtgccctgcgacgtgaagctggtggaaaagagcttcgagacagacaccaacctgaacttccagaacctgagcgtgatcggcttcagaatcctgctgctgaaagtggccggctttaacctgctgatgaccctgcggctgtggtccagcagggccaagcgatctggatctggagcaacaaacttctcactactcaaacaagcaggtgacgtggaggagaatcccgggcctactagcatggccttaccagtgaccgccttgctcctgccgctggccttgctgctccacgccgccaggccggacatccagatgacacagagccctagcagcctgtctgccagcgtgggagacagagtgaccatcacctgtagagccagccaggatgtgtctacagccgtggcctggtatcagcagaagcctggaaaggcccctaagctgctgatctacagcgccagctttctgtactccggcgtgcccagcagattcagcggaagcagaagcggcaccgacttcaccctgacaatatccagcctccagcctgaggacttcgccacctactactgccagcagtacctgtaccagccttggacattcggccagggcaccaaggtggaaatcaagagaggcggaggcggaagtggaggcggaggatctggcggcggaggctctgaagttcagctggttgagtctggcggaggactggttcaacctggcggaagcctgagactgtcttgtgccgccagcggcttcaacatcgactactacggaatgcactgggtccgacaggcccctggcaaaggacttgaatgggtcgcctctctgtacggcggcagcgatagcacagattacgccgactctgtgaagggcagattcaccatcagcgccgacaccagcaagaacaccgcctacctccagatgaactccctgagagccgaagataccgccgtgtactactgctccagacagtacagcgcctacttcgactattggggccagggaaccctggtcaccgttagctctacgcgtgaggacctgaagaacgtgttcccacctgaggtggccgtgttcgagcctagcaaggccgagatcgcccacacccagaaagccaccctcgtgtgcctggctaccggcttctaccccgaccatgtggaactgtcttggtgggtcaacggcaaagaggtgcacagcggcgtgtgtaccgacccccagccactgaaagaacagcccgccctgaacgacagccggtactgcctgagcagcagactgagagtgtccgccaccttctggcagaacccccggaaccacttcagatgccaggtgcagttctacggcctgagcgagaacgacgagtggacccaggacagagccaagcccgtgacccagatcgtgtctgccgaagcctggggcagagccgattgcggcatcaccagcgccagctaccaccagggcgtgctgagcgccaccatcctgtacgagatcctgctgggcaaggccaccctgtacgccgtgctggtgtctgccctggtgctgatggctatggtcaagcggaaggacagccggggacgcgccaagagaagcggatctggcgtgaagcagaccctgaatttcgacctgctgaagctggctggcgacgtggaatccaacccaggcccttctagaggccatatgaccgagtacaagcccacggtgcgcctcgccacccgcgacgacgtccccagggccgtacgcaccctcgccgccgcgttcgccgactaccccgccacgcgccacaccgtcgatccggaccgccacatcgagcgggtcaccgagctgcaagaactcttcctcacgcgcgtcgggctcgacatcggcaaggtgtgggtcgcggacgacggcgccgcggtggcggtctggaccacgccggagagcgtcgaagcgggggcggtgttcgccgagatcggcccgcgcatggccgagttgagcggttcccggctggccgcgcagcaacagatggaaggcctcctggcgccgcaccggcccaaggagcccgcgtggttcctggccaccgtcggcgtctcgcccgaccaccagggcaagggtctgggcagcgccgtcgtgctccccggagtggaggcggccgagcgcgccggggtgcccgccttcctggagacctccgcgccccgcaacctccccttctacgagcggctcggcttcaccgtcaccgccgacgtcgaggtgcccgaaggaccgcgcacctggtgcatgacccgcaagcccggtgcctga

SEQ ID NO: 39628 - DNA, 2283 bp, synthetic construct
  source 1..2283: mol_type = other DNA
atggccttaccagtgaccgccttgctcctgccgctggccttgctgctccacgccgccaggccgctcgagcagagttttgggttgttggaccctaaattgtgctatctgttggacggaatcctgttcatttacggagtgatcctgaccgcattgttcctgcgggttaagttttccagatccgcagacgcacccgcttaccaacaagggcagaaccaactctacaatgaacttaatttggggcggagggaagagtacgacgttctggacaaaaggaggggacgagatcccgagatgggcggaaagcctcagcgaaggaagaatccgcaagaggggctttataacgaactccagaaagataaaatggcagaagcctatagtgagattgggatgaagggagaaaggaggaggggtaaaggtcacgatgggttgtaccaaggattgagcacagccactaaagatacctatgatgcgctccacatgcaggccctgccgccaagaagggccaagcgatctggatctggagcaacaaacttctcactactcaaacaagcaggtgacgtggaggagaatcccgggcctactagcatggccttaccagtgaccgccttgctcctgccgctggccttgctgctccacgccgccaggccggacatccagatgacacagagccctagcagcctgtctgccagcgtgggagacagagtgaccatcacctgtagagccagccaggatgtgtctacagccgtggcctggtatcagcagaagcctggaaaggcccctaagctgctgatctacagcgccagctttctgtactccggcgtgcccagcagattcagcggaagcagaagcggcaccgacttcaccctgacaatatccagcctccagcctgaggacttcgccacctactactgccagcagtacctgtaccagccttggacattcggccagggcaccaaggtggaaatcaagagaggcggaggcggaagtggaggcggaggatctggcggcggaggctctgaagttcagctggttgagtctggcggaggactggttcaacctggcggaagcctgagactgtcttgtgccgccagcggcttcaacatcgactactacggaatgcactgggtccgacaggcccctggcaaaggacttgaatgggtcgcctctctgtacggcggcagcgatagcacagattacgccgactctgtgaagggcagattcaccatcagcgccgacaccagcaagaacaccgcctacctccagatgaactccctgagagccgaagataccgccgtgtactactgctccagacagtacagcgcctacttcgactattggggccagggaaccctggtcaccgttagctctacgcgtgagctgggagagcctcagctgtgctatatcctggacgccatcctgtttctgtacggcatcgtgctgaccctgctgtactgccggctgaagatccaagtgcggaaggccgccatcaccagctacgagaaatccgacggcgtgtacaccggcctgagcaccagaaatcaagagacatacgagacactgaagcacgaaaagcctccacaacgcgccaagagaagcggatctggcgtgaagcagaccctgaatttcgacctgctgaagctggctggcgacgtggaatccaacccaggcccttctagaggccatatgaccgagtacaagcccacggtgcgcctcgccacccgcgacgacgtccccagggccgtacgcaccctcgccgccgcgttcgccgactaccccgccacgcgccacaccgtcgatccggaccgccacatcgagcgggtcaccgagctgcaagaactcttcctcacgcgcgtcgggctcgacatcggcaaggtgtgggtcgcggacgacggcgccgcggtggcggtctggaccacgccggagagcgtcgaagcgggggcggtgttcgccgagatcggcccgcgcatggccgagttgagcggttcccggctggccgcgcagcaacagatggaaggcctcctggcgccgcaccggcccaaggagcccgcgtggttcctggccaccgtcggcgtctcgcccgaccaccagggcaagggtctgggcagcgccgtcgtgctccccggagtggaggcggccgagcgcgccggggtgcccgccttcctggagacctccgcgccccgcaacctccccttctacgagcggctcggcttcaccgtcaccgccgacgtcgaggtgcccgaaggaccgcgcacctggtgcatgacccgcaagcccggtgcctga

SEQ ID NO: 39629 - DNA, 2916 bp, synthetic construct; identical to SEQ ID NO: 39620
  source 1..2916: mol_type = other DNA

SEQ ID NO: 39630 - DNA, 2916 bp, synthetic construct; identical to SEQ ID NO: 39621
  source 1..2916: mol_type = other DNA

SEQ ID NO: 39631 - DNA, 2913 bp, synthetic construct
  source 1..2913: mol_type = other DNA
atggccttaccagtgaccgccttgctcctgccgctggccttgctgctccacgccgccaggccgctcgaggaggaggacctgaagaacgtgttcccacctgaggtggccgtgttcgagcctagcgaggccgagatcagccacacccagaaagccaccctcgtgtgcctggctaccggcttctaccccgaccatgtggaactgtcttggtgggtcaacggcaaagaggtgcacagcggcgtgtgtaccgacccccagccactgaaagaacagcccgccctgaacgacagccggtactgcctgagcagcagactgagagtgtccgccaccttctggcagaacccccggaaccacttcagatgccaggtgcagttctacggcctgagcgagaacgacgagtggacccaggacagagccaagcccgtgacccagatcgtgtctgccgaagcctggggcagagccgatgatgtgattaagatccactggcaggaaaagaagtccaacaccatcctgggcagccaggaaggcaacaccatgaagaccaacgacacctacatgaagttcagctggctgaccgtgcccgagaagtccctggacaaagaacacagatgcatcgtgcggcacgaaaacaacaagaacggcgtggaccaggaaatcatcttcccacccatcaagaccgatgtgattacaatggaccccaaggacaactgctccaaggacgccaacgataccctgctgctccagctgaccaacaccagcgcctactacatgtacttgttgctgctgctgaagtccgtggtgtacttcgccatcatcacatgctgcctgctgcggagaaccgccttctgctgcaacggcgagaagtctagggccaagcgatctggatctggagcaacaaacttctcactactcaaacaagcaggtgacgtggaggagaatcccgggcctactagcatggccttaccagtgaccgccttgctcctgccgctggccttgctgctccacgccgccaggccggacatccagatgacacagagccctagcagcctgtctgccagcgtgggagacagagtgaccatcacctgtagagccagccaggatgtgtctacagccgtggcctggtatcagcagaagcctggaaaggcccctaagctgctgatctacagcgccagctttctgtactccggcgtgcccagcagattcagcggaagcagaagcggcaccgacttcaccctgacaatatccagcctccagcctgaggacttcgccacctactactgccagcagtacctgtaccagccttggacattcggccagggcaccaaggtggaaatcaagagaggcggaggcggaagtggaggcggaggatctggcggcggaggctctgaagttcagctggttgagtctggcggaggactggttcaacctggcggaagcctgagactgtcttgtgccgccagcggcttcaacatcgactactacggaatgcactgggtccgacaggcccctggcaaaggacttgaatgggtcgcctctctgtacggcggcagcgatagcacagattacgccgactctgtgaagggcagattcaccatcagcgccgacaccagcaagaacaccgcctacctccagatgaactccctgagagccgaagataccgccgtgtactactgctccagacagtacagcgcctacttcgactattggggccagggaaccctggtcaccgttagctctacgcgtatccagaaccctgatcctgccgtgtaccagctgcgggatagcaagagcagcgacaagagcgtgtgtctgttcaccgacttcgacagccagaccaacgtgtcccagagcaaggactccgacgtgtacatcaccgataagtgcgtgctggacatgcggagcatggacttcaagagcaactccgccgtggcctggtccaacaagtccgatttcgcctgcgccaacgccttcaacaacagcattatccccgaggacacattcttcccaagccccgagagcagcgactccaccgaccacgtgaagcccaaagagacagagaacaccaagcagcccagcaagagctgccacaagcccaaggccatcgtgcacaccgagaaagtgaacatgatgagcctgaccgtgctgggcctgcggatgctgttcgccaaaaccgtggccgtgaacttcctgctgaccgccaagctgttcttcctccgcgccaagagaagcggatctggcgtgaagcagaccctgaatttcgacctgctgaagctggctggcgacgtggaatccaacccaggcccttctagaggccatatgaccgagtacaagcccacggtgcgcctcgccacccgcgacgacgtccccagggccgtacgcaccctcgccgccgcgttcgccgactaccccgccacgcgccacaccgtcgatccggaccgccacatcgagcgggtcaccgagctgcaagaactcttcctcacgcgcgtcgggctcgacatcggcaaggtgtgggtcgcggacgacggcgccgcggtggcggtctggaccacgccggagagcgtcgaagcgggggcggtgttcgccgagatcggcccgcgcatggccgagttgagcggttcccggctggccgcgcagcaacagatggaaggcctcctggcgccgcaccggcccaaggagcccgcgtggttcctggccaccgtcggcgtctcgcccgaccaccagggcaagggtctgggcagcgccgtcgtgctccccggagtggaggcggccgagcgcgccggggtgcccgccttcctggagacctccgcgccccgcaacctccccttctacgagcggctcggcttcaccgtcaccgccgacgtcgaggtgcccgaaggaccgcgcacctggtgcatgacccgcaagcccggtgcctga

SEQ ID NO: 39632 - DNA, 2913 bp, synthetic construct
  source 1..2913: mol_type = other DNA
atggccttaccagtgaccgccttgctcctgccgctggccttgctgctccacgccgccaggccgctcgagatccagaaccctgatcctgccgtgtaccagctgcgggatagcaagagcagcgacaagagcgtgtgtctgttcaccgacttcgacagccagaccaacgtgtcccagagcaaggactccgacgtgtacatcaccgataagtgcgtgctggacatgcggagcatggacttcaagagcaactccgccgtggcctggtccaacaagtccgatttcgcctgcgccaacgccttcaacaacagcattatccccgaggacacattcttcccaagccccgagagcagcgactccaccgaccacgtgaagcccaaagagacagagaacaccaagcagcccagcaagagctgccacaagcccaaggccatcgtgcacaccgagaaagtgaacatgatgagcctgaccgtgctgggcctgcggatgctgttcgccaaaaccgtggccgtgaacttcctgctgaccgccaagctgttcttcctcagggccaagcgatctggatctggagcaacaaacttctcactactcaaacaagcaggtgacgtggaggagaatcccgggcctactagcatggccttaccagtgaccgccttgctcctgccgctggccttgctgctccacgccgccaggccggacatccagatgacacagagccctagcagcctgtctgccagcgtgggagacagagtgaccatcacctgtagagccagccaggatgtgtctacagccgtggcctggtatcagcagaagcctggaaaggcccctaagctgctgatctacagcgccagctttctgtactccggcgtgcccagcagattcagcggaagcagaagcggcaccgacttcaccctgacaatatccagcctccagcctgaggacttcgccacctactactgccagcagtacctgtaccagccttggacattcggccagggcaccaaggtggaaatcaagagaggcggaggcggaagtggaggcggaggatctggcggcggaggctctgaagttcagctggttgagtctggcggaggactggttcaacctggcggaagcctgagactgtcttgtgccgccagcggcttcaacatcgactactacggaatgcactgggtccgacaggcccctggcaaaggacttgaatgggtcgcctctctgtacggcggcagcgatagcacagattacgccgactctgtgaagggcagattcaccatcagcgccgacaccagcaagaacaccgcctacctccagatgaactccctgagagccgaagataccgccgtgtactactgctccagacagtacagcgcctacttcgactattggggccagggaaccctggtcaccgttagctctacgcgtgaggaggacctgaagaacgtgttcccacctgaggtggccgtgttcgagcctagcgaggccgagatcagccacacccagaaagccaccctcgtgtgcctggctaccggcttctaccccgaccatgtggaactgtcttggtgggtcaacggcaaagaggtgcacagcggcgtgtgtaccgacccccagccactgaaagaacagcccgccctgaacgacagccggtactgcctgagcagcagactgagagtgtccgccaccttctggcagaacccccggaaccacttcagatgccaggtgcagttctacggcctgagcgagaacgacgagtggacccaggacagagccaagcccgtgacccagatcgtgtctgccgaagcctggggcagagccgatgatgtgattaagatccactggcaggaaaagaagtccaacaccatcctgggcagccaggaaggcaacaccatgaagaccaacgacacctacatgaagttcagctggctgaccgtgcccgagaagtccctggacaaagaacacagatgcatcgtgcggcacgaaaacaacaagaacggcgtggaccaggaaatcatcttcccacccatcaagaccgatgtgattacaatggaccccaaggacaactgctccaaggacgccaacgataccctgctgctccagctgaccaacaccagcgcctactacatgtacttgttgctgctgctgaagtccgtggtgtacttcgccatcatcacatgctgcctgctgcggagaaccgccttctgctgcaacggcgagaagtctcgcgccaagagaagcggatctggcgtgaagcagaccctgaatttcgacctgctgaagctggctggcgacgtggaatccaacccaggcccttctagaggccatatgaccgagtacaagcccacggtgcgcctcgccacccgcgacgacgtccccagggccgtacgcaccctcgccgccgcgttcgccgactaccccgccacgcgccacaccgtcgatccggaccgccacatcgagcgggtcaccgagctgcaagaactcttcctcacgcgcgtcgggctcgacatcggcaaggtgtgggtcgcggacgacggcgccgcggtggcggtctggaccacgccggagagcgtcgaagcgggggcggtgttcgccgagatcggcccgcgcatggccgagttgagcggttcccggctggccgcgcagcaacagatggaaggcctcctggcgccgcaccggcccaaggagcccgcgtggttcctggccaccgtcggcgtctcgcccgaccaccagggcaagggtctgggcagcgccgtcgtgctccccggagtggaggcggccgagcgcgccggggtgcccgccttcctggagacctccgcgccccgcaacctccccttctacgagcggctcggcttcaccgtcaccgccgacgtcgaggtgcccgaaggaccgcgcacctggtgcatgacccgcaagcccggtgcctga

SEQ ID NO: 39633 - DNA, 2604 bp, synthetic construct
  source 1..2604: mol_type = other DNA
atggccttaccagtgaccgccttgctcctgccgctggccttgctgctccacgccgccaggccgctcgaggaggacctgaagaacgtgttcccacctgaggtggccgtgttcgagcctagcgaggccgagatcagccacacccagaaagccaccctcgtgtgcctggctaccggcttctaccccgaccatgtggaactgtcttggtgggtcaacggcaaagaggtgcacagcggcgtgtctaccgacccccagccactgaaagaacagcccgccctgaacgacagccggtactgcctgagcagcagactgagagtgtccgccaccttctggcagaacccccggaaccacttcagatgccaggtgcagttctacggcctgagcgagaacgacgagtggacccaggacagagccaagcccgtgacccagatcgtgtctgccgaagcctggggcagagccgattgcggctttaccagcgagagctaccagcagggcgtgctgagcgccaccaacctgagcgtgatcggcttcagaatcctgctgctgaaagtggccggctttaacctgctgatgaccctgcggctgtggtccagcagggccaagcgatctggatctggagcaacaaacttctcactactcaaacaagcaggtgacgtggaggagaatcccgggcctactagcatggccttaccagtgaccgccttgctcctgccgctggccttgctgctccacgccgccaggccggacatccagatgacacagagccctagcagcctgtctgccagcgtgggagacagagtgaccatcacctgtagagccagccaggatgtgtctacagccgtggcctggtatcagcagaagcctggaaaggcccctaagctgctgatctacagcgccagctttctgtactccggcgtgcccagcagattcagcggaagcagaagcggcaccgacttcaccctgacaatatccagcctccagcctgaggacttcgccacctactactgccagcagtacctgtaccagccttggacattcggccagggcaccaaggtggaaatcaagagaggcggaggcggaagtggaggcggaggatctggcggcggaggctctgaagttcagctggttgagtctggcggaggactggttcaacctggcggaagcctgagactgtcttgtgccgccagcggcttcaacatcgactactacggaatgcactgggtccgacaggcccctggcaaaggacttgaatgggtcgcctctctgtacggcggcagcgatagcacagattacgccgactctgtgaagggcagattcaccatcagcgccgacaccagcaagaacaccgcctacctccagatgaactccctgagagccgaagataccgccgtgtactactgctccagacagtacagcgcctacttcgactattggggccagggaaccctggtcaccgttagctctacgcgtatccagaaccctgatcctgccgtgtaccagctgcgggatagcaagagcagcgacaagagcgtgtgtctgttcaccgacttcgacagccagaccaacgtgtcccagagcaaggactccgacgtgtacatcaccgataagaccgtgctggacatgcggagcatggacttcaagagcaactccgccgtggcctggtccaacaagtccgatttcgcctgcgccaacgccttcaacaacagcattatccccgaggacacattcttcccaagccccgagagcagctgcgacgtgaagctggtggaaaagagcttcgagacagacaccaacctgaacttccagatcctgtacgagatcctgctgggcaaggccaccctgtacgccgtgctggtgtctgccctggtgctgatggctatggtcaagcggaaggacagccggggacgcgccaagagaagcggatctggcgtgaagcagaccctgaatttcgacctgctgaagctggctggcgacgtggaatccaacccaggcccttctagaggccatatgaccgagtacaagcccacggtgcgcctcgccacccgcgacgacgtccccagggccgtacgcaccctcgccgccgcgttcgccgactaccccgccacgcgccacaccgtcgatccggaccgccacatcgagcgggtcaccgagctgcaagaactcttcctcacgcgcgtcgggctcgacatcggcaaggtgtgggtcgcggacgacggcgccgcggtggcggtctggaccacgccggagagcgtcgaagcgggggcggtgttcgccgagatcggcccgcgcatggccgagttgagcggttcccggctggccgcgcagcaacagatggaaggcctcctggcgccgcaccggcccaaggagcccgcgtggttcctggccaccgtcggcgtctcgcccgaccaccagggcaagggtctgggcagcgccgtcgtgctccccggagtggaggcggccgagcgcgccggggtgcccgccttcctggagacctccgcgccccgcaacctccccttctacgagcggctcggcttcaccgtcaccgccgacgtcgaggtgcccgaaggaccgcgcacctggtgcatgacccgcaagcccggtgcctga

SEQ ID NO: 39634 - DNA, 2604 bp, synthetic construct
  source 1..2604: mol_type = other DNA
atggccttaccagtgaccgccttgctcctgccgctggccttgctgctccacgccgccaggccgctcgagatccagaaccctgatcctgccgtgtaccagctgcgggatagcaagagcagcgacaagagcgtgtgtctgttcaccgacttcgacagccagaccaacgtgtcccagagcaaggactccgacgtgtacatcaccgataagaccgtgctggacatgcggagcatggacttcaagagcaactccgccgtggcctggtccaacaagtccgatttcgcctgcgccaacgccttcaacaacagcattatccccgaggacacattcttcccaagccccgagagcagctgcgacgtgaagctggtggaaaagagcttcgagacagacaccaacctgaacttccagatcctgtacgagatcctgctgggcaaggccaccctgtacgccgtgctggtgtctgccctggtgctgatggctatggtcaagcggaaggacagccggggaagggccaagcgatctggatctggagcaacaaacttctcactactcaaacaagcaggtgacgtggaggagaatcccgggcctactagcatggccttaccagtgaccgccttgctcctgccgctggccttgctgctccacgccgccaggccggacatccagatgacacagagccctagcagcctgtctgccagcgtgggagacagagtgaccatcacctgtagagccagccaggatgtgtctacagccgtggcctggtatcagcagaagcctggaaaggcccctaagctgctgatctacagcgccagctttctgtactccggcgtgcccagcagattcagcggaagcagaagcggcaccgacttcaccctgacaatatccagcctccagcctgaggacttcgccacctactactgccagcagtacctgtaccagccttggacattcggccagggcaccaaggtggaaatcaagagaggcggaggcggaagtggaggcggaggatctggcggcggaggctctgaagttcagctggttgagtctggcggaggactggttcaacctggcggaagcctgagactgtcttgtgccgccagcggcttcaacatcgactactacggaatgcactgggtccgacaggcccctggcaaaggacttgaatgggtcgcctctctgtacggcggcagcgatagcacagattacgccgactctgtgaagggcagattcaccatcagcgccgacaccagcaagaacaccgcctacctccagatgaactccctgagagccgaagataccgccgtgtactactgctccagacagtacagcgcctacttcgactattggggccagggaaccctggtcaccgttagctctacgcgtgaggacctgaagaacgtgttcccacctgaggtggccgtgttcgagcctagcgaggccgagatcagccacacccagaaagccaccctcgtgtgcctggctaccggcttctaccccgaccatgtggaactgtcttggtgggtcaacggcaaagaggtgcacagcggcgtgtctaccgacccccagccactgaaagaacagcccgccctgaacgacagccggtactgcctgagcagcagactgagagtgtccgccaccttctggcagaacccccggaaccacttcagatgccaggtgcagttctacggcctgagcgagaacgacgagtggacccaggacagagccaagcccgtgacccagatcgtgtctgccgaagcctggggcagagccgattgcggctttaccagcgagagctaccagcagggcgtgctgagcgccaccaacctgagcgtgatcggcttcagaatcctgctgctgaaagtggccggctttaacctgctgatgaccctgcggctgtggtccagccgcgccaagagaagcggatctggcgtgaagcagaccctgaatttcgacctgctgaagctggctggcgacgtggaatccaacccaggcccttctagaggccatatgaccgagtacaagcccacggtgcgcctcgccacccgcgacgacgtccccagggccgtacgcaccctcgccgccgcgttcgccgactaccccgccacgcgccacaccgtcgatccggaccgccacatcgagcgggtcaccgagctgcaagaactcttcctcacgcgcgtcgggctcgacatcggcaaggtgtgggtcgcggacgacggcgccgcggtggcggtctggaccacgccggagagcgtcgaagcgggggcggtgttcgccgagatcggcccgcgcatggccgagttgagcggttcccggctggccgcgcagcaacagatggaaggcctcctggcgccgcaccggcccaaggagcccgcgtggttcctggccaccgtcggcgtctcgcccgaccaccagggcaagggtctgggcagcgccgtcgtgctccccggagtggaggcggccgagcgcgccggggtgcccgccttcctggagacctccgcgccccgcaacctccccttctacgagcggctcggcttcaccgtcaccgccgacgtcgaggtgcccgaaggaccgcgcacctggtgcatgacccgcaagcccggtgcctga

SEQ ID NO: 39635 - DNA, 2604 bp, synthetic construct
  source 1..2604: mol_type = other DNA
atggccttaccagtgaccgccttgctcctgccgctggccttgctgctccacgccgccaggccgctcgaggaggacctgaagaacgtgttcccacctgaggtggccgtgttcgagcctagcgaggccgagatcagccacacccagaaagccaccctcgtgtgcctggctaccggcttctaccccgaccatgtggaactgtcttggtgggtcaacggcaaagaggtgcacagcggcgtgtgtaccgacccccagccactgaaagaacagcccgccctgaacgacagccggtactgcctgagcagcagactgagagtgtccgccaccttctggcagaacccccggaaccacttcagatgccaggtgcagttctacggcctgagcgagaacgacgagtggacccaggacagagccaagcccgtgacccagatcgtgtctgccgaagcctggggcagagccgattgcgacgtgaagctggtggaaaagagcttcgagacagacaccaacctgaacttccagaacctgagcgtgatcggcttcagaatcctgctgctgaaagtggccggctttaacctgctgatgaccctgcggctgtggtccagcagggccaagcgatctggatctggagcaacaaacttctcactactcaaacaagcaggtgacgtggaggagaatcccgggcctactagcatggccttaccagtgaccgccttgctcctgccgctggccttgctgctccacgccgccaggccggacatccagatgacacagagccctagcagcctgtctgccagcgtgggagacagagtgaccatcacctgtagagccagccaggatgtgtctacagccgtggcctggtatcagcagaagcctggaaaggcccctaagctgctgatctacagcgccagctttctgtactccggcgtgcccagcagattcagcggaagcagaagcggcaccgacttcaccctgacaatatccagcctccagcctgaggacttcgccacctactactgccagcagtacctgtaccagccttggacattcggccagggcaccaaggtggaaatcaagagaggcggaggcggaagtggaggcggaggatctggcggcggaggctctgaagttcagctggttgagtctggcggaggactggttcaacctggcggaagcctgagactgtcttgtgccgccagcggcttcaacatcgactactacggaatgcactgggtccgacaggcccctggcaaaggacttgaatgggtcgcctctctgtacggcggcagcgatagcacagattacgccgactctgtgaagggcagattcaccatcagcgccgacaccagcaagaacaccgcctacctccagatgaactccctgagagccgaagataccgccgtgtactactgctccagacagtacagcgcctacttcgactattggggccagggaaccctggtcaccgttagctctacgcgtatccagaaccctgatcctgccgtgtaccagctgcgggatagcaagagcagcgacaagagcgtgtgtctgttcaccgacttcgacagccagaccaacgtgtcccagagcaaggactccgacgtgtacatcaccgataagtgcgtgctggacatgcggagcatggacttcaagagcaactccgccgtggcctggtccaacaagtccgatttcgcctgcgccaacgccttcaacaacagcattatccccgaggacacattcttcccaagccccgagagcagctgcggctttaccagcgagagctaccagcagggcgtgctgagcgccaccatcctgtacgagatcctgctgggcaaggccaccctgtacgccgtgctggtgtctgccctggtgctgatggctatggtcaagcggaaggacagccggggacgcgccaagagaagcggatctggcgtgaagcagaccctgaatttcgacctgctgaagctggctggcgacgtggaatccaacccaggcccttctagaggccatatgaccgagtacaagcccacggtgcgcctcgccacccgcgacgacgtccccagggccgtacgcaccctcgccgccgcgttcgccgactaccccgccacgcgccacaccgtcgatccggaccgccacatcgagcgggtcaccgagctgcaagaactcttcctcacgcgcgtcgggctcgacatcggcaaggtgtgggtcgcggacgacggcgccgcggtggcggtctggaccacgccggagagcgtcgaagcgggggcggtgttcgccgagatcggcccgcgcatggccgagttgagcggttcccggctggccgcgcagcaacagatggaaggcctcctggcgccgcaccggcccaaggagcccgcgtggttcctggccaccgtcggcgtctcgcccgaccaccagggcaagggtctgggcagcgccgtcgtgctccccggagtggaggcggccgagcgcgccggggtgcccgccttcctggagacctccgcgccccgcaacctccccttctacgagcggctcggcttcaccgtcaccgccgacgtcgaggtgcccgaaggaccgcgcacctggtgcatgacccgcaagcccggtgcctga

SEQ ID NO: 39636 - DNA, 2604 bp, synthetic construct
  source 1..2604: mol_type = other DNA
atggccttaccagtgaccgccttgctcctgccgctggccttgctgctccacgccgccaggccgctcgaggaggacctgaagaacgtgttcccacctgaggtggccgtgttcgagcctagcgaggccgagatcagccacacccagaaagccaccctcgtgtgcctggctaccggcttctaccccgaccatgtggaactgtcttggtgggtcaacggcaaagaggtgcacagcggcgtgtctaccgacccccagccactgaaagaacagcccgccctgaacgacagccggtactgcctgagcagcagactgagagtgtccgccaccttctggcagaacccccggaaccacttcagatgccaggtgcagttctacggcctgagcgagaacgacgagtggacccaggacagagccaagcccgtgacccagatcgtgtctgccgaagcctggggcagagccgattgcgacgtgaagctggtggaaaagagcttcgagacagacaccaacctgaacttccagaacctgagcgtgatcggcttcagaatcctgctgctgaaagtggccggctttaacctgctgatgaccctgcggctgtggtccagcagggccaagcgatctggatctggagcaacaaacttctcactactcaaacaagcaggtgacgtggaggagaatcccgggcctactagcatggccttaccagtgaccgccttgctcctgccgctggccttgctgctccacgccgccaggccggacatccagatgacacagagccctagcagcctgtctgccagcgtgggagacagagtgaccatcacctgtagagccagccaggatgtgtctacagccgtggcctggtatcagcagaagcctggaaaggcccctaagctgctgatctacagcgccagctttctgtactccggcgtgcccagcagattcagcggaagcagaagcggcaccgacttcaccctgacaatatccagcctccagcctgaggacttcgccacctactactgccagcagtacctgtaccagccttggacattcggccagggcaccaaggtggaaatcaagagaggcggaggcggaagtggaggcggaggatctggcggcggaggctctgaagttcagctggttgagtctggcggaggactggttcaacctggcggaagcctgagactgtcttgtgccgccagcggcttcaacatcgactactacggaatgcactgggtccgacaggcccctggcaaaggacttgaatgggtcgcctctctgtacggcggcagcgatagcacagattacgccgactctgtgaagggcagattcaccatcagcgccgacaccagcaagaacaccgcctacctccagatgaactccctgagagccgaagataccgccgtgtactactgctccagacagtacagcgcctacttcgactattggggccagggaaccctggtcaccgttagctctacgcgtatccagaaccctgatcctgccgtgtaccagctgcgggatagcaagagcagcgacaagagcgtgtgtctgttcaccgacttcgacagccagaccaacgtgtcccagagcaaggactccgacgtgtacatcaccgataagaccgtgctggacatgcggagcatggacttcaagagcaactccgccgtggcctggtccaacaagtccgatttcgcctgcgccaacgccttcaacaacagcattatccccgaggacacattcttcccaagccccgagagcagctgcggctttaccagcgagagctaccagcagggcgtgctgagcgccaccatcctgtacgagatcctgctgggcaaggccaccctgtacgccgtgctggtgtctgccctggtgctgatggctatggtcaagcggaaggacagccggggacgcgccaagagaagcggatctggcgtgaagcagaccctgaatttcgacctgctgaagctggctggcgacgtggaatccaacccaggcccttctagaggccatatgaccgagtacaagcccacggtgcgcctcgccacccgcgacgacgtccccagggccgtacgcaccctcgccgccgcgttcgccgactaccccgccacgcgccacaccgtcgatccggaccgccacatcgagcgggtcaccgagctgcaagaactcttcctcacgcgcgtcgggctcgacatcggcaaggtgtgggtcgcggacgacggcgccgcggtggcggtctggaccacgccggagagcgtcgaagcgggggcggtgttcgccgagatcggcccgcgcatggccgagttgagcggttcccggctggccgcgcagcaacagatggaaggcctcctggcgccgcaccggcccaaggagcccgcgtggttcctggccaccgtcggcgtctcgcccgaccaccagggcaagggtctgggcagcgccgtcgtgctccccggagtggaggcggccgagcgcgccggggtgcccgccttcctggagacctccgcgccccgcaacctccccttctacgagcggctcggcttcaccgtcaccgccgacgtcgaggtgcccgaaggaccgcgcacctggtgcatgacccgcaagcccggtgcctga

SEQ ID NO: 39637 - DNA, 2913 bp, synthetic construct
  source 1..2913: mol_type = other DNA
atggccttaccagtgaccgccttgctcctgccgctggccttgctgctccacgccgccaggccgctcgaggaggaggacctgaagaacgtgttcccacctgaggtggccgtgttcgagcctagcgaggccgagatcagccacacccagaaagccaccctcgtgtgcctggctaccggcttctaccccgaccatgtggaactgtcttggtgggtcaacggcaaagaggtgcacagcggcgtgtctaccgacccccagccactgaaagaacagcccgccctgaacgacagccggtactgcctgagcagcagactgagagtgtccgccaccttctggcagaacccccggaaccacttcagatgccaggtgcagttctacggcctgagcgagaacgacgagtggacccaggacagagccaagcccgtgacccagatcgtgtctgccgaagcctggggcagagccgatgatgtgattaagatccactggcaggaaaagaagtccaacaccatcctgggcagccaggaaggcaacaccatgaagaccaacgacacctacatgaagttcagctggctgaccgtgcccgagaagtccctggacaaagaacacagatgcatcgtgcggcacgaaaacaacaagaacggcgtggaccaggaaatcatcttcccacccatcaagaccgatgtgattacaatggaccccaaggacaactgctccaaggacgccaacgataccctgctgctccagctgaccaacaccagcgcctactacatgtacttgttgctgctgctgaagtccgtggtgtacttcgccatcatcacatgctgcctgctgcggagaaccgccttctgctgcaacggcgagaagtctagggccaagcgatctggatctggagcaacaaacttctcactactcaaacaagcaggtgacgtggaggagaatcccgggcctactagcatggccttaccagtgaccgccttgctcctgccgctggccttgctgctccacgccgccaggccggacatccagatgacacagagccctagcagcctgtctgccagcgtgggagacagagtgaccatcacctgtagagccagccaggatgtgtctacagccgtggcctggtatcagcagaagcctggaaaggcccctaagctgctgatctacagcgccagctttctgtactccggcgtgcccagcagattcagcggaagcagaagcggcaccgacttcaccctgacaatatccagcctccagcctgaggacttcgccacctactactgccagcagtacctgtaccagccttggacattcggccagggcaccaaggtggaaatcaagagaggcggaggcggaagtggaggcggaggatctggcggcggaggctctgaagttcagctggttgagtctggcggaggactggttcaacctggcggaagcctgagactgtcttgtgccgccagcggcttcaacatcgactactacggaatgcactgggtccgacaggcccctggcaaaggacttgaatgggtcgcctctctgtacggcggcagcgatagcacagattacgccgactctgtgaagggcagattcaccatcagcgccgacaccagcaagaacaccgcctacctccagatgaactccctgagagccgaagataccgccgtgtactactgctccagacagtacagcgcctacttcgactattggggccagggaaccctggtcaccgttagctctacgcgtatccagaaccctgatcctgccgtgtaccagctgcgggatagcaagagcagcgacaagagcgtgtgtctgttcaccgacttcgacagccagaccaacgtgtcccagagcaaggactccgacgtgtacatcaccgataagaccgtgctggacatgcggagcatggacttcaagagcaactccgccgtggcctggtccaacaagtccgatttcgcctgcgccaacgccttcaacaacagcattatccccgaggacacattcttcccaagccccgagagcagcgactccaccgaccacgtgaagcccaaagagacagagaacaccaagcagcccagcaagagctgccacaagcccaaggccatcgtgcacaccgagaaagtgaacatgatgagcctgaccgtgctgggcctgcggatgctgttcgccaaaaccgtggccgtgaacttcctgctgaccgccaagctgttcttcctccgcgccaagagaagcggatctggcgtgaagcagaccctgaatttcgacctgctgaagctggctggcgacgtggaatccaacccaggcccttctagaggccatatgaccgagtacaagcccacggtgcgcctcgccacccgcgacgacgtccccagggccgtacgcaccctcgccgccgcgttcgccgactaccccgccacgcgccacaccgtcgatccggaccgccacatcgagcgggtcaccgagctgcaagaactcttcctcacgcgcgtcgggctcgacatcggcaaggtgtgggtcgcggacgacggcgccgcggtggcggtctggaccacgccggagagcgtcgaagcgggggcggtgttcgccgagatcggcccgcgcatggccgagttgagcggttcccggctggccgcgcagcaacagatggaaggcctcctggcgccgcaccggcccaaggagcccgcgtggttcctggccaccgtcggcgtctcgcccgaccaccagggcaagggtctgggcagcgccgtcgtgctccccggagtggaggcggccgagcgcgccggggtgcccgccttcctggagacctccgcgccccgcaacctccccttctacgagcggctcggcttcaccgtcaccgccgacgtcgaggtgcccgaaggaccgcgcacctggtgcatgacccgcaagcccggtgcctga

SEQ ID NO: 39638 - DNA, 2604 bp, synthetic construct
  source 1..2604: mol_type = other DNA
atggccttaccagtgaccgccttgctcctgccgctggccttgctgctccacgccgccaggccgctcgaggaggacctgaagaacgtgttcccacctgaggtggccgtgttcgagcctagcgaggccgagatcagccacacccagaaagccaccctcgtgtgcctggctaccggcttctaccccgaccatgtggaactgtcttggtgggtcaacggcaaagaggtgcacagcggcgtgtgtaccgacccccagccactgaaagaacagcccgccctgaacgacagccggtactgcctgagcagcagactgagagtgtccgccaccttctggcagaacccccggaaccacttcagatgccaggtgcagttctacggcctgagcgagaacgacgagtggacccaggacagagccaagcccgtgacccagatcgtgtctgccgaagcctggggcagagccgattgcggctttaccagcgagagctaccagcagggcgtgctgagcgccaccaacctgagcgtgatcggcttcagaatcctgctgctgaaagtggccggctttaacctgctgatgaccctgcggctgtggtccagcagggccaagcgatctggatctggagcaacaaacttctcactactcaaacaagcaggtgacgtggaggagaatcccgggcctactagcatggccttaccagtgaccgccttgctcctgccgctggccttgctgctccacgccgccaggccggacatccagatgacacagagccctagcagcctgtctgccagcgtgggagacagagtgaccatcacctgtagagccagccaggatgtgtctacagccgtggcctggtatcagcagaagcctggaaaggcccctaagctgctgatctacagcgccagctttctgtactccggcgtgcccagcagattcagcggaagcagaagcggcaccgacttcaccctgacaatatccagcctccagcctgaggacttcgccacctactactgccagcagtacctgtaccagccttggacattcggccagggcaccaaggtggaaatcaagagaggcggaggcggaagtggaggcggaggatctggcggcggaggctctgaagttcagctggttgagtctggcggaggactggttcaacctggcggaagcctgagactgtcttgtgccgccagcggcttcaacatcgactactacggaatgcactgggtccgacaggcccctggcaaaggacttgaatgggtcgcctctctgtacggcggcagcgatagcacagattacgccgactctgtgaagggcagattcaccatcagcgccgacaccagcaagaacaccgcctacctccagatgaactccctgagagccgaagataccgccgtgtactactgctccagacagtacagcgcctacttcgactattggggccagggaaccctggtcaccgttagctctacgcgtatccagaaccctgatcctgccgtgtaccagctgcgggatagcaagagcagcgacaagagcgtgtgtctgttcaccgacttcgacagccagaccaacgtgtcccagagcaaggactccgacgtgtacatcaccgataagtgcgtgctggacatgcggagcatggacttcaagagcaactccgccgtggcctggtccaacaagtccgatttcgcctgcgccaacgccttcaacaacagcattatccccgaggacacattcttcccaagccccgagagcagctgcgacgtgaagctggtggaaaagagcttcgagacagacaccaacctgaacttccagatcctgtacgagatcctgctgggcaaggccaccctgtacgccgtgctggtgtctgccctggtgctgatggctatggtcaagcggaaggacagccggggacgcgccaagagaagcggatctggcgtgaagcagaccctgaatttcgacctgctgaagctggctggcgacgtggaatccaacccaggcccttctagaggccatatgaccgagtacaagcccacggtgcgcctcgccacccgcgacgacgtccccagggccgtacgcaccctcgccgccgcgttcgccgactaccccgccacgcgccacaccgtcgatccggaccgccacatcgagcgggtcaccgagctgcaagaactcttcctcacgcgcgtcgggctcgacatcggcaaggtgtgggtcgcggacgacggcgccgcggtggcggtctggaccacgccggagagcgtcgaagcgggggcggtgttcgccgagatcggcccgcgcatggccgagttgagcggttcccggctggccgcgcagcaacagatggaaggcctcctggcgccgcaccggcccaaggagcccgcgtggttcctggccaccgtcggcgtctcgcccgaccaccagggcaagggtctgggcagcgccgtcgtgctccccggagtggaggcggccgagcgcgccggggtgcccgccttcctggagacctccgcgccccgcaacctccccttctacgagcggctcggcttcaccgtcaccgccgacgtcgaggtgcccgaaggaccgcgcacctggtgcatgacccgcaagcccggtgcctga

SEQ ID NO: 39639 - DNA, 2691 bp, synthetic construct
  source 1..2691: mol_type = other DNA
atggccttaccagtgaccgccttgctcctgccgctggccttgctgctccacgccgccaggccgctcgaggaggaggacctgaagaacgtgttcccacctgaggtggccgtgttcgagcctagcgaggccgagatcagccacacccagaaagccaccctcgtgtgcctggctaccggcttctaccccgaccatgtggaactgtcttggtgggtcaacggcaaagaggtgcacagcggcgtgtgtaccgacccccagccactgaaagaacagcccgccctgaacgacagccggtactgcctgagcagcagactgagagtgtccgccaccttctggcagaacccccggaaccacttcagatgccaggtgcagttctacggcctgagcgagaacgacgagtggacccaggacagagccaagcccgtgacccagatcgtgtctgccgaagcctggggcagagccgattgcggctttaccagcgagagctaccagcagggcgtgctgagcgccaccaacctgagcgtgatcggcttcagaatcctgctgctgaaagtggccggctttaacctgctgatgaccctgcggctgtggtccagcagggccaagcgatctggatctggagcaacaaacttctcactactcaaacaagcaggtgacgtggaggagaatcccgggcctactagcatggccttaccagtgaccgccttgctcctgccgctggccttgctgctccacgccgccaggccggacatccagatgacacagagccctagcagcctgtctgccagcgtgggagacagagtgaccatcacctgtagagccagccaggatgtgtctacagccgtggcctggtatcagcagaagcctggaaaggcccctaagctgctgatctacagcgccagctttctgtactccggcgtgcccagcagattcagcggaagcagaagcggcaccgacttcaccctgacaatatccagcctccagcctgaggacttcgccacctactactgccagcagtacctgtaccagccttggacattcggccagggcaccaaggtggaaatcaagagaggcggaggcggaagtggaggcggaggatctggcggcggaggctctgaagttcagctggttgagtctggcggaggactggttcaacctggcggaagcctgagactgtcttgtgccgccagcggcttcaacatcgactactacggaatgcactgggtccgacaggcccctggcaaaggacttgaatgggtcgcctctctgtacggcggcagcgatagcacagattacgccgactctgtgaagggcagattcaccatcagcgccgacaccagcaagaacaccgcctacctccagatgaactccctgagagccgaagataccgccgtgtactactgctccagacagtacagcgcctacttcgactattggggccagggaaccctggtcaccgttagctctacgcgtggacagcctaaggccaatcctaccgtgacactgttccctccaagcagcgaagaactccaggccaacaaggccacacttgtgtgcctgatctccgacttctaccctggggctgtgacagtggcttggaaggccgatggatctcctgtgaaagccggcgtggaaaccaccaagccatccaagcagagcaacaacaaatacgccgccagctcctacctgagcctgacacctgagcagtggaagtcccacagatcctacagctgccaagtgacccacgaaggcagcaccgtggaaaagacagtggcccctacagagtgcagccccatcaagaccgatgtgattacaatggaccccaaggacaactgctccaaggacgccaacgataccctgctgctccagctgaccaacaccagcgcctactacatgtacttgttgctgctgctgaagtccgtggtgtacttcgccatcatcacatgctgcctgctgcggagaaccgccttctgctgcaacggcgagaagtctcgcgccaagagaagcggatctggcgtgaagcagaccctgaatttcgacctgctgaagctggctggcgacgtggaatccaacccaggcccttctagaggccatatgaccgagtacaagcccacggtgcgcctcgccacccgcgacgacgtccccagggccgtacgcaccctcgccgccgcgttcgccgactaccccgccacgcgccacaccgtcgatccggaccgccacatcgagcgggtcaccgagctgcaagaactcttcctcacgcgcgtcgggctcgacatcggcaaggtgtgggtcgcggacgacggcgccgcggtggcggtctggaccacgccggagagcgtcgaagcgggggcggtgttcgccgagatcggcccgcgcatggccgagttgagcggttcccggctggccgcgcagcaacagatggaaggcctcctggcgccgcaccggcccaaggagcccgcgtggttcctggccaccgtcggcgtctcgcccgaccaccagggcaagggtctgggcagcgccgtcgtgctccccggagtggaggcggccgagcgcgccggggtgcccgccttcctggagacctccgcgccccgcaacctccccttctacgagcggctcggcttcaccgtcaccgccgacgtcgaggtgcccgaaggaccgcgcacctggtgcatgacccgcaagcccggtgcctga

SEQ ID NO: 39640 - DNA, 2691 bp, synthetic construct
  source 1..2691: mol_type = other DNA
atggccttaccagtgaccgccttgctcctgccgctggccttgctgctccacgccgccaggccgctcgagggacagcctaaggccaatcctaccgtgacactgttccctccaagcagcgaagaactccaggccaacaaggccacacttgtgtgcctgatctccgacttctaccctggggctgtgacagtggcttggaaggccgatggatctcctgtgaaagccggcgtggaaaccaccaagccatccaagcagagcaacaacaaatacgccgccagctcctacctgagcctgacacctgagcagtggaagtcccacagatcctacagctgccaagtgacccacgaaggcagcaccgtggaaaagacagtggcccctacagagtgcagccccatcaagaccgatgtgattacaatggaccccaaggacaactgctccaaggacgccaacgataccctgctgctccagctgaccaacaccagcgcctactacatgtacttgttgctgctgctgaagtccgtggtgtacttcgccatcatcacatgctgcctgctgcggagaaccgccttctgctgcaacggcgagaagtctagggccaagcgatctggatctggagcaacaaacttctcactactcaaacaagcaggtgacgtggaggagaatcccgggcctactagcatggccttaccagtgaccgccttgctcctgccgctggccttgctgctccacgccgccaggccggacatccagatgacacagagccctagcagcctgtctgccagcgtgggagacagagtgaccatcacctgtagagccagccaggatgtgtctacagccgtggcctggtatcagcagaagcctggaaaggcccctaagctgctgatctacagcgccagctttctgtactccggcgtgcccagcagattcagcggaagcagaagcggcaccgacttcaccctgacaatatccagcctccagcctgaggacttcgccacctactactgccagcagtacctgtaccagccttggacattcggccagggcaccaaggtggaaatcaagagaggcggaggcggaagtggaggcggaggatctggcggcggaggctctgaagttcagctggttgagtctggcggaggactggttcaacctggcggaagcctgagactgtcttgtgccgccagcggcttcaacatcgactactacggaatgcactgggtccgacaggcccctggcaaaggacttgaatgggtcgcctctctgtacggcggcagcgatagcacagattacgccgactctgtgaagggcagattcaccatcagcgccgacaccagcaagaacaccgcctacctccagatgaactccctgagagccgaagataccgccgtgtactactgctccagacagtacagcgcctacttcgactattggggccagggaaccctggtcaccgttagctctacgcgtgaggaggacctgaagaacgtgttcccacctgaggtggccgtgttcgagcctagcgaggccgagatcagccacacccagaaagccaccctcgtgtgcctggctaccggcttctaccccgaccatgtggaactgtcttggtgggtcaacggcaaagaggtgcacagcggcgtgtgtaccgacccccagccactgaaagaacagcccgccctgaacgacagccggtactgcctgagcagcagactgagagtgtccgccaccttctggcagaacccccggaaccacttcagatgccaggtgcagttctacggcctgagcgagaacgacgagtggacccaggacagagccaagcccgtgacccagatcgtgtctgccgaagcctggggcagagccgattgcggctttaccagcgagagctaccagcagggcgtgctgagcgccaccaacctgagcgtgatcggcttcagaatcctgctgctgaaagtggccggctttaacctgctgatgaccctgcggctgtggtccagccgcgccaagagaagcggatctggcgtgaagcagaccctgaatttcgacctgctgaagctggctggcgacgtggaatccaacccaggcccttctagaggccatatgaccgagtacaagcccacggtgcgcctcgccacccgcgacgacgtccccagggccgtacgcaccctcgccgccgcgttcgccgactaccccgccacgcgccacaccgtcgatccggaccgccacatcgagcgggtcaccgagctgcaagaactcttcctcacgcgcgtcgggctcgacatcggcaaggtgtgggtcgcggacgacggcgccgcggtggcggtctggaccacgccggagagcgtcgaagcgggggcggtgttcgccgagatcggcccgcgcatggccgagttgagcggttcccggctggccgcgcagcaacagatggaaggcctcctggcgccgcaccggcccaaggagcccgcgtggttcctggccaccgtcggcgtctcgcccgaccaccagggcaagggtctgggcagcgccgtcgtgctccccggagtggaggcggccgagcgcgccggggtgcccgccttcctggagacctccgcgccccgcaacctccccttctacgagcggctcggcttcaccgtcaccgccgacgtcgaggtgcccgaaggaccgcgcacctggtgcatgacccgcaagcccggtgcctga

SEQ ID NO: 39641 - DNA, 2682 bp, synthetic construct
  source 1..2682: mol_type = other DNA
atggccttaccagtgaccgccttgctcctgccgctggccttgctgctccacgccgccaggccgctcgaggaggcctctacaaagggaccctccgtgtttcctctggctcccagcagcaagtctacaagcggaggaacagccgctctgggctgcctggtcaaggattactttcccgagcctgtgaccgtgtcctggaatagcggagcactgacaagcggcgtgcacacctttccagccgtgctgcaaagcagcggcctgtactctctgagcagcgtggtcacagtgcctagctctagcctgggcacccagacctacatctgcaatgtgaaccacaagcctagcaacaccaaggtggacaagagagtggaacccaagagctgtcccatcaagaccgatgtgattacaatggaccccaaggacaactgctccaaggacgccaacgataccctgctgctccagctgaccaacaccagcgcctactacatgtacttgttgctgctgctgaagtccgtggtgtacttcgccatcatcacatgctgcctgctgcggagaaccgccttctgctgcaacggcgagaagtctagggccaagcgatctggatctggagcaacaaacttctcactactcaaacaagcaggtgacgtggaggagaatcccgggcctactagcatggccttaccagtgaccgccttgctcctgccgctggccttgctgctccacgccgccaggccggacatccagatgacacagagccctagcagcctgtctgccagcgtgggagacagagtgaccatcacctgtagagccagccaggatgtgtctacagccgtggcctggtatcagcagaagcctggaaaggcccctaagctgctgatctacagcgccagctttctgtactccggcgtgcccagcagattcagcggaagcagaagcggcaccgacttcaccctgacaatatccagcctccagcctgaggacttcgccacctactactgccagcagtacctgtaccagccttggacattcggccagggcaccaaggtggaaatcaagagaggcggaggcggaagtggaggcggaggatctggcggcggaggctctgaagttcagctggttgagtctggcggaggactggttcaacctggcggaagcctgagactgtcttgtgccgccagcggcttcaacatcgactactacggaatgcactgggtccgacaggcccctggcaaaggacttgaatgggtcgcctctctgtacggcggcagcgatagcacagattacgccgactctgtgaagggcagattcaccatcagcgccgacaccagcaagaacaccgcctacctccagatgaactccctgagagccgaagataccgccgtgtactactgctccagacagtacagcgcctacttcgactattggggccagggaaccctggtcaccgttagctctacgcgtggacagcctaaggccaatcctaccgtgacactgttccctccaagcagcgaagaactccaggccaacaaggccacacttgtgtgcctgatctccgacttctaccctggggctgtgacagtggcttggaaggccgatggatctcctgtgaaagccggcgtggaaaccaccaagccatccaagcagagcaacaacaaatacgccgccagctcctacctgagcctgacacctgagcagtggaagtcccacagatcctacagctgccaagtgacccacgaaggcagcaccgtggaaaagacagtggcccctacagagtgcagcgaagtgaaaaccgactccaccgaccacgtgaagcccaaagagacagagaacaccaagcagcccagcaagagctgccacaagcccaaggccatcgtgcacaccgagaaagtgaacatgatgagcctgaccgtgctgggcctgcggatgctgttcgccaaaaccgtggccgtgaacttcctgctgaccgccaagctgttcttcctccgcgccaagagaagcggatctggcgtgaagcagaccctgaatttcgacctgctgaagctggctggcgacgtggaatccaacccaggcccttctagaggccatatgaccgagtacaagcccacggtgcgcctcgccacccgcgacgacgtccccagggccgtacgcaccctcgccgccgcgttcgccgactaccccgccacgcgccacaccgtcgatccggaccgccacatcgagcgggtcaccgagctgcaagaactcttcctcacgcgcgtcgggctcgacatcggcaaggtgtgggtcgcggacgacggcgccgcggtggcggtctggaccacgccggagagcgtcgaagcgggggcggtgttcgccgagatcggcccgcgcatggccgagttgagcggttcccggctggccgcgcagcaacagatggaaggcctcctggcgccgcaccggcccaaggagcccgcgtggttcctggccaccgtcggcgtctcgcccgaccaccagggcaagggtctgggcagcgccgtcgtgctccccggagtggaggcggccgagcgcgccggggtgcccgccttcctggagacctccgcgccccgcaacctccccttctacgagcggctcggcttcaccgtcaccgccgacgtcgaggtgcccgaaggaccgcgcacctggtgcatgacccgcaagcccggtgcctga

SEQ ID NO: 39642 - DNA, 2616 bp, synthetic construct
  source 1..2616: mol_type = other DNA
atggccttaccagtgaccgccttgctcctgccgctggccttgctgctccacgccgccaggccgctcgaggaggcctctacaaagggaccctccgtgtttcctctggctcccagcagcaagtctacaagcggaggaacagccgctctgggctgcctggtcaaggattactttcccgagcctgtgaccgtgtcctggaatagcggagcactgacaagcggcgtgcacacctttccagccgtgctgcaaagcagcggcctgtactctctgagcagcgtggtcacagtgcctagctctagcctgggcacccagacctacatctgcaatgtgaaccacaagcctagcaacaccaaggtggacaagagagtggaacccaagagctgtggcagagccgattgcggctttaccagcgagagctaccagcagggcgtgctgagcgccaccatcctgtacgagatcctgctgggcaaggccaccctgtacgccgtgctggtgtctgccctggtgctgatggctatggtcaagcggaaggacagccggggaagggccaagcgatctggatctggagcaacaaacttctcactactcaaacaagcaggtgacgtggaggagaatcccgggcctactagcatggccttaccagtgaccgccttgctcctgccgctggccttgctgctccacgccgccaggccggacatccagatgacacagagccctagcagcctgtctgccagcgtgggagacagagtgaccatcacctgtagagccagccaggatgtgtctacagccgtggcctggtatcagcagaagcctggaaaggcccctaagctgctgatctacagcgccagctttctgtactccggcgtgcccagcagattcagcggaagcagaagcggcaccgacttcaccctgacaatatccagcctccagcctgaggacttcgccacctactactgccagcagtacctgtaccagccttggacattcggccagggcaccaaggtggaaatcaagagaggcggaggcggaagtggaggcggaggatctggcggcggaggctctgaagttcagctggttgagtctggcggaggactggttcaacctggcggaagcctgagactgtcttgtgccgccagcggcttcaacatcgactactacggaatgcactgggtccgacaggcccctggcaaaggacttgaatgggtcgcctctctgtacggcggcagcgatagcacagattacgccgactctgtgaagggcagattcaccatcagcgccgacaccagcaagaacaccgcctacctccagatgaactccctgagagccgaagataccgccgtgtactactgctccagacagtacagcgcctacttcgactattggggccagggaaccctggtcaccgttagctctacgcgtggacagcctaaggccaatcctaccgtgacactgttccctccaagcagcgaagaactccaggccaacaaggccacacttgtgtgcctgatctccgacttctaccctggggctgtgacagtggcttggaaggccgatggatctcctgtgaaagccggcgtggaaaccaccaagccatccaagcagagcaacaacaaatacgccgccagctcctacctgagcctgacacctgagcagtggaagtcccacagatcctacagctgccaagtgacccacgaaggcagcaccgtggaaaagacagtggcccctacagagtgcagcatccccgaggacacattcttcccaagccccgagagcagctgcgacgtgaagctggtggaaaagagcttcgagacagacaccaacctgaacttccagaacctgagcgtgatcggcttcagaatcctgctgctgaaagtggccggctttaacctgctgatgaccctgcggctgtggtccagccgcgccaagagaagcggatctggcgtgaagcagaccctgaatttcgacctgctgaagctggctggcgacgtggaatccaacccaggcccttctagaggccatatgaccgagtacaagcccacggtgcgcctcgccacccgcgacgacgtccccagggccgtacgcaccctcgccgccgcgttcgccgactaccccgccacgcgccacaccgtcgatccggaccgccacatcgagcgggtcaccgagctgcaagaactcttcctcacgcgcgtcgggctcgacatcggcaaggtgtgggtcgcggacgacggcgccgcggtggcggtctggaccacgccggagagcgtcgaagcgggggcggtgttcgccgagatcggcccgcgcatggccgagttgagcggttcccggctggccgcgcagcaacagatggaaggcctcctggcgccgcaccggcccaaggagcccgcgtggttcctggccaccgtcggcgtctcgcccgaccaccagggcaagggtctgggcagcgccgtcgtgctccccggagtggaggcggccgagcgcgccggggtgcccgccttcctggagacctccgcgccccgcaacctccccttctacgagcggctcggcttcaccgtcaccgccgacgtcgaggtgcccgaaggaccgcgcacctggtgcatgacccgcaagcccggtgcctga

SEQ ID NO: 39643 - DNA, 2616 bp, synthetic construct
  source 1..2616: mol_type = other DNA
atggccttaccagtgaccgccttgctcctgccgctggccttgctgctccacgccgccaggccgctcgaggaggcctctacaaagggaccctccgtgtttcctctggctcccagcagcaagtctacaagcggaggaacagccgctctgggctgcctggtcaaggattactttcccgagcctgtgaccgtgtcctggaatagcggagcactgacaagcggcgtgcacacctttccagccgtgctgcaaagcagcggcctgtactctctgagcagcgtggtcacagtgcctagctctagcctgggcacccagacctacatctgcaatgtgaaccacaagcctagcaacaccaaggtggacaagagagtggaacccaagagctgtatccccgaggacacattcttcccaagccccgagagcagctgcgacgtgaagctggtggaaaagagcttcgagacagacaccaacctgaacttccagaacctgagcgtgatcggcttcagaatcctgctgctgaaagtggccggctttaacctgctgatgaccctgcggctgtggtccagcagggccaagcgatctggatctggagcaacaaacttctcactactcaaacaagcaggtgacgtggaggagaatcccgggcctactagcatggccttaccagtgaccgccttgctcctgccgctggccttgctgctccacgccgccaggccggacatccagatgacacagagccctagcagcctgtctgccagcgtgggagacagagtgaccatcacctgtagagccagccaggatgtgtctacagccgtggcctggtatcagcagaagcctggaaaggcccctaagctgctgatctacagcgccagctttctgtactccggcgtgcccagcagattcagcggaagcagaagcggcaccgacttcaccctgacaatatccagcctccagcctgaggacttcgccacctactactgccagcagtacctgtaccagccttggacattcggccagggcaccaaggtggaaatcaagagaggcggaggcggaagtggaggcggaggatctggcggcggaggctctgaagttcagctggttgagtctggcggaggactggttcaacctggcggaagcctgagactgtcttgtgccgccagcggcttcaacatcgactactacggaatgcactgggtccgacaggcccctggcaaaggacttgaatgggtcgcctctctgtacggcggcagcgatagcacagattacgccgactctgtgaagggcagattcaccatcagcgccgacaccagcaagaacaccgcctacctccagatgaactccctgagagccgaagataccgccgtgtactactgctccagacagtacagcgcctacttcgactattggggccagggaaccctggtcaccgttagctctacgcgtggacagcctaaggccaatcctaccgtgacactgttccctccaagcagcgaagaactccaggccaacaaggccacacttgtgtgcctgatctccgacttctaccctggggctgtgacagtggcttggaaggccgatggatctcctgtgaaagccggcgtggaaaccaccaagccatccaagcagagcaacaacaaatacgccgccagctcctacctgagcctgacacctgagcagtggaagtcccacagatcctacagctgccaagtgacccacgaaggcagcaccgtggaaaagacagtggcccctacagagtgcagcggcagagccgattgcggctttaccagcgagagctaccagcagggcgtgctgagcgccaccatcctgtacgagatcctgctgggcaaggccaccctgtacgccgtgctggtgtctgccctggtgctgatggctatggtcaagcggaaggacagccggggacgcgccaagagaagcggatctggcgtgaagcagaccctgaatttcgacctgctgaagctggctggcgacgtggaatccaacccaggcccttctagaggccatatgaccgagtacaagcccacggtgcgcctcgccacccgcgacgacgtccccagggccgtacgcaccctcgccgccgcgttcgccgactaccccgccacgcgccacaccgtcgatccggaccgccacatcgagcgggtcaccgagctgcaagaactcttcctcacgcgcgtcgggctcgacatcggcaaggtgtgggtcgcggacgacggcgccgcggtggcggtctggaccacgccggagagcgtcgaagcgggggcggtgttcgccgagatcggcccgcgcatggccgagttgagcggttcccggctggccgcgcagcaacagatggaaggcctcctggcgccgcaccggcccaaggagcccgcgtggttcctggccaccgtcggcgtctcgcccgaccaccagggcaagggtctgggcagcgccgtcgtgctccccggagtggaggcggccgagcgcgccggggtgcccgccttcctggagacctccgcgccccgcaacctccccttctacgagcggctcggcttcaccgtcaccgccgacgtcgaggtgcccgaaggaccgcgcacctggtgcatgacccgcaagcccggtgcctga

SEQ ID NO: 39644 - DNA, 1854 bp, synthetic construct
  source 1..1854: mol_type = other DNA
atggccttaccagtgaccgccttgctcctgccgctggccttgctgctccacgccgccaggccggacatccagatgacacagagccctagcagcctgtctgccagcgtgggagacagagtgaccatcacctgtagagccagccaggatgtgtctacagccgtggcctggtatcagcagaagcctggaaaggcccctaagctgctgatctacagcgccagctttctgtactccggcgtgcccagcagattcagcggaagcagaagcggcaccgacttcaccctgacaatatccagcctccagcctgaggacttcgccacctactactgccagcagtacctgtaccagccttggacattcggccagggcaccaaggtggaaatcaagagactcgaggacctgaagaacgtgttcccacctgaggtggccgtgttcgagcctagcgaggccgagatcagccacacccagaaagccaccctcgtgtgcctggctaccggcttctaccccgaccatgtggaactgtcttggtgggtcaacggcaaagaggtgcacagcggcgtgtgtaccgacccccagccactgaaagaacagcccgccctgaacgacagccggtactgcctgagcagcagactgagagtgtccgccaccttctggcagaacccccggaaccacttcagatgccaggtgcagttctacggcctgagcgagaacgacgagtggacccaggacagagccaagcccgtgacccagatcgtgtctgccgaagcctggggcagagccgatagcggctttaccagcgagagctaccagcagggcgtgctgagcgccaccatcctgtacgagatcctgctgggcaaggccaccctgtacgccgtgctggtgtctgccctggtgctgatggctatggtcaagcggaaggacagccggggaagggccaagcgatctggatctggagcaacaaacttctcactactcaaacaagcaggtgacgtggaggagaatcccgggcctactagtatggactggatttggcgcatccttttccttgtcggcgctgctaccggcgcgcattccttcgaagaagttcagctggttgagtctggcggaggactggttcaacctggcggaagcctgagactgtcttgtgccgccagcggcttcaacatcgactactacggaatgcactgggtccgacaggcccctggcaaaggacttgaatgggtcgcctctctgtacggcggcagcgatagcacagattacgccgactctgtgaagggcagattcaccatcagcgccgacaccagcaagaacaccgcctacctccagatgaactccctgagagccgaagataccgccgtgtactactgctccagacagtacagcgcctacttcgactattggggccagggaaccctggtcaccgttagctctacgcgtatccagaaccctgatcctgccgtgtaccagctgcgggatagcaagagcagcgacaagagcgtgtgtctgttcaccgacttcgacagccagaccaacgtgtcccagagcaaggactccgacgtgtacatcaccgataagtgcgtgctggacatgcggagcatggacttcaagagcaactccgccgtggcctggtccaacaagtccgatttcgcctgcgccaacgccttcaacaacagcattatccccgaggacacattcttcccaagccccgagagcagcagcgacgtgaagctggtggaaaagagcttcgagacagacaccaacctgaacttccagaacctgagcgtgatcggcttcagaatcctgctgctgaaagtggccggctttaacctgctgatgaccctgcggctgtggtccagc

SEQ ID NO: 39645 - DNA, 2694 bp, synthetic construct
  source 1..2694: mol_type = other DNA
atggccttaccagtgaccgccttgctcctgccgctggccttgctgctccacgccgccaggccggaggttcagctgcttgagtctggcggaggactggttcaacctggcggaagcctgagactgtcttgtgccgcctctggcagaaccttcagcatgggctggtatagacaggcccctggcaagggcctcgaatttgtgtctgccatcacatacagcggcggcagcccttactacgccgattctgtgaagggcagattcaccatcagccgggacaacagcaagaacaccgtgtacctccagatgaacagcctgagagccgaggacaccgccgtgtactactgtgccgccaatccaacctacggcagcgactggaatgccgagaattggggccagggcacactggtcacagtgtctagtggtaccggcggaggcggatctggcggcggaggtagcggtggcggaggatctgaattcgacatccagatgacacagagccctagcagcctgtctgccagcgtgggagacagagtgaccatcacctgtagagccagccaggatgtgtctacagccgtggcctggtatcagcagaagcctggaaaggcccctaagctgctgatctacagcgccagctttctgtactccggcgtgcccagcagattcagcggaagcagaagcggcaccgacttcaccctgacaatatccagcctccagcctgaggacttcgccacctactactgccagcagtacctgtaccagccttggacattcggccagggcaccaaggtggaaatcaagagactcgagatccagaaccctgatcctgccgtgtaccagctgcgggatagcaagagcagcgacaagagcgtgtgtctgttcaccgacttcgacagccagaccaacgtgtcccagagcaaggactccgacgtgtacatcaccgataagtgcgtgctggacatgcggagcatggacttcaagagcaactccgccgtggcctggtccaacaagtccgatttcgcctgcgccaacgccttcaacaacagcattatccccgaggacacattcttcccaagcagcgacgtgccctgcgacgtgaagctggtggaaaagagcttcgagacagacaccaacctgaacttccagaacctgagcgtgatcggcttcagaatcctgctgctgaaagtggccggctttaacctgctgatgaccctgcggctgtggtccagccgcgccaagagaagcggatctggcgtgaagcagaccctgaatttcgacctgctgaagctggctggcgacgtggaatccaacccaggccctactagtaccatggactggatttggcgcatccttttccttgtcggcgctgctaccggcacccattccgggcccgaagtgcaactggttgaatccggtggcggcctggtgcaacccggcggatctctcagacttagctgtgccgcctccggcagaaccttcacaatgggatggtacaggcaggctccagggaaagagagagagttcgtcgccgccatctctctgtctcccacactggcctactacgccgactctgtgaaaggccggttcaccatctccagagataatagcaagaacaccgtggtgctgcaaatgaactctctgagagccgaggatacagccctgtactattgtgccgctgaccggaagtccgtgatgagcatcagacccgattactggggacagggcacactggtcacagtgtctagtggatccggcggcggaggatctggcggaggcggatctgggggcggaggctctttcgaagaagttcagctggttgagtctggcggaggactggttcaacctggcggaagcctgagactgtcttgtgccgccagcggcttcaacatcgactactacggaatgcactgggtccgacaggcccctggcaaaggacttgaatgggtcgcctctctgtacggcggcagcgatagcacagattacgccgactctgtgaagggcagattcaccatcagcgccgacaccagcaagaacaccgcctacctccagatgaactccctgagagccgaagataccgccgtgtactactgctccagacagtacagcgcctacttcgactattggggccagggaaccctggtcaccgttagctctacgcgtgaggacctgaagaacgtgttcccacctgaggtggccgtgttcgagcctagcaaggccgagatcgcccacacccagaaagccaccctcgtgtgcctggctaccggcttctaccccgaccatgtggaactgtcttggtgggtcaacggcaaagaggtgcacagcggcgtgtgtaccgacccccagccactgaaagaacagcccgccctgaacgacagccggtactgcctgagcagcagactgagagtgtccgccaccttctggcagaacccccggaaccacttcagatgccaggtgcagttctacggcctgagcgagaacgacgagtggacccaggacagagccaagcccgtgacccagatcgtgtctgccgaagcctggggcagagccgattgcggcatcaccagcgccagctaccaccagggcgtgctgagcgccaccatcctgtacgagatcctgctgggcaaggccaccctgtacgccgtgctggtgtctgccctggtgctgatggctatggtcaagcggaaggacagccggggataa

SEQ ID NO: 39646 - DNA, 2694 bp, synthetic construct
  source 1..2694: mol_type = other DNA
atggccttaccagtgaccgccttgctcctgccgctggccttgctgctccacgccgccaggccggaagtgcagctggttgaatctggcggaggactggttcaggctggcggatctctgagactgtcttgtgccgccagcggcagaacctttagcatgggctggtttagacaggcccctggcaaagagagagagttcgtcgccgccatcacatactctggcggcagcccttactacgccgactctgtgaagggcagattcaccatcagccgggacaacgccaagaacaccgtgtacctccagatgaacagcctgaagcctgaggacaccgccgtgtactactgcgccgccaatccaacatacggcagcgactggaacgccgagaattggggccagggaacccaagtgacagtgtctagcggtaccggcggaggcggatctggcggcggaggtagcggtggcggaggatctgaattcgacatccagatgacacagagccctagcagcctgtctgccagcgtgggagacagagtgaccatcacctgtagagccagccaggatgtgtctacagccgtggcctggtatcagcagaagcctggaaaggcccctaagctgctgatctacagcgccagctttctgtactccggcgtgcccagcagattcagcggaagcagaagcggcaccgacttcaccctgacaatatccagcctccagcctgaggacttcgccacctactactgccagcagtacctgtaccagccttggacattcggccagggcaccaaggtggaaatcaagagactcgagatccagaaccctgatcctgccgtgtaccagctgcgggatagcaagagcagcgacaagagcgtgtgtctgttcaccgacttcgacagccagaccaacgtgtcccagagcaaggactccgacgtgtacatcaccgataagtgcgtgctggacatgcggagcatggacttcaagagcaactccgccgtggcctggtccaacaagtccgatttcgcctgcgccaacgccttcaacaacagcattatccccgaggacacattcttcccaagcagcgacgtgccctgcgacgtgaagctggtggaaaagagcttcgagacagacaccaacctgaacttccagaacctgagcgtgatcggcttcagaatcctgctgctgaaagtggccggctttaacctgctgatgaccctgcggctgtggtccagccgcgccaagagaagcggatctggcgtgaagcagaccctgaatttcgacctgctgaagctggctggcgacgtggaatccaacccaggccctactagtaccatggactggatttggcgcatccttttccttgtcggcgctgctaccggcgcccattccgggcccgaagtgcaactggttgaatccggtggcggcctggtgcaacccggcggatctctcagacttagctgtgccgcctccggcagaaccttcacaatgggatggtacaggcaggctccagggaaagagagagagttcgtcgccgccatctctctgtctcccacactggcctactacgccgactctgtgaaaggccggttcaccatctccagagataatagcaagaacaccgtggtgctgcaaatgaactctctgagagccgaggatacagccctgtactattgtgccgctgaccggaagtccgtgatgagcatcagacccgattactggggacagggcacactggtcacagtgtctagtggatccggcggcggaggatctggcggaggcggatctgggggcggaggctctttcgaagaagttcagctggttgagtctggcggaggactggttcaacctggcggaagcctgagactgtcttgtgccgccagcggcttcaacatcgactactacggaatgcactgggtccgacaggcccctggcaaaggacttgaatgggtcgcctctctgtacggcggcagcgatagcacagattacgccgactctgtgaagggcagattcaccatcagcgccgacaccagcaagaacaccgcctacctccagatgaactccctgagagccgaagataccgccgtgtactactgctccagacagtacagcgcctacttcgactattggggccagggaaccctggtcaccgttagctctacgcgtgaggacctgaagaacgtgttcccacctgaggtggccgtgttcgagcctagcaaggccgagatcgcccacacccagaaagccaccctcgtgtgcctggctaccggcttctaccccgaccatgtggaactgtcttggtgggtcaacggcaaagaggtgcacagcggcgtgtgtaccgacccccagccactgaaagaacagcccgccctgaacgacagccggtactgcctgagcagcagactgagagtgtccgccaccttctggcagaacccccggaaccacttcagatgccaggtgcagttctacggcctgagcgagaacgacgagtggacccaggacagagccaagcccgtgacccagatcgtgtctgccgaagcctggggcagagccgattgcggcatcaccagcgccagctaccaccagggcgtgctgagcgccaccatcctgtacgagatcctgctgggcaaggccaccctgtacgccgtgctggtgtctgccctggtgctgatggctatggtcaagcggaaggacagccggggataa

SEQ ID NO: 39647 - DNA, 2685 bp, synthetic construct
  source 1..2685: mol_type = other DNA
atggccttaccagtgaccgccttgctcctgccgctggccttgctgctccacgccgccaggccggaagtgcagctggttgaatctggcggaggactggttcaggctggcggatctctgagactgtcttgtgccgccagcggcagaacctttagcatgggctggtttagacaggcccctggcaaagagagagagttcgtcgccgccatcacatactctggcggcagcccttactacgccgactctgtgaagggcagattcaccatcagccgggacaacgccaagaacaccgtgtacctccagatgaacagcctgaagcctgaggacaccgccgtgtactactgcgccgccaatccaacatacggcagcgactggaacgccgagaattggggccagggaacccaagtgacagtgtctagcggtaccggcggaggcggatctggcggcggaggtagcggtggcggaggatctgaattcgacatccagatgacacagagccctagcagcctgtctgccagcgtgggagacagagtgaccatcacctgtagagccagccaggatgtgtctacagccgtggcctggtatcagcagaagcctggaaaggcccctaagctgctgatctacagcgccagctttctgtactccggcgtgcccagcagattcagcggaagcagaagcggcaccgacttcaccctgacaatatccagcctccagcctgaggacttcgccacctactactgccagcagtacctgtaccagccttggacattcggccagggcaccaaggtggaaatcaagagactcgaggacctgaagaacgtgttcccacctgaggtggccgtgttcgagcctagcgaggccgagatcagccacacccagaaagccaccctcgtgtgcctggctaccggcttctaccccgaccatgtggaactgtcttggtgggtcaacggcaaagaggtgcacagcggcgtgtgtaccgacccccagccactgaaagaacagcccgccctgaacgacagccggtactgcctgagcagcagactgagagtgtccgccaccttctggcagaacccccggaaccacttcagatgccaggtgcagttctacggcctgagcgagaacgacgagtggacccaggacagagccaagcccgtgacccagatcgtgtctgccgaagcctggggcagagccgattgcggctttaccagcgagagctaccagcagggcgtgctgagcgccaccatcctgtacgagatcctgctgggcaaggccaccctgtacgccgtgctggtgtctgccctggtgctgatggctatggtcaagcggaaggacagccggggaagggccaagcgatctggatctggagcaacaaacttctcactactcaaacaagcaggtgacgtggaggagaatcccgggcctactagtgccaccatggactggatttggcgcatccttttccttgtcggcgctgctaccggcgcccattccgggcccgaagtgcaactggttgaatccggtggcggcctggtgcaagcaggcggatctctcagacttagctgtgccgcctccggcagaaccttcacaatgggatggtttaggcaggctccagggaaagagagagagttcgtcgccgccatctctctgtctcccacactggcctactacgccgactctgtgaaaggccggttcaccatctccagagataatgccaagaacaccgtggtgctgcaaatgaactctctgaaacccgaggatacagccctgtactattgtgccgctgaccggaagtccgtgatgagcatcagacccgattactggggacagggcacacaagtcacagtgtcctctggatccggcggcggaggatctggcggaggcggatctgggggcggaggctctttcgaagaagttcagctggttgagtctggcggaggactggttcaacctggcggaagcctgagactgtcttgtgccgccagcggcttcaacatcgactactacggaatgcactgggtccgacaggcccctggcaaaggacttgaatgggtcgcctctctgtacggcggcagcgatagcacagattacgccgactctgtgaagggcagattcaccatcagcgccgacaccagcaagaacaccgcctacctccagatgaactccctgagagccgaagataccgccgtgtactactgctccagacagtacagcgcctacttcgactattggggccagggaaccctggtcaccgttagctctacgcgtatccagaaccctgatcctgccgtgtaccagctgcgggatagcaagagcagcgacaagagcgtgtgtctgttcaccgacttcgacagccagaccaacgtgtcccagagcaaggactccgacgtgtacatcaccgataagtgcgtgctggacatgcggagcatggacttcaagagcaactccgccgtggcctggtccaacaagtccgatttcgcctgcgccaacgccttcaacaacagcattatccccgaggacacattcttcccaagccccgagagcagctgcgacgtgaagctggtggaaaagagcttcgagacagacaccaacctgaacttccagaacctgagcgtgatcggcttcagaatcctgctgctgaaagtggccggctttaacctgctgatgaccctgcggctgtggtccagctaa

SEQ ID NO: 39648 - DNA, 2298 bp, synthetic construct
  source 1..2298: mol_type = other DNA
atggccttaccagtgaccgccttgctcctgccgctggccttgctgctccacgccgccaggccggaagtgcagctggttgaatctggcggaggactggttcagcctggcggatctctgagactgagctgtgaagccagcggcttcgccagcgacgattacatcatcggctggttcagacaggcccctggcaaagagagagagggcgtcagctgcatcagctctaagtacgccaacaccgtgtacaccgacagcgtgaagggcagattcagactgagcagaggcaccgccaagaataccgtgtacctccagatgagcgccctgaagcctgaggataccgccgtgtactactgcgctatggacagccgcagagtgacatgccctgagatcagcaccatgcaccggaacttcgattcttggggccagggcacactggtcacagtgtcatctggtaccggcggaggcggatctggcggcggaggtagcggtggcggaggatctgaattcgacatccagatgacacagagccctagcagcctgtctgccagcgtgggagacagagtgaccatcacctgtagagccagccaggatgtgtctacagccgtggcctggtatcagcagaagcctggaaaggcccctaagctgctgatctacagcgccagctttctgtactccggcgtgcccagcagattcagcggaagcagaagcggcaccgacttcaccctgacaatatccagcctccagcctgaggacttcgccacctactactgccagcagtacctgtaccagccttggacattcggccagggcaccaaggtggaaatcaagagactcgaggacctgaagaacgtgttcccacctgaggtggccgtgttcgagcctagcaaggccgagatcgcccacacccagaaagccaccctcgtgtgcctggctaccggcttctaccccgaccatgtggaactgtcttggtgggtcaacggcaaagaggtgcacagcggcgtgtgtaccgacccccagccactgaaagaacagcccgccctgaacgacagccggtactgcctgagcagcagactgagagtgtccgccaccttctggcagaacccccggaaccacttcagatgccaggtgcagttctacggcctgagcgagaacgacgagtggacccaggacagagccaagcccgtgacccagatcgtgtctgccgaagcctggggcagagccgattgcggcatcaccagcgccagctaccaccagggcgtgctgagcgccaccatcctgtacgagatcctgctgggcaaggccaccctgtacgccgtgctggtgtctgccctggtgctgatggctatggtcaagcggaaggacagccggggaagggccaagcgatctggatctggagcaacaaacttctcactactcaaacaagcaggtgacgtggaggagaatcccgggcctactagtatggactggatttggcgcatccttttccttgtcggcgctgctaccggcgcgcattccttcgaagaagttcagctggttgagtctggcggaggactggttcaacctggcggaagcctgagactgtcttgtgccgccagcggcttcaacatcgactactacggaatgcactgggtccgacaggcccctggcaaaggacttgaatgggtcgcctctctgtacggcggcagcgatagcacagattacgccgactctgtgaagggcagattcaccatcagcgccgacaccagcaagaacaccgcctacctccagatgaactccctgagagccgaagataccgccgtgtactactgctccagacagtacagcgcctacttcgactattggggccagggaaccctggtcaccgttagctctacgcgtatccagaaccctgatcctgccgtgtaccagctgcgggatagcaagagcagcgacaagagcgtgtgtctgttcaccgacttcgacagccagaccaacgtgtcccagagcaaggactccgacgtgtacatcaccgataagtgcgtgctggacatgcggagcatggacttcaagagcaactccgccgtggcctggtccaacaagtccgatttcgcctgcgccaacgccttcaacaacagcattatccccgaggacacattcttcccaagcagcgacgtgccctgcgacgtgaagctggtggaaaagagcttcgagacagacaccaacctgaacttccagaacctgagcgtgatcggcttcagaatcctgctgctgaaagtggccggctttaacctgctgatgaccctgcggctgtggtccagctaa

SEQ ID NO: 39649 - DNA, 2271 bp, synthetic construct
  source 1..2271: mol_type = other DNA
atggccttaccagtgaccgccttgctcctgccgctggccttgctgctccacgccgccaggccggacatccagatgacacagagccctagcagcctgtctgccagcgtgggagacagagtgaccatcacctgtagagccagccaggatgtgtctacagccgtggcctggtatcagcagaagcctggaaaggcccctaagctgctgatctacagcgccagctttctgtactccggcgtgcccagcagattcagcggaagcagaagcggcaccgacttcaccctgacaatatccagcctccagcctgaggacttcgccacctactactgccagcagtacctgtaccagccttggacattcggccagggcaccaaggtggaaatcaagagactcgaggacctgaagaacgtgttcccacctgaggtggccgtgttcgagcctagcgaggccgagatcagccacacccagaaagccaccctcgtgtgcctggctaccggcttctaccccgaccatgtggaactgtcttggtgggtcaacggcaaagaggtgcacagcggcgtgtgtaccgacccccagccactgaaagaacagcccgccctgaacgacagccggtactgcctgagcagcagactgagagtgtccgccaccttctggcagaacccccggaaccacttcagatgccaggtgcagttctacggcctgagcgagaacgacgagtggacccaggacagagccaagcccgtgacccagatcgtgtctgccgaagcctggggcagagccgattgcggctttaccagcgagagctaccagcagggcgtgctgagcgccaccatcctgtacgagatcctgctgggcaaggccaccctgtacgccgtgctggtgtctgccctggtgctgatggctatggtcaagcggaaggacagccggggaagggccaagcgatctggatctggagcaacaaacttctcactactcaaacaagcaggtgacgtggaggagaatcccgggcctactagtaccatggactggatttggcgcatccttttccttgtcggcgctgctaccggcgcccattccgggcccgaagtgcaactggttgaatccggtggcggcctggtgcaacccggcggatctctcagacttagctgtgccgcctccggcagaaccttcacaatgggatggtacaggcaggctccagggaaagagagagagttcgtcgccgccatctctctgtctcccacactggcctactacgccgactctgtgaaaggccggttcaccatctccagagataatagcaagaacaccgtggtgctgcaaatgaactctctgagagccgaggatacagccctgtactattgtgccgctgaccggaagtccgtgatgagcatcagacccgattactggggacagggcacactggtcacagtgtctagtggatccggcggcggaggatctggcggaggcggatctgggggcggaggctctttcgaagaagttcagctggttgagtctggcggaggactggttcaacctggcggaagcctgagactgtcttgtgccgccagcggcttcaacatcgactactacggaatgcactgggtccgacaggcccctggcaaaggacttgaatgggtcgcctctctgtacggcggcagcgatagcacagattacgccgactctgtgaagggcagattcaccatcagcgccgacaccagcaagaacaccgcctacctccagatgaactccctgagagccgaagataccgccgtgtactactgctccagacagtacagcgcctacttcgactattggggccagggaaccctggtcaccgttagctctacgcgtatccagaaccctgatcctgccgtgtaccagctgcgggatagcaagagcagcgacaagagcgtgtgtctgttcaccgacttcgacagccagaccaacgtgtcccagagcaaggactccgacgtgtacatcaccgataagtgcgtgctggacatgcggagcatggacttcaagagcaactccgccgtggcctggtccaacaagtccgatttcgcctgcgccaacgccttcaacaacagcattatccccgaggacacattcttcccaagccccgagagcagctgcgacgtgaagctggtggaaaagagcttcgagacagacaccaacctgaacttccagaacctgagcgtgatcggcttcagaatcctgctgctgaaagtggccggctttaacctgctgatgaccctgcggctgtggtccagctaa

SEQ ID NO: 39650 - DNA, 2289 bp, synthetic construct
  source 1..2289: mol_type = other DNA
atggccttaccagtgaccgccttgctcctgccgctggccttgctgctccacgccgccaggccggacatccagatgacacagagccctagcagcctgtctgccagcgtgggagacagagtgaccatcacctgtagagccagccaggatgtgtctacagccgtggcctggtatcagcagaagcctggaaaggcccctaagctgctgatctacagcgccagctttctgtactccggcgtgcccagcagattcagcggaagcagaagcggcaccgacttcaccctgacaatatccagcctccagcctgaggacttcgccacctactactgccagcagtacctgtaccagccttggacattcggccagggcaccaaggtggaaatcaagagactcgaggacctgaagaacgtgttcccacctgaggtggccgtgttcgagcctagcgaggccgagatcagccacacccagaaagccaccctcgtgtgcctggctaccggcttctaccccgaccatgtggaactgtcttggtgggtcaacggcaaagaggtgcacagcggcgtgtgtaccgacccccagccactgaaagaacagcccgccctgaacgacagccggtactgcctgagcagcagactgagagtgtccgccaccttctggcagaacccccggaaccacttcagatgccaggtgcagttctacggcctgagcgagaacgacgagtggacccaggacagagccaagcccgtgacccagatcgtgtctgccgaagcctggggcagagccgattgcggctttaccagcgagagctaccagcagggcgtgctgagcgccaccatcctgtacgagatcctgctgggcaaggccaccctgtacgccgtgctggtgtctgccctggtgctgatggctatggtcaagcggaaggacagccggggaagggccaagcgatctggatctggagcaacaaacttctcactactcaaacaagcaggtgacgtggaggagaatcccgggcctactagtaccatggactggatttggcgcatccttttccttgtcggcgctgctaccggcgcccattccgggccccaggtgcagctggttgaatctggcggaggactggttcagcctggcggatctctgagactgtcttgtgccgccagcggcaacatcaacagcagaaactgcatgggctggttcagacaggcccctggcaagggaagagaaggcgtggcagctatcggccaagtgaccggcagaacctactacgtggacagcgtgaagggcagattcaccatcagcctggacaacagcaagaacaccctgtacctccagatgaacagcctgagagccgaggacaccgccgtgtactattgtgctgctgcccctggctgtctgctgtctgcacttagaagcgccgactacagaaactggggccagggcacactggtcaccgtttcttctggatccggcggcggaggatctggcggaggcggatctgggggcggaggctctttcgaagaagttcagctggttgagtctggcggaggactggttcaacctggcggaagcctgagactgtcttgtgccgccagcggcttcaacatcgactactacggaatgcactgggtccgacaggcccctggcaaaggacttgaatgggtcgcctctctgtacggcggcagcgatagcacagattacgccgactctgtgaagggcagattcaccatcagcgccgacaccagcaagaacaccgcctacctccagatgaactccctgagagccgaagataccgccgtgtactactgctccagacagtacagcgcctacttcgactattggggccagggaaccctggtcaccgttagctctacgcgtatccagaaccctgatcctgccgtgtaccagctgcgggatagcaagagcagcgacaagagcgtgtgtctgttcaccgacttcgacagccagaccaacgtgtcccagagcaaggactccgacgtgtacatcaccgataagtgcgtgctggacatgcggagcatggacttcaagagcaactccgccgtggcctggtccaacaagtccgatttcgcctgcgccaacgccttcaacaacagcattatccccgaggacacattcttcccaagccccgagagcagctgcgacgtgaagctggtggaaaagagcttcgagacagacaccaacctgaacttccagaacctgagcgtgatcggcttcagaatcctgctgctgaaagtggccggctttaacctgctgatgaccctgcggctgtggtccagc

SEQ ID NO: 39651 - DNA, 2292 bp, synthetic construct
  source 1..2292: mol_type = other DNA
atggccttaccagtgaccgccttgctcctgccgctggccttgctgctccacgccgccaggccggacatccagatgacacagagccctagcagcctgtctgccagcgtgggagacagagtgaccatcacctgtagagccagccaggatgtgtctacagccgtggcctggtatcagcagaagcctggaaaggcccctaagctgctgatctacagcgccagctttctgtactccggcgtgcccagcagattcagcggaagcagaagcggcaccgacttcaccctgacaatatccagcctccagcctgaggacttcgccacctactactgccagcagtacctgtaccagccttggacattcggccagggcaccaaggtggaaatcaagagactcgaggacctgaagaacgtgttcccacctgaggtggccgtgttcgagcctagcgaggccgagatcagccacacccagaaagccaccctcgtgtgcctggctaccggcttctaccccgaccatgtggaactgtcttggtgggtcaacggcaaagaggtgcacagcggcgtgtgtaccgacccccagccactgaaagaacagcccgccctgaacgacagccggtactgcctgagcagcagactgagagtgtccgccaccttctggcagaacccccggaaccacttcagatgccaggtgcagttctacggcctgagcgagaacgacgagtggacccaggacagagccaagcccgtgacccagatcgtgtctgccgaagcctggggcagagccgattgcggctttaccagcgagagctaccagcagggcgtgctgagcgccaccatcctgtacgagatcctgctgggcaaggccaccctgtacgccgtgctggtgtctgccctggtgctgatggctatggtcaagcggaaggacagccggggaagggccaagcgatctggatctggagcaacaaacttctcactactcaaacaagcaggtgacgtggaggagaatcccgggcctactagtaccatggactggatttggcgcatccttttccttgtcggcgctgctaccggcgcccattccgggccccaggtgcagctggttgaatctggcggaggatctgttcaggctggcggctctctgagactgtcttgtggcgcttccggcaacatcagcagcagaaactgcatgggctggttcagacaggcccctggcaaagagagagaaggcgttgccgccatcggacaagtgaccggcagatcctactacgtggacagcgtgaagggcagattcaccatcagcctggacaacgccaagaacaccctgtacctccagatgaacacactgaagcccgaggacaccgccatgtactactgtgctgctgcccctggctgtctgctgtctgcacttagaagcgccgactacagaaactggggccagggaacccaagtgacagtgtctagtggatccggcggcggaggatctggcggaggcggatctgggggcggaggctctttcgaagaagttcagctggttgagtctggcggaggactggttcaacctggcggaagcctgagactgtcttgtgccgccagcggcttcaacatcgactactacggaatgcactgggtccgacaggcccctggcaaaggacttgaatgggtcgcctctctgtacggcggcagcgatagcacagattacgccgactctgtgaagggcagattcaccatcagcgccgacaccagcaagaacaccgcctacctccagatgaactccctgagagccgaagataccgccgtgtactactgctccagacagtacagcgcctacttcgactattggggccagggaaccctggtcaccgttagctctacgcgtatccagaaccctgatcctgccgtgtaccagctgcgggatagcaagagcagcgacaagagcgtgtgtctgttcaccgacttcgacagccagaccaacgtgtcccagagcaaggactccgacgtgtacatcaccgataagtgcgtgctggacatgcggagcatggacttcaagagcaactccgccgtggcctggtccaacaagtccgatttcgcctgcgccaacgccttcaacaacagcattatccccgaggacacattcttcccaagccccgagagcagctgcgacgtgaagctggtggaaaagagcttcgagacagacaccaacctgaacttccagaacctgagcgtgatcggcttcagaatcctgctgctgaaagtggccggctttaacctgctgatgaccctgcggctgtggtccagctaa

SEQ ID NO: 39652 - DNA, 2715 bp, synthetic construct
  source 1..2715: mol_type = other DNA
atggccttaccagtgaccgccttgctcctgccgctggccttgctgctccacgccgccaggccggaagtgcagctggttgaatctggcggaggactggttcaggctggcggatctctgagactgtcttgtgccgccagcggcagaacctttagcatgggctggtttagacaggcccctggcaaagagagagagttcgtcgccgccatcacatactctggcggcagcccttactacgccgactctgtgaagggcagattcaccatcagccgggacaacgccaagaacaccgtgtacctccagatgaacagcctgaagcctgaggacaccgccgtgtactactgcgccgccaatccaacatacggcagcgactggaacgccgagaattggggccagggaacccaagtgacagtgtctagcggtaccggcggaggcggatctggcggcggaggtagcggtggcggaggatctgaattcgacatccagatgacacagagccctagcagcctgtctgccagcgtgggagacagagtgaccatcacctgtagagccagccaggatgtgtctacagccgtggcctggtatcagcagaagcctggaaaggcccctaagctgctgatctacagcgccagctttctgtactccggcgtgcccagcagattcagcggaagcagaagcggcaccgacttcaccctgacaatatccagcctccagcctgaggacttcgccacctactactgccagcagtacctgtaccagccttggacattcggccagggcaccaaggtggaaatcaagagactcgagatccagaaccctgatcctgccgtgtaccagctgcgggatagcaagagcagcgacaagagcgtgtgtctgttcaccgacttcgacagccagaccaacgtgtcccagagcaaggactccgacgtgtacatcaccgataagtgcgtgctggacatgcggagcatggacttcaagagcaactccgccgtggcctggtccaacaagtccgatttcgcctgcgccaacgccttcaacaacagcattatccccgaggacacattcttcccaagcagcgacgtgccctgcgacgtgaagctggtggaaaagagcttcgagacagacaccaacctgaacttccagaacctgagcgtgatcggcttcagaatcctgctgctgaaagtggccggctttaacctgctgatgaccctgcggctgtggtccagccgcgccaagagaagcggatctggcgtgaagcagaccctgaatttcgacctgctgaagctggctggcgacgtggaatccaacccaggccctactagtaccatggactggatttggcgcatccttttccttgtcggcgctgctaccggcgcccattccgggccccaggtgcagctggttgaatctggcggaggatctgttcaggctggcggctctctgagactgtcttgtggcgcttccggcaacatcagcagcagaaactgcatgggctggttcagacaggcccctggcaaagagagagaaggcgttgccgccatcggacaagtgaccggcagatcctactacgtggacagcgtgaagggcagattcaccatcagcctggacaacgccaagaacaccctgtacctccagatgaacacactgaagcccgaggacaccgccatgtactactgtgctgctgcccctggctgtctgctgtctgcacttagaagcgccgactacagaaactggggccagggaacccaagtgacagtgtctagtggatccggcggcggaggatctggcggaggcggatctgggggcggaggctctttcgaagaagttcagctggttgagtctggcggaggactggttcaacctggcggaagcctgagactgtcttgtgccgccagcggcttcaacatcgactactacggaatgcactgggtccgacaggcccctggcaaaggacttgaatgggtcgcctctctgtacggcggcagcgatagcacagattacgccgactctgtgaagggcagattcaccatcagcgccgacaccagcaagaacaccgcctacctccagatgaactccctgagagccgaagataccgccgtgtactactgctccagacagtacagcgcctacttcgactattggggccagggaaccctggtcaccgttagctctacgcgtgaggacctgaagaacgtgttcccacctgaggtggccgtgttcgagcctagcaaggccgagatcgcccacacccagaaagccaccctcgtgtgcctggctaccggcttctaccccgaccatgtggaactgtcttggtgggtcaacggcaaagaggtgcacagcggcgtgtgtaccgacccccagccactgaaagaacagcccgccctgaacgacagccggtactgcctgagcagcagactgagagtgtccgccaccttctggcagaacccccggaaccacttcagatgccaggtgcagttctacggcctgagcgagaacgacgagtggacccaggacagagccaagcccgtgacccagatcgtgtctgccgaagcctggggcagagccgattgcggcatcaccagcgccagctaccaccagggcgtgctgagcgccaccatcctgtacgagatcctgctgggcaaggccaccctgtacgccgtgctggtgtctgccctggtgctgatggctatggtcaagcggaaggacagccggggataa

SEQ ID NO: 39653 - DNA, 2706 bp, synthetic construct
  source 1..2706: mol_type = other DNA
atggccttaccagtgaccgccttgctcctgccgctggccttgctgctccacgccgccaggccgcaggtgcagctggttgaatctggcggaggatctgttcaggctggcggctctctgagactgtcttgtggcgcttccggcaacatcagcagcagaaactgcatgggctggttcagacaggcccctggcaaagagagagaaggcgttgccgccatcggacaagtgaccggcagatcctactacgtggacagcgtgaagggcagattcaccatcagcctggacaacgccaagaacaccctgtacctccagatgaacacactgaagcccgaggacaccgccatgtactactgtgctgctgcccctggctgtctgctgtctgcacttagaagcgccgactacagaaactggggccagggaacccaagtgacagtgtctagtggtaccggcggaggcggatctggcggcggaggtagcggtggcggaggatctgaattcgacatccagatgacacagagccctagcagcctgtctgccagcgtgggagacagagtgaccatcacctgtagagccagccaggatgtgtctacagccgtggcctggtatcagcagaagcctggaaaggcccctaagctgctgatctacagcgccagctttctgtactccggcgtgcccagcagattcagcggaagcagaagcggcaccgacttcaccctgacaatatccagcctccagcctgaggacttcgccacctactactgccagcagtacctgtaccagccttggacattcggccagggcaccaaggtggaaatcaagagactcgaggacctgaagaacgtgttcccacctgaggtggccgtgttcgagcctagcgaggccgagatcagccacacccagaaagccaccctcgtgtgcctggctaccggcttctaccccgaccatgtggaactgtcttggtgggtcaacggcaaagaggtgcacagcggcgtgtgtaccgacccccagccactgaaagaacagcccgccctgaacgacagccggtactgcctgagcagcagactgagagtgtccgccaccttctggcagaacccccggaaccacttcagatgccaggtgcagttctacggcctgagcgagaacgacgagtggacccaggacagagccaagcccgtgacccagatcgtgtctgccgaagcctggggcagagccgattgcggctttaccagcgagagctaccagcagggcgtgctgagcgccaccatcctgtacgagatcctgctgggcaaggccaccctgtacgccgtgctggtgtctgccctggtgctgatggctatggtcaagcggaaggacagccggggaagggccaagcgatctggatctggagcaacaaacttctcactactcaaacaagcaggtgacgtggaggagaatcccgggcctactagtgccaccatggactggatttggcgcatccttttccttgtcggcgctgctaccggcgcccattccgggcccgaagtgcaactggttgaatccggtggcggcctggtgcaagcaggcggatctctcagacttagctgtgccgcctccggcagaaccttcacaatgggatggtttaggcaggctccagggaaagagagagagttcgtcgccgccatctctctgtctcccacactggcctactacgccgactctgtgaaaggccggttcaccatctccagagataatgccaagaacaccgtggtgctgcaaatgaactctctgaaacccgaggatacagccctgtactattgtgccgctgaccggaagtccgtgatgagcatcagacccgattactggggacagggcacacaagtcacagtgtcctctggatccggcggcggaggatctggcggaggcggatctgggggcggaggctctttcgaagaagttcagctggttgagtctggcggaggactggttcaacctggcggaagcctgagactgtcttgtgccgccagcggcttcaacatcgactactacggaatgcactgggtccgacaggcccctggcaaaggacttgaatgggtcgcctctctgtacggcggcagcgatagcacagattacgccgactctgtgaagggcagattcaccatcagcgccgacaccagcaagaacaccgcctacctccagatgaactccctgagagccgaagataccgccgtgtactactgctccagacagtacagcgcctacttcgactattggggccagggaaccctggtcaccgttagctctacgcgtatccagaaccctgatcctgccgtgtaccagctgcgggatagcaagagcagcgacaagagcgtgtgtctgttcaccgacttcgacagccagaccaacgtgtcccagagcaaggactccgacgtgtacatcaccgataagtgcgtgctggacatgcggagcatggacttcaagagcaactccgccgtggcctggtccaacaagtccgatttcgcctgcgccaacgccttcaacaacagcattatccccgaggacacattcttcccaagccccgagagcagctgcgacgtgaagctggtggaaaagagcttcgagacagacaccaacctgaacttccagaacctgagcgtgatcggcttcagaatcctgctgctgaaagtggccggctttaacctgctgatgaccctgcggctgtggtccagctaa

SEQ ID NO: 39654 - DNA, 2295 bp, synthetic construct
  source 1..2295: mol_type = other DNA
atggccttaccagtgaccgccttgctcctgccgctggccttgctgctccacgccgccaggccgcaggtgcagctggttgaatctggcggaggatctgttcaggctggcggctctctgagactgtcttgtggcgcttccggcaacatcagcagcagaaactgcatgggctggttcagacaggcccctggcaaagagagagaaggcgttgccgccatcggacaagtgaccggcagatcctactacgtggacagcgtgaagggcagattcaccatcagcctggacaacgccaagaacaccctgtacctccagatgaacacactgaagcccgaggacaccgccatgtactactgtgctgctgcccctggctgtctgctgtctgcacttagaagcgccgactacagaaactggggccagggaacccaagtgacagtgtctagtggtaccggcggaggcggatctggcggcggaggtagcggtggcggaggatctgaattcgacatccagatgacacagagccctagcagcctgtctgccagcgtgggagacagagtgaccatcacctgtagagccagccaggatgtgtctacagccgtggcctggtatcagcagaagcctggaaaggcccctaagctgctgatctacagcgccagctttctgtactccggcgtgcccagcagattcagcggaagcagaagcggcaccgacttcaccctgacaatatccagcctccagcctgaggacttcgccacctactactgccagcagtacctgtaccagccttggacattcggccagggcaccaaggtggaaatcaagagactcgaggacctgaagaacgtgttcccacctgaggtggccgtgttcgagcctagcgaggccgagatcagccacacccagaaagccaccctcgtgtgcctggctaccggcttctaccccgaccatgtggaactgtcttggtgggtcaacggcaaagaggtgcacagcggcgtgtgtaccgacccccagccactgaaagaacagcccgccctgaacgacagccggtactgcctgagcagcagactgagagtgtccgccaccttctggcagaacccccggaaccacttcagatgccaggtgcagttctacggcctgagcgagaacgacgagtggacccaggacagagccaagcccgtgacccagatcgtgtctgccgaagcctggggcagagccgattgcggctttaccagcgagagctaccagcagggcgtgctgagcgccaccatcctgtacgagatcctgctgggcaaggccaccctgtacgccgtgctggtgtctgccctggtgctgatggctatggtcaagcggaaggacagccggggaagggccaagcgatctggatctggagcaacaaacttctcactactcaaacaagcaggtgacgtggaggagaatcccgggcctactagtgccaccatggactggatttggcgcatccttttccttgtcggcgctgctaccggcgcccattccttcgaagaagttcagctggttgagtctggcggaggactggttcaacctggcggaagcctgagactgtcttgtgccgccagcggcttcaacatcgactactacggaatgcactgggtccgacaggcccctggcaaaggacttgaatgggtcgcctctctgtacggcggcagcgatagcacagattacgccgactctgtgaagggcagattcaccatcagcgccgacaccagcaagaacaccgcctacctccagatgaactccctgagagccgaagataccgccgtgtactactgctccagacagtacagcgcctacttcgactattggggccagggaaccctggtcaccgttagctctacgcgtatccagaaccctgatcctgccgtgtaccagctgcgggatagcaagagcagcgacaagagcgtgtgtctgttcaccgacttcgacagccagaccaacgtgtcccagagcaaggactccgacgtgtacatcaccgataagtgcgtgctggacatgcggagcatggacttcaagagcaactccgccgtggcctggtccaacaagtccgatttcgcctgcgccaacgccttcaacaacagcattatccccgaggacacattcttcccaagccccgagagcagctgcgacgtgaagctggtggaaaagagcttcgagacagacaccaacctgaacttccagaacctgagcgtgatcggcttcagaatcctgctgctgaaagtggccggctttaacctgctgatgaccctgcggctgtggtccagctaa

SEQ ID NO: 39655 - DNA, 2295 bp, synthetic construct
  source 1..2295: mol_type = other DNA
atggccttaccagtgaccgccttgctcctgccgctggccttgctgctccacgccgccaggccgcaagttcagctggtggaaagcggtggtggcgttgtgcaacctggtggaagtctgaggctgagctgtgccgcttctggcctgagctttagcacctacactgtggcctggttcaggcaggctcccggaaagggtcttgaaggcgtggccgccattccttacaccagccagcacatggtgtacacagacagcgtcagaggccggttcaccatcagcagagacaactccaagaatacgctctatctccagatgaactctctgcgcgccgaagatacagccgtgtattactgcgccaccgacagacggcctggcacctctatgctggctatcaacggctacaacagatggggacagggaaccaccgtgaccgtgtcatctggtaccggcggaggcggatctggcggcggaggtagcggtggcggaggatctgaattcgacatccagatgacacagagccctagcagcctgtctgccagcgtgggagacagagtgaccatcacctgtagagccagccaggatgtgtctacagccgtggcctggtatcagcagaagcctggaaaggcccctaagctgctgatctacagcgccagctttctgtactccggcgtgcccagcagattcagcggaagcagaagcggcaccgacttcaccctgacaatatccagcctccagcctgaggacttcgccacctactactgccagcagtacctgtaccagccttggacattcggccagggcaccaaggtggaaatcaagagactcgaggacctgaagaacgtgttcccacctgaggtggccgtgttcgagcctagcgaggccgagatcagccacacccagaaagccaccctcgtgtgcctggctaccggcttctaccccgaccatgtggaactgtcttggtgggtcaacggcaaagaggtgcacagcggcgtgtgtaccgacccccagccactgaaagaacagcccgccctgaacgacagccggtactgcctgagcagcagactgagagtgtccgccaccttctggcagaacccccggaaccacttcagatgccaggtgcagttctacggcctgagcgagaacgacgagtggacccaggacagagccaagcccgtgacccagatcgtgtctgccgaagcctggggcagagccgattgcggctttaccagcgagagctaccagcagggcgtgctgagcgccaccatcctgtacgagatcctgctgggcaaggccaccctgtacgccgtgctggtgtctgccctggtgctgatggctatggtcaagcggaaggacagccggggaagggccaagcgatctggatctggagcaacaaacttctcactactcaaacaagcaggtgacgtggaggagaatcccgggcctactagtgccaccatggactggatttggcgcatccttttccttgtcggcgctgctaccggcgcccattccttcgaagaagttcagctggttgagtctggcggaggactggttcaacctggcggaagcctgagactgtcttgtgccgccagcggcttcaacatcgactactacggaatgcactgggtccgacaggcccctggcaaaggacttgaatgggtcgcctctctgtacggcggcagcgatagcacagattacgccgactctgtgaagggcagattcaccatcagcgccgacaccagcaagaacaccgcctacctccagatgaactccctgagagccgaagataccgccgtgtactactgctccagacagtacagcgcctacttcgactattggggccagggaaccctggtcaccgttagctctacgcgtatccagaaccctgatcctgccgtgtaccagctgcgggatagcaagagcagcgacaagagcgtgtgtctgttcaccgacttcgacagccagaccaacgtgtcccagagcaaggactccgacgtgtacatcaccgataagtgcgtgctggacatgcggagcatggacttcaagagcaactccgccgtggcctggtccaacaagtccgatttcgcctgcgccaacgccttcaacaacagcattatccccgaggacacattcttcccaagccccgagagcagctgcgacgtgaagctggtggaaaagagcttcgagacagacaccaacctgaacttccagaacctgagcgtgatcggcttcagaatcctgctgctgaaagtggccggctttaacctgctgatgaccctgcggctgtggtccagctaa

SEQ ID NO: 39656 - DNA, 2292 bp, synthetic construct
  source 1..2292: mol_type = other DNA
atggccttaccagtgaccgccttgctcctgccgctggccttgctgctccacgccgccaggccggacatccagatgacacagagccctagcagcctgtctgccagcgtgggagacagagtgaccatcacctgtagagccagccaggatgtgtctacagccgtggcctggtatcagcagaagcctggaaaggcccctaagctgctgatctacagcgccagctttctgtactccggcgtgcccagcagattcagcggaagcagaagcggcaccgacttcaccctgacaatatccagcctccagcctgaggacttcgccacctactactgccagcagtacctgtaccagccttggacattcggccagggcaccaaggtggaaatcaagagactcgaggacctgaagaacgtgttcccacctgaggtggccgtgttcgagcctagcgaggccgagatcagccacacccagaaagccaccctcgtgtgcctggctaccggcttctaccccgaccatgtggaactgtcttggtgggtcaacggcaaagaggtgcacagcggcgtgtgtaccgacccccagccactgaaagaacagcccgccctgaacgacagccggtactgcctgagcagcagactgagagtgtccgccaccttctggcagaacccccggaaccacttcagatgccaggtgcagttctacggcctgagcgagaacgacgagtggacccaggacagagccaagcccgtgacccagatcgtgtctgccgaagcctggggcagagccgattgcggctttaccagcgagagctaccagcagggcgtgctgagcgccaccatcctgtacgagatcctgctgggcaaggccaccctgtacgccgtgctggtgtctgccctggtgctgatggctatggtcaagcggaaggacagccggggaagggccaagcgatctggatctggagcaacaaacttctcactactcaaacaagcaggtgacgtggaggagaatcccgggcctactagtaccatggactggatttggcgcatccttttccttgtcggcgctgctaccggcgcccattccgggccccaagttcagctggtggaaagcggtggtggcgttgtgcaacctggtggaagtctgaggctgagctgtgccgcttctggcctgagctttagcacctacactgtggcctggttcaggcaggctcccggaaagggtcttgaaggcgtggccgccattccttacaccagccagcacatggtgtacacagacagcgtcagaggccggttcaccatcagcagagacaactccaagaatacgctctatctccagatgaactctctgcgcgccgaagatacagccgtgtattactgcgccaccgacagacggcctggcacctctatgctggctatcaacggctacaacagatggggacagggaaccaccgtgaccgtgtcatctggatccggcggcggaggatctggcggaggcggatctgggggcggaggctctttcgaagaagttcagctggttgagtctggcggaggactggttcaacctggcggaagcctgagactgtcttgtgccgccagcggcttcaacatcgactactacggaatgcactgggtccgacaggcccctggcaaaggacttgaatgggtcgcctctctgtacggcggcagcgatagcacagattacgccgactctgtgaagggcagattcaccatcagcgccgacaccagcaagaacaccgcctacctccagatgaactccctgagagccgaagataccgccgtgtactactgctccagacagtacagcgcctacttcgactattggggccagggaaccctggtcaccgttagctctacgcgtatccagaaccctgatcctgccgtgtaccagctgcgggatagcaagagcagcgacaagagcgtgtgtctgttcaccgacttcgacagccagaccaacgtgtcccagagcaaggactccgacgtgtacatcaccgataagtgcgtgctggacatgcggagcatggacttcaagagcaactccgccgtggcctggtccaacaagtccgatttcgcctgcgccaacgccttcaacaacagcattatccccgaggacacattcttcccaagccccgagagcagctgcgacgtgaagctggtggaaaagagcttcgagacagacaccaacctgaacttccagaacctgagcgtgatcggcttcagaatcctgctgctgaaagtggccggctttaacctgctgatgaccctgcggctgtggtccagctaa

SEQ ID NO: 39657 - DNA, 2298 bp, synthetic construct
  source 1..2298: mol_type = other DNA
atggccttaccagtgaccgccttgctcctgccgctggccttgctgctccacgccgccaggccggacatccagatgacacagagccctagcagcctgtctgccagcgtgggagacagagtgaccatcacctgtagagccagccaggatgtgtctacagccgtggcctggtatcagcagaagcctggaaaggcccctaagctgctgatctacagcgccagctttctgtactccggcgtgcccagcagattcagcggaagcagaagcggcaccgacttcaccctgacaatatccagcctccagcctgaggacttcgccacctactactgccagcagtacctgtaccagccttggacattcggccagggcaccaaggtggaaatcaagagactcgaggacctgaagaacgtgttcccacctgaggtggccgtgttcgagcctagcgaggccgagatcagccacacccagaaagccaccctcgtgtgcctggctaccggcttctaccccgaccatgtggaactgtcttggtgggtcaacggcaaagaggtgcacagcggcgtgtgtaccgacccccagccactgaaagaacagcccgccctgaacgacagccggtactgcctgagcagcagactgagagtgtccgccaccttctggcagaacccccggaaccacttcagatgccaggtgcagttctacggcctgagcgagaacgacgagtggacccaggacagagccaagcccgtgacccagatcgtgtctgccgaagcctggggcagagccgattgcggctttaccagcgagagctaccagcagggcgtgctgagcgccaccatcctgtacgagatcctgctgggcaaggccaccctgtacgccgtgctggtgtctgccctggtgctgatggctatggtcaagcggaaggacagccggggaagggccaagcgatctggatctggagcaacaaacttctcactactcaaacaagcaggtgacgtggaggagaatcccgggcctactagtaccatggactggatttggcgcatccttttccttgtcggcgctgctaccggcgcccattccgggcccgaggtgcagctggttgaatctggcggaggatctgttcaggctggcggctctctgagactgtcttgtgccgccagcggctacacctacagcatcaactgcatgggctggttcagacaggcccctggcaaagagagagaaggcgttgccgccatctctaccggcggaggcagaaccgattaccgggattctgtgaagggcagattcaccatcagccaggacaacgccaagaacaccgtgtacctccagatgaacagcctgaagcctgaggacaccgccatgtactactgtgccggcaagaccacctatcctggctacggatgtggcctgggcagaagcgcctacaattattggggccagggcacccaagtgaccgtgtcatctggatccggcggcggaggatctggcggaggcggatctgggggcggaggctctttcgaagaagttcagctggttgagtctggcggaggactggttcaacctggcggaagcctgagactgtcttgtgccgccagcggcttcaacatcgactactacggaatgcactgggtccgacaggcccctggcaaaggacttgaatgggtcgcctctctgtacggcggcagcgatagcacagattacgccgactctgtgaagggcagattcaccatcagcgccgacaccagcaagaacaccgcctacctccagatgaactccctgagagccgaagataccgccgtgtactactgctccagacagtacagcgcctacttcgactattggggccagggaaccctggtcaccgttagctctacgcgtatccagaaccctgatcctgccgtgtaccagctgcgggatagcaagagcagcgacaagagcgtgtgtctgttcaccgacttcgacagccagaccaacgtgtcccagagcaaggactccgacgtgtacatcaccgataagtgcgtgctggacatgcggagcatggacttcaagagcaactccgccgtggcctggtccaacaagtccgatttcgcctgcgccaacgccttcaacaacagcattatccccgaggacacattcttcccaagccccgagagcagctgcgacgtgaagctggtggaaaagagcttcgagacagacaccaacctgaacttccagaacctgagcgtgatcggcttcagaatcctgctgctgaaagtggccggctttaacctgctgatgaccctgcggctgtggtccagctaa

SEQ ID NO: 39658 - DNA, 1854 bp, synthetic construct
  source 1..1854: mol_type = other DNA
atggccttaccagtgaccgccttgctcctgccgctggccttgctgctccacgccgccaggccggacatccagatgacacagagccctagcagcctgtctgccagcgtgggagacagagtgaccatcacctgtagagccagccaggatgtgtctacagccgtggcctggtatcagcagaagcctggaaaggcccctaagctgctgatctacagcgccagctttctgtactccggcgtgcccagcagattcagcggaagcagaagcggcaccgacttcaccctgacaatatccagcctccagcctgaggacttcgccacctactactgccagcagtacctgtaccagccttggacattcggccagggcaccaaggtggaaatcaagagactcgaggacctgaagcacgtgttcccacctgaggtggccgtgttcgagcctagcgacgccgagatctggcacacccagaaagccaccctcgtgtgcctggctaccggcttctaccccgaccatgtggaactgtcttggtgggtcaacggcaaagaggtgcacagcggcgtgtctaccgacccccagccactgaaagaacagcccgccctgaacgacagccggtactgcctgagcagcagactgagagtgtccgccaccttctggcagaacccccggaaccacttcagatgccaggtgcagttctacggcctgagcgagaacgacgagtggacccaggacagagccaagcccgtgacccagatcgtgtctgccgaagcctggggcagagccgattgcggctttaccagcgagagctaccagcagggcgtgctgagcgccaccatcctgtacgagatcctgctgggcaaggccaccctgtacgccgtgctggtgtctgccctggtgctgatggctatggtcaagcggaaggacagccggggaagggccaagcgatctggatctggagcaacaaacttctcactactcaaacaagcaggtgacgtggaggagaatcccgggcctactagtatggactggatttggcgcatccttttccttgtcggcgctgctaccggcgcgcattccttcgaagaagttcagctggttgagtctggcggaggactggttcaacctggcggaagcctgagactgtcttgtgccgccagcggcttcaacatcgactactacggaatgcactgggtccgacaggcccctggcaaaggacttgaatgggtcgcctctctgtacggcggcagcgatagcacagattacgccgactctgtgaagggcagattcaccatcagcgccgacaccagcaagaacaccgcctacctccagatgaactccctgagagccgaagataccgccgtgtactactgctccagacagtacagcgcctacttcgactattggggccagggaaccctggtcaccgttagctctacgcgtatccagaaccctgatcctgccgtgtaccagctgcgggatagcaagagcagcgacaagagcgtgtgtctgttcaccgacttcgacagccagaccaacgtgtcccagagcaaggactccgacgtgtacatcaccgataagaccgtgctggacatgcggagcatggacttcaagagcaactccgccgtggcctggtccagcaagtccgatttcgcctgcgccaacgccttcaacaacagcattatccccgaggacacattcttcccaagccccgagatggcctgcgacgtgaagctggtggaaaagagcttcgagacagacaccaacctgaacttccagaacctgctcgtgatctggctgagaatcctgctgctgaaagtggccggctttaacctgctgatgaccctgcggctgtggtccagc

SEQ ID NO: 39659 - DNA, 1854 bp, synthetic construct
  source 1..1854: mol_type = other DNA
atggccttaccagtgaccgccttgctcctgccgctggccttgctgctccacgccgccaggccggacatccagatgacacagagccctagcagcctgtctgccagcgtgggagacagagtgaccatcacctgtagagccagccaggatgtgtctacagccgtggcctggtatcagcagaagcctggaaaggcccctaagctgctgatctacagcgccagctttctgtactccggcgtgcccagcagattcagcggaagcagaagcggcaccgacttcaccctgacaatatccagcctccagcctgaggacttcgccacctactactgccagcagtacctgtaccagccttggacattcggccagggcaccaaggtggaaatcaagagactcgaggacctgaagcacgtgttcccacctgaggtggccgtgttcgagcctagcgacgccgagatctggcacacccagaaagccaccctcgtgtgcctggctaccggcttctaccccgaccatgtggaactgtcttggtgggtcaacggcaaagaggtgcacagcggcgtgtctaccgacccccagccactgaaagaacagcccgccctgaacgacagccggtactgcctgagcagcagactgagagtgtccgccaccttctggcagaacccccggaaccacttcagatgccaggtgcagttctacggcctgagcgagaacgacgagtggacccaggacagagccaagcccgtgacccagatcgtgtctgccgaagcctggggcagagccgattgcggctttaccagcgagagctaccagcagggcgtgctgagcgccaccatcctgtacgagatcctgctgggcaaggccaccctgtacgccgtgctggtgtctgccctggtgctgatggctatggtcaagcggaaggacagccggggaagggccaagcgatctggatctggagcaacaaacttctcactactcaaacaagcaggtgacgtggaggagaatcccgggcctactagtatggactggatttggcgcatccttttccttgtcggcgctgctaccggcgcgcattccttcgaagaagttcagctggttgagtctggcggaggactggttcaacctggcggaagcctgagactgtcttgtgccgccagcggcttcaacatcgactactacggaatgcactgggtccgacaggcccctggcaaaggacttgaatgggtcgcctctctgtacggcggcagcgatagcacagattacgccgactctgtgaagggcagattcaccatcagcgccgacaccagcaagaacaccgcctacctccagatgaactccctgagagccgaagataccgccgtgtactactgctccagacagtacagcgcctacttcgactattggggccagggaaccctggtcaccgttagctctacgcgtatccagaaccctgatcctgccgtgtaccagctgcgggatagcaagagcagcgacaagagcgtgtgtctgttcaccgacttcgacagccagaccaacgtgtcccagagcaaggactccgacgtgtacatcaccgataagaccgtgctggacatgcggagcatggacttcaagagcaactccgccgtggcctggtccaccaagtccgatttcgcctgcgccaacgccttcaacaacagcattatccccgaggacacattcttcccaagccccgaggtggtgtgcgacgtgaagctggtggaaaagagcttcgagacagacaccaacctgaacttccagaacctggtggtgatcggcgccagaatcctgctgctgaaagtggccggctttaacctgctgatgaccctgcggctgtggtccagc

SEQ ID NO: 39660 - DNA, 1854 bp, synthetic construct
  source 1..1854: mol_type = other DNA
atggccttaccagtgaccgccttgctcctgccgctggccttgctgctccacgccgccaggccggacatccagatgacacagagccctagcagcctgtctgccagcgtgggagacagagtgaccatcacctgtagagccagccaggatgtgtctacagccgtggcctggtatcagcagaagcctggaaaggcccctaagctgctgatctacagcgccagctttctgtactccggcgtgcccagcagattcagcggaagcagaagcggcaccgacttcaccctgacaatatccagcctccagcctgaggacttcgccacctactactgccagcagtacctgtaccagccttggacattcggccagggcaccaaggtggaaatcaagagactcgaggacctgaagaacgtgttcccacctgaggtggccgtgttcgagcctagcaaggccgagatcagcagaacccagaaagccaccctcgtgtgcctggctaccggcttctaccctcctcatgtggaactgtcttggtgggtcaacggcaaagaggtgcacgacggcgtgtgtaccgacccccagccactgaaagaacagcccgccctgaacgacagccggtactgcctgagcagcagactgagagtgtccgccaccttctggcagaacccccggaaccacttcagatgccaggtgcagttctacggcctgagcgagaacgacgagtggacccaggacagagccaagcccgtgacccagatcgtgtctgccgaagcctggggcagagccgattgcggctttaccagcgagagctaccagcagggcgtgctgagcgccaccatcctgtacgagatcctgctgggcaaggccaccctgtacgccgtgctggtgtctgccctggtgctgatggctatggtcaagcggaaggacagccggggaagggccaagcgatctggatctggagcaacaaacttctcactactcaaacaagcaggtgacgtggaggagaatcccgggcctactagtatggactggatttggcgcatccttttccttgtcggcgctgctaccggcgcgcattccttcgaagaagttcagctggttgagtctggcggaggactggttcaacctggcggaagcctgagactgtcttgtgccgccagcggcttcaacatcgactactacggaatgcactgggtccgacaggcccctggcaaaggacttgaatgggtcgcctctctgtacggcggcagcgatagcacagattacgccgactctgtgaagggcagattcaccatcagcgccgacaccagcaagaacaccgcctacctccagatgaactccctgagagccgaagataccgccgtgtactactgctccagacagtacagcgcctacttcgactattggggccagggaaccctggtcaccgttagctctacgcgtatccagaaccctgatcctgccgtgtaccagctgcgggatagcaagagcagcgacaagttcgtgtgtctgttcaccgacttcgacagccagatcaacgtgtcccagagcaaggactccgacgtgtacatcaccgataagtgcgtgctggacatgcggagcatggacttcaagagcaactccgccgtggcctggtccaacaagtccgatttcacctgcgccaacgccttcaacaacagcattatccccgaggacacattcttcccaagccccgagagcagctgcgacgtgaagctggtggaaaagagcttcgagacagacaccaacctgaacttccagaacctgagcgtgatcggcttcagaatcctgctgctgaaagtggccggctttaacctgctgatgaccctgcggctgtggtccagc

SEQ ID NO: 39661 - DNA, 2280 bp, synthetic construct
  source 1..2280: mol_type = other DNA
atggccttaccagtgaccgccttgctcctgccgctggccttgctgctccacgccgccaggccggacatccagatgacacagagccctagcagcctgtctgccagcgtgggagacagagtgaccatcacctgtagagccagccaggatgtgtctacagccgtggcctggtatcagcagaagcctggaaaggcccctaagctgctgatctacagcgccagctttctgtactccggcgtgcccagcagattcagcggaagcagaagcggcaccgacttcaccctgacaatatccagcctccagcctgaggacttcgccacctactactgccagcagtacctgtaccagccttggacattcggccagggcaccaaggtggaaatcaagagactcgaggacctgaagaacgtgttcccacctgaggtggccgtgttcgagcctagcgaggccgagatcagccacacccagaaagccaccctcgtgtgcctggctaccggcttctaccccgaccatgtggaactgtcttggtgggtcaacggcaaagaggtgcacagcggcgtgtgtaccgacccccagccactgaaagaacagcccgccctgaacgacagccggtactgcctgagcagcagactgagagtgtccgccaccttctggcagaacccccggaaccacttcagatgccaggtgcagttctacggcctgagcgagaacgacgagtggacccaggacagagccaagcccgtgacccagatcgtgtctgccgaagcctggggcagagccgattgcggctttaccagcgagagctaccagcagggcgtgctgagcgccaccatcctgtacgagatcctgctgggcaaggccaccctgtacgccgtgctggtgtctgccctggtgctgatggctatggtcaagcggaaggacagccggggaagggccaagcgatctggatctggagcaacaaacttctcactactcaaacaagcaggtgacgtggaggagaatcccgggcctactagtaccatggactggatttggcgcatccttttccttgtcggcgctgctaccggcgcccattccgggccccaggtgcagctccaagaaagcggacccggactggttaagccctctcagaccctgtctctgacctgcacagttagcggagccagcattaccacaggcgagtattattggaattggtttcggcagccaccaggcaaggggcttgagtggatgggtgctattgctgcctctggcagcaccacctactctcccagctttgagagcagaacctccatcagccgggacacctccaaaaaccagttctctctgaagctgtcctccgtgaccgctgctgacaccgccgtctattattgtggccggtctttcggcgtggcagctgtgaccacaggacagaacagaggccagggaacacttgtgaccgtgtcctctggatccggcggcggaggatctggcggaggcggatctgggggcggaggctctttcgaagaagttcagctggttgagtctggcggaggactggttcaacctggcggaagcctgagactgtcttgtgccgccagcggcttcaacatcgactactacggaatgcactgggtccgacaggcccctggcaaaggacttgaatgggtcgcctctctgtacggcggcagcgatagcacagattacgccgactctgtgaagggcagattcaccatcagcgccgacaccagcaagaacaccgcctacctccagatgaactccctgagagccgaagataccgccgtgtactactgctccagacagtacagcgcctacttcgactattggggccagggaaccctggtcaccgttagctctacgcgtatccagaaccctgatcctgccgtgtaccagctgcgggatagcaagagcagcgacaagagcgtgtgtctgttcaccgacttcgacagccagaccaacgtgtcccagagcaaggactccgacgtgtacatcaccgataagtgcgtgctggacatgcggagcatggacttcaagagcaactccgccgtggcctggtccaacaagtccgatttcgcctgcgccaacgccttcaacaacagcattatccccgaggacacattcttcccaagccccgagagcagctgcgacgtgaagctggtggaaaagagcttcgagacagacaccaacctgaacttccagaacctgagcgtgatcggcttcagaatcctgctgctgaaagtggccggctttaacctgctgatgaccctgcggctgtggtccagc

SEQ ID NO: 39662 - DNA, 2703 bp, synthetic construct
  source 1..2703: mol_type = other DNA
atggccttaccagtgaccgccttgctcctgccgctggccttgctgctccacgccgccaggccgcaggttcagctgcaagagtctggccctggcctggtcaagcctagccaaacactgagcctgacctgtaccgtgtctggcggctctatcaccaccggcgagttctactggaactggttcagacagcctcctggcaaaggactggaatggatgggagccattgccgccagcggcagcacaacatacagccctagcttcgagagccggaccagcatcagcagagacaccagcaagaatcagttcagcctgaagctgagcagcgtgacagccgccgatacagccgtgtattactgcggcagatcctttggagtggccgccgtgacaaccggccagaatagaggacagggcaccctggtcacagtgtctagcggtaccggcggaggcggatctggcggcggaggtagcggtggcggaggatctgaattcgacatccagatgacacagagccctagcagcctgtctgccagcgtgggagacagagtgaccatcacctgtagagccagccaggatgtgtctacagccgtggcctggtatcagcagaagcctggaaaggcccctaagctgctgatctacagcgccagctttctgtactccggcgtgcccagcagattcagcggaagcagaagcggcaccgacttcaccctgacaatatccagcctccagcctgaggacttcgccacctactactgccagcagtacctgtaccagccttggacattcggccagggcaccaaggtggaaatcaagagactcgagatccagaaccctgatcctgccgtgtaccagctgcgggatagcaagagcagcgacaagagcgtgtgtctgttcaccgacttcgacagccagaccaacgtgtcccagagcaaggactccgacgtgtacatcaccgataagtgcgtgctggacatgcggagcatggacttcaagagcaactccgccgtggcctggtccaacaagtccgatttcgcctgcgccaacgccttcaacaacagcattatccccgaggacacattcttcccaagcagcgacgtgccctgcgacgtgaagctggtggaaaagagcttcgagacagacaccaacctgaacttccagaacctgagcgtgatcggcttcagaatcctgctgctgaaagtggccggctttaacctgctgatgaccctgcggctgtggtccagccgcgccaagagaagcggatctggcgtgaagcagaccctgaatttcgacctgctgaagctggctggcgacgtggaatccaacccaggccctactagtaccatggactggatttggcgcatccttttccttgtcggcgctgctaccggcgcccattccgggcccgaagtgcaactggttgaatccggtggcggcctggtgcaacccggcggatctctcagacttagctgtgccgcctccggcagaaccttcacaatgggatggtacaggcaggctccagggaaagagagagagttcgtcgccgccatctctctgtctcccacactggcctactacgccgactctgtgaaaggccggttcaccatctccagagataatagcaagaacaccgtggtgctgcaaatgaactctctgagagccgaggatacagccctgtactattgtgccgctgaccggaagtccgtgatgagcatcagacccgattactggggacagggcacactggtcacagtgtctagtggatccggcggcggaggatctggcggaggcggatctgggggcggaggctctttcgaagaagttcagctggttgagtctggcggaggactggttcaacctggcggaagcctgagactgtcttgtgccgccagcggcttcaacatcgactactacggaatgcactgggtccgacaggcccctggcaaaggacttgaatgggtcgcctctctgtacggcggcagcgatagcacagattacgccgactctgtgaagggcagattcaccatcagcgccgacaccagcaagaacaccgcctacctccagatgaactccctgagagccgaagataccgccgtgtactactgctccagacagtacagcgcctacttcgactattggggccagggaaccctggtcaccgttagctctacgcgtgaggacctgaagaacgtgttcccacctgaggtggccgtgttcgagcctagcaaggccgagatcgcccacacccagaaagccaccctcgtgtgcctggctaccggcttctaccccgaccatgtggaactgtcttggtgggtcaacggcaaagaggtgcacagcggcgtgtgtaccgacccccagccactgaaagaacagcccgccctgaacgacagccggtactgcctgagcagcagactgagagtgtccgccaccttctggcagaacccccggaaccacttcagatgccaggtgcagttctacggcctgagcgagaacgacgagtggacccaggacagagccaagcccgtgacccagatcgtgtctgccgaagcctggggcagagccgattgcggcatcaccagcgccagctaccaccagggcgtgctgagcgccaccatcctgtacgagatcctgctgggcaaggccaccctgtacgccgtgctggtgtctgccctggtgctgatggctatggtcaagcggaaggacagccgggga

SEQ ID NO: 39663 - DNA, 2292 bp, synthetic construct
  source 1..2292: mol_type = other DNA
atggccttaccagtgaccgccttgctcctgccgctggccttgctgctccacgccgccaggccgcaggttcagctgcaagagtctggccctggcctggtcaagcctagccaaacactgagcctgacctgtaccgtgtctggcggctctatcaccaccggcgagttctactggaactggttcagacagcctcctggcaaaggactggaatggatgggagccattgccgccagcggcagcacaacatacagccctagcttcgagagccggaccagcatcagcagagacaccagcaagaatcagttcagcctgaagctgagcagcgtgacagccgccgatacagccgtgtattactgcggcagatcctttggagtggccgccgtgacaaccggccagaatagaggacagggcaccctggtcacagtgtctagcggtaccggcggaggcggatctggcggcggaggtagcggtggcggaggatctgaattcgacatccagatgacacagagccctagcagcctgtctgccagcgtgggagacagagtgaccatcacctgtagagccagccaggatgtgtctacagccgtggcctggtatcagcagaagcctggaaaggcccctaagctgctgatctacagcgccagctttctgtactccggcgtgcccagcagattcagcggaagcagaagcggcaccgacttcaccctgacaatatccagcctccagcctgaggacttcgccacctactactgccagcagtacctgtaccagccttggacattcggccagggcaccaaggtggaaatcaagagactcgagatccagaaccctgatcctgccgtgtaccagctgcgggatagcaagagcagcgacaagagcgtgtgtctgttcaccgacttcgacagccagaccaacgtgtcccagagcaaggactccgacgtgtacatcaccgataagtgcgtgctggacatgcggagcatggacttcaagagcaactccgccgtggcctggtccaacaagtccgatttcgcctgcgccaacgccttcaacaacagcattatccccgaggacacattcttcccaagcagcgacgtgccctgcgacgtgaagctggtggaaaagagcttcgagacagacaccaacctgaacttccagaacctgagcgtgatcggcttcagaatcctgctgctgaaagtggccggctttaacctgctgatgaccctgcggctgtggtccagccgcgccaagagaagcggatctggcgtgaagcagaccctgaatttcgacctgctgaagctggctggcgacgtggaatccaacccaggccctactagtaccatggactggatttggcgcatccttttccttgtcggcgctgctaccggcgcccattccttcgaagaagttcagctggttgagtctggcggaggactggttcaacctggcggaagcctgagactgtcttgtgccgccagcggcttcaacatcgactactacggaatgcactgggtccgacaggcccctggcaaaggacttgaatgggtcgcctctctgtacggcggcagcgatagcacagattacgccgactctgtgaagggcagattcaccatcagcgccgacaccagcaagaacaccgcctacctccagatgaactccctgagagccgaagataccgccgtgtactactgctccagacagtacagcgcctacttcgactattggggccagggaaccctggtcaccgttagctctacgcgtgaggacctgaagaacgtgttcccacctgaggtggccgtgttcgagcctagcaaggccgagatcgcccacacccagaaagccaccctcgtgtgcctggctaccggcttctaccccgaccatgtggaactgtcttggtgggtcaacggcaaagaggtgcacagcggcgtgtgtaccgacccccagccactgaaagaacagcccgccctgaacgacagccggtactgcctgagcagcagactgagagtgtccgccaccttctggcagaacccccggaaccacttcagatgccaggtgcagttctacggcctgagcgagaacgacgagtggacccaggacagagccaagcccgtgacccagatcgtgtctgccgaagcctggggcagagccgattgcggcatcaccagcgccagctaccaccagggcgtgctgagcgccaccatcctgtacgagatcctgctgggcaaggccaccctgtacgccgtgctggtgtctgccctggtgctgatggctatggtcaagcggaaggacagccgggga

SEQ ID NO: 39664 - DNA, 2691 bp, synthetic construct
  source 1..2691: mol_type = other DNA
atggccttaccagtgaccgccttgctcctgccgctggccttgctgctccacgccgccaggccggaagtgcagctggttgaatctggcggaggactggttcaggctggcggatctctgagactgtcttgtgccgccagcggcagaacctttagcatgggctggtttagacaggcccctggcaaagagagagagttcgtcgccgccatcacatactctggcggcagcccttactacgccgactctgtgaagggcagattcaccatcagccgggacaacgccaagaacaccgtgtacctccagatgaacagcctgaagcctgaggacaccgccgtgtactactgcgccgccaatccaacatacggcagcgactggaacgccgagaattggggccagggaacccaagtgacagtgtctagcggtaccggcggaggcggatctggcggcggaggtagcggtggcggaggatctgaattcgacatccagatgacacagagccctagcagcctgtctgccagcgtgggagacagagtgaccatcacctgtagagccagccaggatgtgtctacagccgtggcctggtatcagcagaagcctggaaaggcccctaagctgctgatctacagcgccagctttctgtactccggcgtgcccagcagattcagcggaagcagaagcggcaccgacttcaccctgacaatatccagcctccagcctgaggacttcgccacctactactgccagcagtacctgtaccagccttggacattcggccagggcaccaaggtggaaatcaagagactcgaggacctgaagaacgtgttcccacctgaggtggccgtgttcgagcctagcgaggccgagatcagccacacccagaaagccaccctcgtgtgcctggctaccggcttctaccccgaccatgtggaactgtcttggtgggtcaacggcaaagaggtgcacagcggcgtgtgtaccgacccccagccactgaaagaacagcccgccctgaacgacagccggtactgcctgagcagcagactgagagtgtccgccaccttctggcagaacccccggaaccacttcagatgccaggtgcagttctacggcctgagcgagaacgacgagtggacccaggacagagccaagcccgtgacccagatcgtgtctgccgaagcctggggcagagccgattgcggctttaccagcgagagctaccagcagggcgtgctgagcgccaccatcctgtacgagatcctgctgggcaaggccaccctgtacgccgtgctggtgtctgccctggtgctgatggctatggtcaagcggaaggacagccggggaagggccaagcgatctggatctggagcaacaaacttctcactactcaaacaagcaggtgacgtggaggagaatcccgggcctactagtaccatggactggatttggcgcatccttttccttgtcggcgctgctaccggcgcccattccgggccccaggtgcagctccaagaaagcggacccggactggttaagccctctcagaccctgtctctgacctgcacagttagcggagccagcattaccacaggcgagtattattggaattggtttcggcagccaccaggcaaggggcttgagtggatgggtgctattgctgcctctggcagcaccacctactctcccagctttgagagcagaacctccatcagccgggacacctccaaaaaccagttctctctgaagctgtcctccgtgaccgctgctgacaccgccgtctattattgtggccggtctttcggcgtggcagctgtgaccacaggacagaacagaggccagggaacacttgtgaccgtgtcctctggatccggcggcggaggatctggcggaggcggatctgggggcggaggctctttcgaagaagttcagctggttgagtctggcggaggactggttcaacctggcggaagcctgagactgtcttgtgccgccagcggcttcaacatcgactactacggaatgcactgggtccgacaggcccctggcaaaggacttgaatgggtcgcctctctgtacggcggcagcgatagcacagattacgccgactctgtgaagggcagattcaccatcagcgccgacaccagcaagaacaccgcctacctccagatgaactccctgagagccgaagataccgccgtgtactactgctccagacagtacagcgcctacttcgactattggggccagggaaccctggtcaccgttagctctacgcgtatccagaaccctgatcctgccgtgtaccagctgcgggatagcaagagcagcgacaagagcgtgtgtctgttcaccgacttcgacagccagaccaacgtgtcccagagcaaggactccgacgtgtacatcaccgataagtgcgtgctggacatgcggagcatggacttcaagagcaactccgccgtggcctggtccaacaagtccgatttcgcctgcgccaacgccttcaacaacagcattatccccgaggacacattcttcccaagccccgagagcagctgcgacgtgaagctggtggaaaagagcttcgagacagacaccaacctgaacttccagaacctgagcgtgatcggcttcagaatcctgctgctgaaagtggccggctttaacctgctgatgaccctgcggctgtggtccagc

SEQ ID NO: 39665 - DNA, 2712 bp, synthetic construct
  source 1..2712: mol_type = other DNA
atggccttaccagtgaccgccttgctcctgccgctggccttgctgctccacgccgccaggccggaagtgcagctggttgaatctggcggaggactggttcaggctggcggatctctgagactgtcttgtgccgccagcggcagaacctttagcatgggctggtttagacaggcccctggcaaagagagagagttcgtcgccgccatcacatactctggcggcagcccttactacgccgactctgtgaagggcagattcaccatcagccgggacaacgccaagaacaccgtgtacctccagatgaacagcctgaagcctgaggacaccgccgtgtactactgcgccgccaatccaacatacggcagcgactggaacgccgagaattggggccagggaacccaagtgacagtgtctagcggtaccggcggaggcggatctggcggcggaggtagcggtggcggaggatctgaattcgacatccagatgacacagagccctagcagcctgtctgccagcgtgggagacagagtgaccatcacctgtagagccagccaggatgtgtctacagccgtggcctggtatcagcagaagcctggaaaggcccctaagctgctgatctacagcgccagctttctgtactccggcgtgcccagcagattcagcggaagcagaagcggcaccgacttcaccctgacaatatccagcctccagcctgaggacttcgccacctactactgccagcagtacctgtaccagccttggacattcggccagggcaccaaggtggaaatcaagagactcgagatccagaaccctgatcctgccgtgtaccagctgcgggatagcaagagcagcgacaagagcgtgtgtctgttcaccgacttcgacagccagaccaacgtgtcccagagcaaggactccgacgtgtacatcaccgataagtgcgtgctggacatgcggagcatggacttcaagagcaactccgccgtggcctggtccaacaagtccgatttcgcctgcgccaacgccttcaacaacagcattatccccgaggacacattcttcccaagcagcgacgtgccctgcgacgtgaagctggtggaaaagagcttcgagacagacaccaacctgaacttccagaacctgagcgtgatcggcttcagaatcctgctgctgaaagtggccggctttaacctgctgatgaccctgcggctgtggtccagccgcgccaagagaagcggatctggcgtgaagcagaccctgaatttcgacctgctgaagctggctggcgacgtggaatccaacccaggccctactagtaccatggactggatttggcgcatccttttccttgtcggcgctgctaccggcgcccattccgggccccaggtgcagctggttgaatctggcggaggactggttcagcctggcggatctctgagactgtcttgtgccgccagcggcaacatcaacagcagaaactgcatgggctggttcagacaggcccctggcaagggaagagaaggcgtggcagctatcggccaagtgaccggcagaacctactacgtggacagcgtgaagggcagattcaccatcagcctggacaacagcaagaacaccctgtacctccagatgaacagcctgagagccgaggacaccgccgtgtactattgtgctgctgcccctggctgtctgctgtctgcacttagaagcgccgactacagaaactggggccagggcacactggtcaccgtttcttctggatccggcggcggaggatctggcggaggcggatctgggggcggaggctctttcgaagaagttcagctggttgagtctggcggaggactggttcaacctggcggaagcctgagactgtcttgtgccgccagcggcttcaacatcgactactacggaatgcactgggtccgacaggcccctggcaaaggacttgaatgggtcgcctctctgtacggcggcagcgatagcacagattacgccgactctgtgaagggcagattcaccatcagcgccgacaccagcaagaacaccgcctacctccagatgaactccctgagagccgaagataccgccgtgtactactgctccagacagtacagcgcctacttcgactattggggccagggaaccctggtcaccgttagctctacgcgtgaggacctgaagaacgtgttcccacctgaggtggccgtgttcgagcctagcaaggccgagatcgcccacacccagaaagccaccctcgtgtgcctggctaccggcttctaccccgaccatgtggaactgtcttggtgggtcaacggcaaagaggtgcacagcggcgtgtgtaccgacccccagccactgaaagaacagcccgccctgaacgacagccggtactgcctgagcagcagactgagagtgtccgccaccttctggcagaacccccggaaccacttcagatgccaggtgcagttctacggcctgagcgagaacgacgagtggacccaggacagagccaagcccgtgacccagatcgtgtctgccgaagcctggggcagagccgattgcggcatcaccagcgccagctaccaccagggcgtgctgagcgccaccatcctgtacgagatcctgctgggcaaggccaccctgtacgccgtgctggtgtctgccctggtgctgatggctatggtcaagcggaaggacagccgggga

SEQ ID NO: 39666 - DNA, 2700 bp, synthetic construct
  source 1..2700: mol_type = other DNA
atggccttaccagtgaccgccttgctcctgccgctggccttgctgctccacgccgccaggccggaagtgcagctggttgaatctggcggaggactggttcaggctggcggatctctgagactgtcttgtgccgccagcggcagaacctttagcatgggctggtttagacaggcccctggcaaagagagagagttcgtcgccgccatcacatactctggcggcagcccttactacgccgactctgtgaagggcagattcaccatcagccgggacaacgccaagaacaccgtgtacctccagatgaacagcctgaagcctgaggacaccgccgtgtactactgcgccgccaatccaacatacggcagcgactggaacgccgagaattggggccagggaacccaagtgacagtgtctagcggtaccggcggaggcggatctggcggcggaggtagcggtggcggaggatctgaattcgacatccagatgacacagagccctagcagcctgtctgccagcgtgggagacagagtgaccatcacctgtagagccagccaggatgtgtctacagccgtggcctggtatcagcagaagcctggaaaggcccctaagctgctgatctacagcgccagctttctgtactccggcgtgcccagcagattcagcggaagcagaagcggcaccgacttcaccctgacaatatccagcctccagcctgaggacttcgccacctactactgccagcagtacctgtaccagccttggacattcggccagggcaccaaggtggaaatcaagagactcgaggacctgaagaacgtgttcccacctgaggtggccgtgttcgagcctagcgaggccgagatcagccacacccagaaagccaccctcgtgtgcctggctaccggcttctaccccgaccatgtggaactgtcttggtgggtcaacggcaaagaggtgcacagcggcgtgtgtaccgacccccagccactgaaagaacagcccgccctgaacgacagccggtactgcctgagcagcagactgagagtgtccgccaccttctggcagaacccccggaaccacttcagatgccaggtgcagttctacggcctgagcgagaacgacgagtggacccaggacagagccaagcccgtgacccagatcgtgtctgccgaagcctggggcagagccgattgcggctttaccagcgagagctaccagcagggcgtgctgagcgccaccatcctgtacgagatcctgctgggcaaggccaccctgtacgccgtgctggtgtctgccctggtgctgatggctatggtcaagcggaaggacagccggggaagggccaagcgatctggatctggagcaacaaacttctcactactcaaacaagcaggtgacgtggaggagaatcccgggcctactagtaccatggactggatttggcgcatccttttccttgtcggcgctgctaccggcgcccattccgggccccaggtgcagctggttgaatctggcggaggactggttcagcctggcggatctctgagactgtcttgtgccgccagcggcaacatcaacagcagaaactgcatgggctggttcagacaggcccctggcaagggaagagaaggcgtggcagctatcggccaagtgaccggcagaacctactacgtggacagcgtgaagggcagattcaccatcagcctggacaacagcaagaacaccctgtacctccagatgaacagcctgagagccgaggacaccgccgtgtactattgtgctgctgcccctggctgtctgctgtctgcacttagaagcgccgactacagaaactggggccagggcacactggtcaccgtttcttctggatccggcggcggaggatctggcggaggcggatctgggggcggaggctctttcgaagaagttcagctggttgagtctggcggaggactggttcaacctggcggaagcctgagactgtcttgtgccgccagcggcttcaacatcgactactacggaatgcactgggtccgacaggcccctggcaaaggacttgaatgggtcgcctctctgtacggcggcagcgatagcacagattacgccgactctgtgaagggcagattcaccatcagcgccgacaccagcaagaacaccgcctacctccagatgaactccctgagagccgaagataccgccgtgtactactgctccagacagtacagcgcctacttcgactattggggccagggaaccctggtcaccgttagctctacgcgtatccagaaccctgatcctgccgtgtaccagctgcgggatagcaagagcagcgacaagagcgtgtgtctgttcaccgacttcgacagccagaccaacgtgtcccagagcaaggactccgacgtgtacatcaccgataagtgcgtgctggacatgcggagcatggacttcaagagcaactccgccgtggcctggtccaacaagtccgatttcgcctgcgccaacgccttcaacaacagcattatccccgaggacacattcttcccaagccccgagagcagctgcgacgtgaagctggtggaaaagagcttcgagacagacaccaacctgaacttccagaacctgagcgtgatcggcttcagaatcctgctgctgaaagtggccggctttaacctgctgatgaccctgcggctgtggtccagc

SEQ ID NO: 39667 - DNA, 2700 bp, synthetic construct
  source 1..2700: mol_type = other DNA
atggccttaccagtgaccgccttgctcctgccgctggccttgctgctccacgccgccaggccggaagtgcaactggttgaatccggtggcggcctggtgcaagcaggcggatctctcagacttagctgtgccgcctccggcagaaccttcacaatgggatggtttaggcaggctccagggaaagagagagagttcgtcgccgccatctctctgtctcccacactggcctactacgccgactctgtgaaaggccggttcaccatctccagagataatgccaagaacaccgtggtgctgcaaatgaactctctgaaacccgaggatacagccctgtactattgtgccgctgaccggaagtccgtgatgagcatcagacccgattactggggacagggcacacaagtcacagtgtcctctggtaccggcggaggcggatctggcggcggaggtagcggtggcggaggatctgaattcgacatccagatgacacagagccctagcagcctgtctgccagcgtgggagacagagtgaccatcacctgtagagccagccaggatgtgtctacagccgtggcctggtatcagcagaagcctggaaaggcccctaagctgctgatctacagcgccagctttctgtactccggcgtgcccagcagattcagcggaagcagaagcggcaccgacttcaccctgacaatatccagcctccagcctgaggacttcgccacctactactgccagcagtacctgtaccagccttggacattcggccagggcaccaaggtggaaatcaagagactcgaggacctgaagaacgtgttcccacctgaggtggccgtgttcgagcctagcgaggccgagatcagccacacccagaaagccaccctcgtgtgcctggctaccggcttctaccccgaccatgtggaactgtcttggtgggtcaacggcaaagaggtgcacagcggcgtgtgtaccgacccccagccactgaaagaacagcccgccctgaacgacagccggtactgcctgagcagcagactgagagtgtccgccaccttctggcagaacccccggaaccacttcagatgccaggtgcagttctacggcctgagcgagaacgacgagtggacccaggacagagccaagcccgtgacccagatcgtgtctgccgaagcctggggcagagccgattgcggctttaccagcgagagctaccagcagggcgtgctgagcgccaccatcctgtacgagatcctgctgggcaaggccaccctgtacgccgtgctggtgtctgccctggtgctgatggctatggtcaagcggaaggacagccggggaagggccaagcgatctggatctggagcaacaaacttctcactactcaaacaagcaggtgacgtggaggagaatcccgggcctactagtaccatggactggatttggcgcatccttttccttgtcggcgctgctaccggcgcccattccgggccccaggtgcagctggttgaatctggcggaggactggttcagcctggcggatctctgagactgtcttgtgccgccagcggcaacatcaacagcagaaactgcatgggctggttcagacaggcccctggcaagggaagagaaggcgtggcagctatcggccaagtgaccggcagaacctactacgtggacagcgtgaagggcagattcaccatcagcctggacaacagcaagaacaccctgtacctccagatgaacagcctgagagccgaggacaccgccgtgtactattgtgctgctgcccctggctgtctgctgtctgcacttagaagcgccgactacagaaactggggccagggcacactggtcaccgtttcttctggatccggcggcggaggatctggcggaggcggatctgggggcggaggctctttcgaagaagttcagctggttgagtctggcggaggactggttcaacctggcggaagcctgagactgtcttgtgccgccagcggcttcaacatcgactactacggaatgcactgggtccgacaggcccctggcaaaggacttgaatgggtcgcctctctgtacggcggcagcgatagcacagattacgccgactctgtgaagggcagattcaccatcagcgccgacaccagcaagaacaccgcctacctccagatgaactccctgagagccgaagataccgccgtgtactactgctccagacagtacagcgcctacttcgactattggggccagggaaccctggtcaccgttagctctacgcgtatccagaaccctgatcctgccgtgtaccagctgcgggatagcaagagcagcgacaagagcgtgtgtctgttcaccgacttcgacagccagaccaacgtgtcccagagcaaggactccgacgtgtacatcaccgataagtgcgtgctggacatgcggagcatggacttcaagagcaactccgccgtggcctggtccaacaagtccgatttcgcctgcgccaacgccttcaacaacagcattatccccgaggacacattcttcccaagccccgagagcagctgcgacgtgaagctggtggaaaagagcttcgagacagacaccaacctgaacttccagaacctgagcgtgatcggcttcagaatcctgctgctgaaagtggccggctttaacctgctgatgaccctgcggctgtggtccagc

SEQ ID NO: 39668 - DNA, 2712 bp, synthetic construct
  source 1..2712: mol_type = other DNA
atggccttaccagtgaccgccttgctcctgccgctggccttgctgctccacgccgccaggccgcaggttcagctgcaagagtctggccctggcctggtcaagcctagccaaacactgagcctgacctgtaccgtgtctggcggctctatcaccaccggcgagttctactggaactggttcagacagcctcctggcaaaggactggaatggatgggagccattgccgccagcggcagcacaacatacagccctagcttcgagagccggaccagcatcagcagagacaccagcaagaatcagttcagcctgaagctgagcagcgtgacagccgccgatacagccgtgtattactgcggcagatcctttggagtggccgccgtgacaaccggccagaatagaggacagggcaccctggtcacagtgtctagcggtaccggcggaggcggatctggcggcggaggtagcggtggcggaggatctgaattcgacatccagatgacacagagccctagcagcctgtctgccagcgtgggagacagagtgaccatcacctgtagagccagccaggatgtgtctacagccgtggcctggtatcagcagaagcctggaaaggcccctaagctgctgatctacagcgccagctttctgtactccggcgtgcccagcagattcagcggaagcagaagcggcaccgacttcaccctgacaatatccagcctccagcctgaggacttcgccacctactactgccagcagtacctgtaccagccttggacattcggccagggcaccaaggtggaaatcaagagactcgaggacctgaagaacgtgttcccacctgaggtggccgtgttcgagcctagcgaggccgagatcagccacacccagaaagccaccctcgtgtgcctggctaccggcttctaccccgaccatgtggaactgtcttggtgggtcaacggcaaagaggtgcacagcggcgtgtgtaccgacccccagccactgaaagaacagcccgccctgaacgacagccggtactgcctgagcagcagactgagagtgtccgccaccttctggcagaacccccggaaccacttcagatgccaggtgcagttctacggcctgagcgagaacgacgagtggacccaggacagagccaagcccgtgacccagatcgtgtctgccgaagcctggggcagagccgattgcggctttaccagcgagagctaccagcagggcgtgctgagcgccaccatcctgtacgagatcctgctgggcaaggccaccctgtacgccgtgctggtgtctgccctggtgctgatggctatggtcaagcggaaggacagccggggaagggccaagcgatctggatctggagcaacaaacttctcactactcaaacaagcaggtgacgtggaggagaatcccgggcctactagtaccatggactggatttggcgcatccttttccttgtcggcgctgctaccggcgcccattccgggccccaggtgcagctggttgaatctggcggaggactggttcagcctggcggatctctgagactgtcttgtgccgccagcggcaacatcaacagcagaaactgcatgggctggttcagacaggcccctggcaagggaagagaaggcgtggcagctatcggccaagtgaccggcagaacctactacgtggacagcgtgaagggcagattcaccatcagcctggacaacagcaagaacaccctgtacctccagatgaacagcctgagagccgaggacaccgccgtgtactattgtgctgctgcccctggctgtctgctgtctgcacttagaagcgccgactacagaaactggggccagggcacactggtcaccgtttcttctggatccggcggcggaggatctggcggaggcggatctgggggcggaggctctttcgaagaagttcagctggttgagtctggcggaggactggttcaacctggcggaagcctgagactgtcttgtgccgccagcggcttcaacatcgactactacggaatgcactgggtccgacaggcccctggcaaaggacttgaatgggtcgcctctctgtacggcggcagcgatagcacagattacgccgactctgtgaagggcagattcaccatcagcgccgacaccagcaagaacaccgcctacctccagatgaactccctgagagccgaagataccgccgtgtactactgctccagacagtacagcgcctacttcgactattggggccagggaaccctggtcaccgttagctctacgcgtatccagaaccctgatcctgccgtgtaccagctgcgggatagcaagagcagcgacaagagcgtgtgtctgttcaccgacttcgacagccagaccaacgtgtcccagagcaaggactccgacgtgtacatcaccgataagtgcgtgctggacatgcggagcatggacttcaagagcaactccgccgtggcctggtccaacaagtccgatttcgcctgcgccaacgccttcaacaacagcattatccccgaggacacattcttcccaagccccgagagcagctgcgacgtgaagctggtggaaaagagcttcgagacagacaccaacctgaacttccagaacctgagcgtgatcggcttcagaatcctgctgctgaaagtggccggctttaacctgctgatgaccctgcggctgtggtccagc

SEQ ID NO: 39669 - DNA, 1455 bp, synthetic construct
  source 1..1455: mol_type = other DNA
atggccttaccagtgaccgccttgctcctgccgctggccttgctgctccacgccgccaggccggagatcgtgctgacacagtctcccgccacactgtcactgtctccaggcgaaagagccacactgagctgtagagccagccagagcgtgtcctcttacctggcctggtatcagcagaagcctggacaggctccccggctgctgatctacgatgccagcaatagagccacaggcatccccgccagattttctggctctggcagcggcaccgatttcaccctgaccataagcagcctggaacctgaggacttcgccgtgtactactgccagcagagaagcgactggcccctgacatttggcggcggaacaaaggtggaaatcaaaggcggaggcggaagtggaggcggaggatctggcggcggaggctctcaagttcagctggttcagagcggagccgaagtgaagaaacctggcagcagcgtgaaggtgtcctgcaaagcaagcggcggcacctttagctcctacgccatccactgggttcgacaggcaccaggacaaggactggaatggatgggcagaatcatccccatcgagggcagagcctactacgcccagaaattccagggcagagtgaccatcaccgccgacgagtctacaagcaccgcctacatggaactgagcagcctgagaagcgaggataccgctgtgtactattgcgccagaggccggtacagctacagatattggttcgactactggggccagggcaccctggttacagtctcttctacgcgtaaaattgaagttatgtatcctcctccttacctagacaatgagaagagcaatggaaccattatccatgtgaaagggaaacacctttgtccaagtcccctatttcccggaccttctaagcccttttgggtgctggtggtggttgggggagtcctggcttgctatagcttgctagtaacagtggcctttattattttctgggtgaggagtaagaggagcaggctcctgcacagtgactacatgaacatgactccacgccgccccggacccacccgcaagcattaccagccctatgccccaccacgcgacttcgcagcctatcgctccagagtgaagttcagcaggagcgcagacgcccccgcgtaccagcagggccagaaccagctctataacgagctcaatctaggacgaagagaggagtacgatgttttggacaagagacgtggccgggaccctgagatggggggaaagccgagaaggaagaaccctcaggaaggcctgtacaatgaactgcagaaagataagatggcggaggcctacagtgagattgggatgaaaggcgagcgccggaggggcaaggggcacgatggcctttaccagggtctcagtacagccaccaaggacacctacgacgcccttcacatgcaggccctgccccctcgc

SEQ ID NO: 39670 - DNA, 1473 bp, synthetic construct
  source 1..1473: mol_type = other DNA
atggccttaccagtgaccgccttgctcctgccgctggccttgctgctccacgccgccaggccggagatcgtgctgacacagtctcccgccacactgtcactgtctccaggcgaaagagccacactgagctgtagagccagccagagcgtgtcctcttacctggcctggtatcagcagaagcctggacaggctccccggctgctgatctacgatgccagcaatagagccacaggcatccccgccagattttctggctctggcagcggcaccgatttcaccctgaccataagcagcctggaacctgaggacttcgccgtgtactactgccagcagagaagcgactggcccctgacatttggcggcggaacaaaggtggaaatcaaaggcggaggcggaagtggaggcggaggatctggcggcggaggctctcaagttcagctggttcagagcggagccgaagtgaagaaacctggcagcagcgtgaaggtgtcctgcaaagcaagcggcggcacctttagctcctacgccatccactgggttcgacaggcaccaggacaaggactggaatggatgggcagaatcatccccatcgagggcagagcctactacgcccagaaattccagggcagagtgaccatcaccgccgacgagtctacaagcaccgcctacatggaactgagcagcctgagaagcgaggataccgctgtgtactattgcgccagaggccggtacagctacagatattggttcgactactggggccagggcaccctggttacagtctcttctacgcgtgcgaagcccaccacgacgccagcgccgcgaccaccaacaccggcgcccaccatcgcgtcgcagcccctgtccctgcgcccagaggcgtgccggccagcggcggggggcgcagtgcacacgagggggctggacttcgcctgtgacatctacatctgggcgcccttggccgggacttgtggggtccttctcctgtcactggttatcaccctttactgcaaacggggcagaaagaaactcctgtatatattcaaacaaccatttatgagaccagtacaaactactcaagaggaagatggctgtagctgccgatttccagaagaagaagaaggaggatgtgaactgagagtgaagttcagcaggagcgcagacgcccccgcgtaccagcagggccagaaccagctctataacgagctgaatctaggacgaagagaggagtacgatgttttggacaagagacgtggccgggaccctgagatggggggaaagccgagaaggaagaaccctcaggaaggcctgtacaatgaactgcagaaagataagatggcggaggcctacagtgagattgggatgaaaggcgagcgccggaggggcaaggggcacgatggcctttaccagggtctcagtacagccaccaaggacacctacgacgcccttcacatgcaggccctgccccctcgc

SEQ ID NO: 39671 - DNA, 1473 bp, synthetic construct
  source 1..1473: mol_type = other DNA
atggccttaccagtgaccgccttgctcctgccgctggccttgctgctccacgccgccaggccgcaagttcagctggttcagagcggagccgaagtgaagaaacctggcagcagcgtgaaggtgtcctgcaaagcaagcggcggcacctttagctcctacgccatccactgggttcgacaggcaccaggacaaggactggaatggatgggcagaatcatccccatcgagggcagagcctactacgcccagaaattccagggcagagtgaccatcaccgccgacgagtctacaagcaccgcctacatggaactgagcagcctgagaagcgaggataccgctgtgtactattgcgccagaggccggtacagctacagatattggttcgactactggggccagggcaccctggttacagtctcttctggcggaggcggaagtggaggcggaggatctggcggcggaggctctgagatcgtgctgacacagtctcccgccacactgtcactgtctccaggcgaaagagccacactgagctgtagagccagccagagcgtgtcctcttacctggcctggtatcagcagaagcctggacaggctccccggctgctgatctacgatgccagcaatagagccacaggcatccccgccagattttctggctctggcagcggcaccgatttcaccctgaccataagcagcctggaacctgaggacttcgccgtgtactactgccagcagagaagcgactggcccctgacatttggcggcggaacaaaggtggaaatcaaaacgcgtgcgaagcccaccacgacgccagcgccgcgaccaccaacaccggcgcccaccatcgcgtcgcagcccctgtccctgcgcccagaggcgtgccggccagcggcggggggcgcagtgcacacgagggggctggacttcgcctgtgacatctacatctgggcgcccttggccgggacttgtggggtccttctcctgtcactggttatcaccctttactgcaaacggggcagaaagaaactcctgtatatattcaaacaaccatttatgagaccagtacaaactactcaagaggaagatggctgtagctgccgatttccagaagaagaagaaggaggatgtgaactgagagtgaagttcagcaggagcgcagacgcccccgcgtaccagcagggccagaaccagctctataacgagctgaatctaggacgaagagaggagtacgatgttttggacaagagacgtggccgggaccctgagatggggggaaagccgagaaggaagaaccctcaggaaggcctgtacaatgaactgcagaaagataagatggcggaggcctacagtgagattgggatgaaaggcgagcgccggaggggcaaggggcacgatggcctttaccagggtctcagtacagccaccaaggacacctacgacgcccttcacatgcaggccctgccccctcgc

SEQ ID NO: 39672 - DNA, 1872 bp, synthetic construct
  source 1..1872: mol_type = other DNA
atggccttaccagtgaccgccttgctcctgccgctggccttgctgctccacgccgccaggccggagatcgtgctgacacagtctcccgccacactgtcactgtctccaggcgaaagagccacactgagctgtagagccagccagagcgtgtcctcttacctggcctggtatcagcagaagcctggacaggctccccggctgctgatctacgatgccagcaatagagccacaggcatccccgccagattttctggctctggcagcggcaccgatttcaccctgaccataagcagcctggaacctgaggacttcgccgtgtactactgccagcagagaagcgactggcccctgacatttggcggcggaacaaaggtggaaatcaaactcgagatccagaaccctgatcctgccgtgtaccagctgcgggatagcaagagcagcgacaagagcgtgtgtctgttcaccgacttcgacagccagaccaacgtgtcccagagcaaggactccgacgtgtacatcaccgataagtgcgtgctggacatgcggagcatggacttcaagagcaactccgccgtggcctggtccaacaagtccgatttcgcctgcgccaacgccttcaacaacagcattatccccgaggacacattcttcccaagcagcgacgtgccctgcgacgtgaagctggtggaaaagagcttcgagacagacaccaacctgaacttccagaacctgagcgtgatcggcttcagaatcctgctgctgaaagtggccggctttaacctgctgatgaccctgcggctgtggtccagccgcgccaagagaagcggatctggcgtgaagcagaccctgaatttcgacctgctgaagctggctggcgacgtggaatccaacccaggccctactagtatggactggatttggcgcatccttttccttgtcggcgctgctaccggcgcgcattccttcgaacaagttcagctggttcagagcggagccgaagtgaagaaacctggcagcagcgtgaaggtgtcctgcaaagcaagcggcggcacctttagctcctacgccatccactgggttcgacaggcaccaggacaaggactggaatggatgggcagaatcatccccatcgagggcagagcctactacgcccagaaattccagggcagagtgaccatcaccgccgacgagtctacaagcaccgcctacatggaactgagcagcctgagaagcgaggataccgctgtgtactattgcgccagaggccggtacagctacagatattggttcgactactggggccagggcaccctggttacagtctcttctacgcgtgaggacctgaagaacgtgttcccacctgaggtggccgtgttcgagcctagcaaggccgagatcgcccacacccagaaagccaccctcgtgtgcctggctaccggcttctaccccgaccatgtggaactgtcttggtgggtcaacggcaaagaggtgcacagcggcgtgtgtaccgacccccagccactgaaagaacagcccgccctgaacgacagccggtactgcctgagcagcagactgagagtgtccgccaccttctggcagaacccccggaaccacttcagatgccaggtgcagttctacggcctgagcgagaacgacgagtggacccaggacagagccaagcccgtgacccagatcgtgtctgccgaagcctggggcagagccgattgcggcatcaccagcgccagctaccaccagggcgtgctgagcgccaccatcctgtacgagatcctgctgggcaaggccaccctgtacgccgtgctggtgtctgccctggtgctgatggctatggtcaagcggaaggacagccgggga

SEQ ID NO: 39673 - DNA, 1860 bp, synthetic construct
  source 1..1860: mol_type = other DNA
atggccttaccagtgaccgccttgctcctgccgctggccttgctgctccacgccgccaggccggagatcgtgctgacacagtctcccgccacactgtcactgtctccaggcgaaagagccacactgagctgtagagccagccagagcgtgtcctcttacctggcctggtatcagcagaagcctggacaggctccccggctgctgatctacgatgccagcaatagagccacaggcatccccgccagattttctggctctggcagcggcaccgatttcaccctgaccataagcagcctggaacctgaggacttcgccgtgtactactgccagcagagaagcgactggcccctgacatttggcggcggaacaaaggtggaaatcaaactcgaggacctgaagaacgtgttcccacctgaggtggccgtgttcgagcctagcaaggccgagatcgcccacacccagaaagccaccctcgtgtgcctggctaccggcttctaccccgaccatgtggaactgtcttggtgggtcaacggcaaagaggtgcacagcggcgtgtgtaccgacccccagccactgaaagaacagcccgccctgaacgacagccggtactgcctgagcagcagactgagagtgtccgccaccttctggcagaacccccggaaccacttcagatgccaggtgcagttctacggcctgagcgagaacgacgagtggacccaggacagagccaagcccgtgacccagatcgtgtctgccgaagcctggggcagagccgattgcggcatcaccagcgccagctaccaccagggcgtgctgagcgccaccatcctgtacgagatcctgctgggcaaggccaccctgtacgccgtgctggtgtctgccctggtgctgatggctatggtcaagcggaaggacagccggggaagggccaagcgatctggatctggagcaacaaacttctcactactcaaacaagcaggtgacgtggaggagaatcccgggcctactagtatggactggatttggcgcatccttttccttgtcggcgctgctaccggcgcgcattccttcgaacaagttcagctggttcagagcggagccgaagtgaagaaacctggcagcagcgtgaaggtgtcctgcaaagcaagcggcggcacctttagctcctacgccatccactgggttcgacaggcaccaggacaaggactggaatggatgggcagaatcatccccatcgagggcagagcctactacgcccagaaattccagggcagagtgaccatcaccgccgacgagtctacaagcaccgcctacatggaactgagcagcctgagaagcgaggataccgctgtgtactattgcgccagaggccggtacagctacagatattggttcgactactggggccagggcaccctggttacagtctcttctacgcgtatccagaaccctgatcctgccgtgtaccagctgcgggatagcaagagcagcgacaagagcgtgtgtctgttcaccgacttcgacagccagaccaacgtgtcccagagcaaggactccgacgtgtacatcaccgataagtgcgtgctggacatgcggagcatggacttcaagagcaactccgccgtggcctggtccaacaagtccgatttcgcctgcgccaacgccttcaacaacagcattatccccgaggacacattcttcccaagcagcgacgtgccctgcgacgtgaagctggtggaaaagagcttcgagacagacaccaacctgaacttccagaacctgagcgtgatcggcttcagaatcctgctgctgaaagtggccggctttaacctgctgatgaccctgcggctgtggtccagc

SEQ ID NO: 39674 - DNA, 1860 bp, synthetic construct
  source 1..1860: mol_type = other DNA
atggccttaccagtgaccgccttgctcctgccgctggccttgctgctccacgccgccaggccggagatcgtgctgacacagtctcccgccacactgtcactgtctccaggcgaaagagccacactgagctgtagagccagccagagcgtgtcctcttacctggcctggtatcagcagaagcctggacaggctccccggctgctgatctacgatgccagcaatagagccacaggcatccccgccagattttctggctctggcagcggcaccgatttcaccctgaccataagcagcctggaacctgaggacttcgccgtgtactactgccagcagagaagcgactggcccctgacatttggcggcggaacaaaggtggaaatcaaactcgaggacctgaagaacgtgttcccacctgaggtggccgtgttcgagcctagcgaggccgagatcagccacacccagaaagccaccctcgtgtgcctggctaccggcttctaccccgaccatgtggaactgtcttggtgggtcaacggcaaagaggtgcacagcggcgtgtgtaccgacccccagccactgaaagaacagcccgccctgaacgacagccggtactgcctgagcagcagactgagagtgtccgccaccttctggcagaacccccggaaccacttcagatgccaggtgcagttctacggcctgagcgagaacgacgagtggacccaggacagagccaagcccgtgacccagatcgtgtctgccgaagcctggggcagagccgattgcggctttaccagcgagagctaccagcagggcgtgctgagcgccaccatcctgtacgagatcctgctgggcaaggccaccctgtacgccgtgctggtgtctgccctggtgctgatggctatggtcaagcggaaggacagccggggaagggccaagcgatctggatctggagcaacaaacttctcactactcaaacaagcaggtgacgtggaggagaatcccgggcctactagtatggactggatttggcgcatccttttccttgtcggcgctgctaccggcgcgcattccttcgaacaagttcagctggttcagagcggagccgaagtgaagaaacctggcagcagcgtgaaggtgtcctgcaaagcaagcggcggcacctttagctcctacgccatccactgggttcgacaggcaccaggacaaggactggaatggatgggcagaatcatccccatcgagggcagagcctactacgcccagaaattccagggcagagtgaccatcaccgccgacgagtctacaagcaccgcctacatggaactgagcagcctgagaagcgaggataccgctgtgtactattgcgccagaggccggtacagctacagatattggttcgactactggggccagggcaccctggttacagtctcttctacgcgtatccagaaccctgatcctgccgtgtaccagctgcgggatagcaagagcagcgacaagagcgtgtgtctgttcaccgacttcgacagccagaccaacgtgtcccagagcaaggactccgacgtgtacatcaccgataagtgcgtgctggacatgcggagcatggacttcaagagcaactccgccgtggcctggtccaacaagtccgatttcgcctgcgccaacgccttcaacaacagcattatccccgaggacacattcttcccaagccccgagagcagctgcgacgtgaagctggtggaaaagagcttcgagacagacaccaacctgaacttccagaacctgagcgtgatcggcttcagaatcctgctgctgaaagtggccggctttaacctgctgatgaccctgcggctgtggtccagc

SEQ ID NO: 39675 - DNA, 1872 bp, synthetic construct
  source 1..1872: mol_type = other DNA
atggccttaccagtgaccgccttgctcctgccgctggccttgctgctccacgccgccaggccggagatcgtgctgacacagtctcccgccacactgtcactgtctccaggcgaaagagccacactgagctgtagagccagccagagcgtgtcctcttacctggcctggtatcagcagaagcctggacaggctccccggctgctgatctacgatgccagcaatagagccacaggcatccccgccagattttctggctctggcagcggcaccgatttcaccctgaccataagcagcctggaacctgaggacttcgccgtgtactactgccagcagagaagcgactggcccctgacatttggcggcggaacaaaggtggaaatcaaactcgagatccagaaccctgatcctgccgtgtaccagctgcgggatagcaagagcagcgacaagagcgtgtgtctgttcaccgacttcgacagccagaccaacgtgtcccagagcaaggactccgacgtgtacatcaccgataagtgcgtgctggacatgcggagcatggacttcaagagcaactccgccgtggcctggtccaacaagtccgatttcgcctgcgccaacgccttcaacaacagcattatccccgaggacacattcttcccaagccccgagagcagctgcgacgtgaagctggtggaaaagagcttcgagacagacaccaacctgaacttccagaacctgagcgtgatcggcttcagaatcctgctgctgaaagtggccggctttaacctgctgatgaccctgcggctgtggtccagccgcgccaagagaagcggatctggcgtgaagcagaccctgaatttcgacctgctgaagctggctggcgacgtggaatccaacccaggccctactagtatggactggatttggcgcatccttttccttgtcggcgctgctaccggcgcgcattccttcgaacaagttcagctggttcagagcggagccgaagtgaagaaacctggcagcagcgtgaaggtgtcctgcaaagcaagcggcggcacctttagctcctacgccatccactgggttcgacaggcaccaggacaaggactggaatggatgggcagaatcatccccatcgagggcagagcctactacgcccagaaattccagggcagagtgaccatcaccgccgacgagtctacaagcaccgcctacatggaactgagcagcctgagaagcgaggataccgctgtgtactattgcgccagaggccggtacagctacagatattggttcgactactggggccagggcaccctggttacagtctcttctacgcgtgaggacctgaagaacgtgttcccacctgaggtggccgtgttcgagcctagcgaggccgagatcagccacacccagaaagccaccctcgtgtgcctggctaccggcttctaccccgaccatgtggaactgtcttggtgggtcaacggcaaagaggtgcacagcggcgtgtgtaccgacccccagccactgaaagaacagcccgccctgaacgacagccggtactgcctgagcagcagactgagagtgtccgccaccttctggcagaacccccggaaccacttcagatgccaggtgcagttctacggcctgagcgagaacgacgagtggacccaggacagagccaagcccgtgacccagatcgtgtctgccgaagcctggggcagagccgattgcggctttaccagcgagagctaccagcagggcgtgctgagcgccaccatcctgtacgagatcctgctgggcaaggccaccctgtacgccgtgctggtgtctgccctggtgctgatggctatggtcaagcggaaggacagccgggga

SEQ ID NO: 39676 - DNA, 1908 bp, synthetic construct
  source 1..1908: mol_type = other DNA
atggccttaccagtgaccgccttgctcctgccgctggccttgctgctccacgccgccaggccgctcgaggaggacctgaagaacgtgttcccacctgaggtggccgtgttcgagcctagcaaggccgagatcgcccacacccagaaagccaccctcgtgtgcctggctaccggcttctaccccgaccatgtggaactgtcttggtgggtcaacggcaaagaggtgcacagcggcgtgtgtaccgacccccagccactgaaagaacagcccgccctgaacgacagccggtactgcctgagcagcagactgagagtgtccgccaccttctggcagaacccccggaaccacttcagatgccaggtgcagttctacggcctgagcgagaacgacgagtggacccaggacagagccaagcccgtgacccagatcgtgtctgccgaagcctggggcagagccgattgcggcatcaccagcgccagctaccaccagggcgtgctgagcgccaccatcctgtacgagatcctgctgggcaaggccaccctgtacgccgtgctggtgtctgccctggtgctgatggctatggtcaagcggaaggacagccggggaagggccaagcgatctggatctggagcaacaaacttctcactactcaaacaagcaggtgacgtggaggagaatcccgggcctactagcatggccttaccagtgaccgccttgctcctgccgctggccttgctgctccacgccgccaggccggagatcgtgctgacacagtctcccgccacactgtcactgtctccaggcgaaagagccacactgagctgtagagccagccagagcgtgtcctcttacctggcctggtatcagcagaagcctggacaggctccccggctgctgatctacgatgccagcaatagagccacaggcatccccgccagattttctggctctggcagcggcaccgatttcaccctgaccataagcagcctggaacctgaggacttcgccgtgtactactgccagcagagaagcgactggcccctgacatttggcggcggaacaaaggtggaaatcaaaggcggaggcggaagtggaggcggaggatctggcggcggaggctctcaagttcagctggttcagagcggagccgaagtgaagaaacctggcagcagcgtgaaggtgtcctgcaaagcaagcggcggcacctttagctcctacgccatccactgggttcgacaggcaccaggacaaggactggaatggatgggcagaatcatccccatcgagggcagagcctactacgcccagaaattccagggcagagtgaccatcaccgccgacgagtctacaagcaccgcctacatggaactgagcagcctgagaagcgaggataccgctgtgtactattgcgccagaggccggtacagctacagatattggttcgactactggggccagggcaccctggttacagtctcttctacgcgtatccagaaccctgatcctgccgtgtaccagctgcgggatagcaagagcagcgacaagagcgtgtgtctgttcaccgacttcgacagccagaccaacgtgtcccagagcaaggactccgacgtgtacatcaccgataagtgcgtgctggacatgcggagcatggacttcaagagcaactccgccgtggcctggtccaacaagtccgatttcgcctgcgccaacgccttcaacaacagcattatccccgaggacacattcttcccaagcagcgacgtgccctgcgacgtgaagctggtggaaaagagcttcgagacagacaccaacctgaacttccagaacctgagcgtgatcggcttcagaatcctgctgctgaaagtggccggctttaacctgctgatgaccctgcggctgtggtccagc

SEQ ID NO: 39677 - DNA, 1929 bp, synthetic construct
  source 1..1929: mol_type = other DNA
atggccttaccagtgaccgccttgctcctgccgctggccttgctgctccacgccgccaggccgctcgagggctccggcgatcgccctgatcctgccgtgtaccagctgcgggatagcaagagcagcgacaagagcgtgtgtctgttcaccgacttcgacagccagaccaacgtgtcccagagcaaggactccgacgtgtacatcaccgataagtgcgtgctggacatgcggagcatggacttcaagagcaactccgccgtggcctggtccaacaagtccgatttcgcctgcgccaacgccttcaacaacagcattatccccgaggacacattcttcccaagccccgagagcagctgcgacgtgaagctggtggaaaagagcttcgagacagacaccaacctgaacttccagaacctgagcgtgatcggcttcagaatcctgctgctgaaagtggccggctttaacctgctgatgaccctgcggctgtggtccagctctagtcgcgccaagagaagcggatctggcgtgaagcagaccctgaatttcgacctgctgaagctggctggcgacgtggaatccaacccaggccccactagcatggccttaccagtgaccgccttgctcctgccgctggccttgctgctccacgccgccaggccggagatcgtgctgacacagtctcccgccacactgtcactgtctccaggcgaaagagccacactgagctgtagagccagccagagcgtgtcctcttacctggcctggtatcagcagaagcctggacaggctccccggctgctgatctacgatgccagcaatagagccacaggcatccccgccagattttctggctctggcagcggcaccgatttcaccctgaccataagcagcctggaacctgaggacttcgccgtgtactactgccagcagagaagcgactggcccctgacatttggcggcggaacaaaggtggaaatcaaaggcggaggcggaagtggaggcggaggatctggcggcggaggctctcaagttcagctggttcagagcggagccgaagtgaagaaacctggcagcagcgtgaaggtgtcctgcaaagcaagcggcggcacctttagctcctacgccatccactgggttcgacaggcaccaggacaaggactggaatggatgggcagaatcatccccatcgagggcagagcctactacgcccagaaattccagggcagagtgaccatcaccgccgacgagtctacaagcaccgcctacatggaactgagcagcctgagaagcgaggataccgctgtgtactattgcgccagaggccggtacagctacagatattggttcgactactggggccagggcaccctggttacagtctcttctacgcgtgaggacctgaagaacgtgttcccacctgaggtggccgtgttcgagcctagcgaggccgagatcagccacacccagaaagccaccctcgtgtgcctggctaccggcttctaccccgaccatgtggaactgtcttggtgggtcaacggcaaagaggtgcacagcggcgtgtgtaccgacccccagccactgaaagaacagcccgccctgaacgacagccggtactgcctgagcagcagactgagagtgtccgccaccttctggcagaacccccggaaccacttcagatgccaggtgcagttctacggcctgagcgagaacgacgagtggacccaggacagagccaagcccgtgacccagatcgtgtctgccgaagcctggggcagagccgattgcggctttaccagcgagagctaccagcagggcgtgctgagcgccaccatcctgtacgagatcctgctgggcaaggccaccctgtacgccgtgctggtgtctgccctggtgctgatggctatggtcaagcggaaggacagccgggga

SEQ ID NO: 39678 - DNA, 1860 bp, synthetic construct
  source 1..1860: mol_type = other DNA
atggccttaccagtgaccgccttgctcctgccgctggccttgctgctccacgccgccaggccggagatcgtgctgacacagtctcccgccacactgtcactgtctccaggcgaaagagccacactgagctgtagagccagccagagcgtgtcctcttacctggcctggtatcagcagaagcctggacaggctccccggctgctgatctacgatgccagcaatagagccacaggcatccccgccagattttctggctctggcagcggcaccgatttcaccctgaccataagcagcctggaacctgaggacttcgccgtgtactactgccagcagagaagcgactggcccctgacatttggcggcggaacaaaggtggaaatcaaactcgaggacctgaagaacgtgttcccacctgaggtggccgtgttcgagcctagcgaggccgagatcagccacacccagaaagccaccctcgtgtgcctggctaccggcttctaccccgaccatgtggaactgtcttggtgggtcaacggcaaagaggtgcacagcggcgtgtctaccgacccccagccactgaaagaacagcccgccctgaacgacagccggtactgcctgagcagcagactgagagtgtccgccaccttctggcagaacccccggaaccacttcagatgccaggtgcagttctacggcctgagcgagaacgacgagtggacccaggacagagccaagcccgtgacccagatcgtgtctgccgaagcctggggcagagccgattgcggctttaccagcgagagctaccagcagggcgtgctgagcgccaccatcctgtacgagatcctgctgggcaaggccaccctgtacgccgtgctggtgtctgccctggtgctgatggctatggtcaagcggaaggacagccggggaagggccaagcgatctggatctggagcaacaaacttctcactactcaaacaagcaggtgacgtggaggagaatcccgggcctactagtatggactggatttggcgcatccttttccttgtcggcgctgctaccggcgcgcattccttcgaacaagttcagctggttcagagcggagccgaagtgaagaaacctggcagcagcgtgaaggtgtcctgcaaagcaagcggcggcacctttagctcctacgccatccactgggttcgacaggcaccaggacaaggactggaatggatgggcagaatcatccccatcgagggcagagcctactacgcccagaaattccagggcagagtgaccatcaccgccgacgagtctacaagcaccgcctacatggaactgagcagcctgagaagcgaggataccgctgtgtactattgcgccagaggccggtacagctacagatattggttcgactactggggccagggcaccctggttacagtctcttctacgcgtatccagaaccctgatcctgccgtgtaccagctgcgggatagcaagagcagcgacaagagcgtgtgtctgttcaccgacttcgacagccagaccaacgtgtcccagagcaaggactccgacgtgtacatcaccgataagaccgtgctggacatgcggagcatggacttcaagagcaactccgccgtggcctggtccaacaagtccgatttcgcctgcgccaacgccttcaacaacagcattatccccgaggacacattcttcccaagccccgagagcagctgcgacgtgaagctggtggaaaagagcttcgagacagacaccaacctgaacttccagaacctgagcgtgatcggcttcagaatcctgctgctgaaagtggccggctttaacctgctgatgaccctgcggctgtggtccagc

SEQ ID NO: 39679 - DNA, 1884 bp, synthetic construct
  source 1..1884: mol_type = other DNA
atggccttaccagtgaccgccttgctcctgccgctggccttgctgctccacgccgccaggccggagatcgtgctgacacagtctcccgccacactgtcactgtctccaggcgaaagagccacactgagctgtagagccagccagagcgtgtcctcttacctggcctggtatcagcagaagcctggacaggctccccggctgctgatctacgatgccagcaatagagccacaggcatccccgccagattttctggctctggcagcggcaccgatttcaccctgaccataagcagcctggaacctgaggacttcgccgtgtactactgccagcagagaagcgactggcccctgacatttggcggcggaacaaaggtggaaatcaaactcgaggacaagcagctggacgccgacgtgtcccccaagcctaccatcttcctgccctctatcgccgagacaaagctccagaaggccggcacctacctgtgcctgctggaaaagttcttcccagatgtgattaagatccactggcaggaaaagaagtccaacaccatcctgggcagccaggaaggcaacaccatgaagaccaacgacacctacatgaagttcagctggctgaccgtgcccgagaagtccctggacaaagaacacagatgcatcgtgcggcacgaaaacaacaagaacggcgtggaccaggaaatcatcttcccacccatcaagaccgatgtgattacaatggaccccaaggacaactgctccaaggacgccaacgataccctgctgctccagctgaccaacaccagcgcctactacatgtacttgttgctgctgctgaagtccgtggtgtacttcgccatcatcacatgctgcctgctgcggagaaccgccttctgctgcaacggcgagaagtctagggccaagcgatctggatctggagcaacaaacttctcactactcaaacaagcaggtgacgtggaggagaatcccgggcctactagtatggactggatttggcgcatccttttccttgtcggcgctgctaccggcgcgcattccttcgaacaagttcagctggttcagagcggagccgaagtgaagaaacctggcagcagcgtgaaggtgtcctgcaaagcaagcggcggcacctttagctcctacgccatccactgggttcgacaggcaccaggacaaggactggaatggatgggcagaatcatccccatcgagggcagagcctactacgcccagaaattccagggcagagtgaccatcaccgccgacgagtctacaagcaccgcctacatggaactgagcagcctgagaagcgaggataccgctgtgtactattgcgccagaggccggtacagctacagatattggttcgactactggggccagggcaccctggttacagtctcttctacgcgtagccagcctcacaccaagcccagcgtgttcgtgatgaagaacggcaccaacgtggcctgcctcgtgaaagagttctaccccaaggacatcaggatcaacctggtgtccagcaagaagatcaccgagttcgaccccgccatcgtgatctcccccagcggcaagtacaacgccgtgaagctggggaagtacgaggacagcaacagcgtgacctgctccgtgcagcacgacaacaagaccgtgcacagcaccgactttgaagtgaaaaccgactccaccgaccacgtgaagcccaaagagacagagaacaccaagcagcccagcaagagctgccacaagcccaaggccatcgtgcacaccgagaaagtgaacatgatgagcctgaccgtgctgggcctgcggatgctgttcgccaaaaccgtggccgtgaacttcctgctgaccgccaagctgttcttcctc

SEQ ID NO: 39680 - DNA, 1884 bp, synthetic construct
  source 1..1884: mol_type = other DNA
atggccttaccagtgaccgccttgctcctgccgctggccttgctgctccacgccgccaggccggagatcgtgctgacacagtctcccgccacactgtcactgtctccaggcgaaagagccacactgagctgtagagccagccagagcgtgtcctcttacctggcctggtatcagcagaagcctggacaggctccccggctgctgatctacgatgccagcaatagagccacaggcatccccgccagattttctggctctggcagcggcaccgatttcaccctgaccataagcagcctggaacctgaggacttcgccgtgtactactgccagcagagaagcgactggcccctgacatttggcggcggaacaaaggtggaaatcaaactcgagagccagcctcacaccaagcccagcgtgttcgtgatgaagaacggcaccaacgtggcctgcctcgtgaaagagttctaccccaaggacatcaggatcaacctggtgtccagcaagaagatcaccgagttcgaccccgccatcgtgatctcccccagcggcaagtacaacgccgtgaagctggggaagtacgaggacagcaacagcgtgacctgctccgtgcagcacgacaacaagaccgtgcacagcaccgactttgaagtgaaaaccgactccaccgaccacgtgaagcccaaagagacagagaacaccaagcagcccagcaagagctgccacaagcccaaggccatcgtgcacaccgagaaagtgaacatgatgagcctgaccgtgctgggcctgcggatgctgttcgccaaaaccgtggccgtgaacttcctgctgaccgccaagctgttcttcctcagggccaagcgatctggatctggagcaacaaacttctcactactcaaacaagcaggtgacgtggaggagaatcccgggcctactagtatggactggatttggcgcatccttttccttgtcggcgctgctaccggcgcgcattccttcgaacaagttcagctggttcagagcggagccgaagtgaagaaacctggcagcagcgtgaaggtgtcctgcaaagcaagcggcggcacctttagctcctacgccatccactgggttcgacaggcaccaggacaaggactggaatggatgggcagaatcatccccatcgagggcagagcctactacgcccagaaattccagggcagagtgaccatcaccgccgacgagtctacaagcaccgcctacatggaactgagcagcctgagaagcgaggataccgctgtgtactattgcgccagaggccggtacagctacagatattggttcgactactggggccagggcaccctggttacagtctcttctacgcgtgacaagcagctggacgccgacgtgtcccccaagcctaccatcttcctgccctctatcgccgagacaaagctccagaaggccggcacctacctgtgcctgctggaaaagttcttcccagatgtgattaagatccactggcaggaaaagaagtccaacaccatcctgggcagccaggaaggcaacaccatgaagaccaacgacacctacatgaagttcagctggctgaccgtgcccgagaagtccctggacaaagaacacagatgcatcgtgcggcacgaaaacaacaagaacggcgtggaccaggaaatcatcttcccacccatcaagaccgatgtgattacaatggaccccaaggacaactgctccaaggacgccaacgataccctgctgctccagctgaccaacaccagcgcctactacatgtacttgttgctgctgctgaagtccgtggtgtacttcgccatcatcacatgctgcctgctgcggagaaccgccttctgctgcaacggcgagaagtct

SEQ ID NO: 39681 - DNA, 1929 bp, synthetic construct
  source 1..1929: mol_type = other DNA
atggccttaccagtgaccgccttgctcctgccgctggccttgctgctccacgccgccaggccgctcgaggacaagcagctggacgccgacgtgtcccccaagcctaccatcttcctgccctctatcgccgagacaaagctccagaaggccggcacctacctgtgcctgctggaaaagttcttcccagatgtgattaagatccactggcaggaaaagaagtccaacaccatcctgggcagccaggaaggcaacaccatgaagaccaacgacacctacatgaagttcagctggctgaccgtgcccgagaagtccctggacaaagaacacagatgcatcgtgcggcacgaaaacaacaagaacggcgtggaccaggaaatcatcttcccacccatcaagaccgatgtgattacaatggaccccaaggacaactgctccaaggacgccaacgataccctgctgctccagctgaccaacaccagcgcctactacatgtacttgttgctgctgctgaagtccgtggtgtacttcgccatcatcacatgctgcctgctgcggagaaccgccttctgctgcaacggcgagaagtctagggccaagcgatctggatctggagcaacaaacttctcactactcaaacaagcaggtgacgtggaggagaatcccgggcctactagcatggccttaccagtgaccgccttgctcctgccgctggccttgctgctccacgccgccaggccggagatcgtgctgacacagtctcccgccacactgtcactgtctccaggcgaaagagccacactgagctgtagagccagccagagcgtgtcctcttacctggcctggtatcagcagaagcctggacaggctccccggctgctgatctacgatgccagcaatagagccacaggcatccccgccagattttctggctctggcagcggcaccgatttcaccctgaccataagcagcctggaacctgaggacttcgccgtgtactactgccagcagagaagcgactggcccctgacatttggcggcggaacaaaggtggaaatcaaaggcggaggcggaagtggaggcggaggatctggcggcggaggctctcaagttcagctggttcagagcggagccgaagtgaagaaacctggcagcagcgtgaaggtgtcctgcaaagcaagcggcggcacctttagctcctacgccatccactgggttcgacaggcaccaggacaaggactggaatggatgggcagaatcatccccatcgagggcagagcctactacgcccagaaattccagggcagagtgaccatcaccgccgacgagtctacaagcaccgcctacatggaactgagcagcctgagaagcgaggataccgctgtgtactattgcgccagaggccggtacagctacagatattggttcgactactggggccagggcaccctggttacagtctcttctacgcgtagccagcctcacaccaagcccagcgtgttcgtgatgaagaacggcaccaacgtggcctgcctcgtgaaagagttctaccccaaggacatcaggatcaacctggtgtccagcaagaagatcaccgagttcgaccccgccatcgtgatctcccccagcggcaagtacaacgccgtgaagctggggaagtacgaggacagcaacagcgtgacctgctccgtgcagcacgacaacaagaccgtgcacagcaccgactttgaagtgaaaaccgactccaccgaccacgtgaagcccaaagagacagagaacaccaagcagcccagcaagagctgccacaagcccaaggccatcgtgcacaccgagaaagtgaacatgatgagcctgaccgtgctgggcctgcggatgctgttcgccaaaaccgtggccgtgaacttcctgctgaccgccaagctgttcttcctc

SEQ ID NO: 39682 - DNA, 2391 bp, synthetic construct
  source 1..2391: mol_type = other DNA
atggccttaccagtgaccgccttgctcctgccgctggccttgctgctccacgccgccaggccggagatcgtgctgacacagtctcccgccacactgtcactgtctccaggcgaaagagccacactgagctgtagagccagccagagcgtgtcctcttacctggcctggtatcagcagaagcctggacaggctccccggctgctgatctacgatgccagcaatagagccacaggcatccccgccagattttctggctctggcagcggcaccgatttcaccctgaccataagcagcctggaacctgaggacttcgccgtgtactactgccagcagagaagcgactggcccctgacatttggcggcggaacaaaggtggaaatcaaaggacagcctaaggccaatcctaccgtgacactgttccctccaagcagcgaagaactccaggccaacaaggccacacttgtgtgcctgatctccgacttctaccctggggctgtgacagtggcttggaaggccgatggatctcctgtgaaagccggcgtggaaaccaccaagccatccaagcagagcaacaacaaatacgccgccagctcctacctgagcctgacacctgagcagtggaagtcccacagatcctacagctgccaagtgacccacgaaggcagcaccgtggaaaagacagtggcccctacagagtgcagcggatcccagagcttcggcctgctggaccccaagctgtgctacctgctggatggcatcctgttcatctacggcgtgatcctgaccgccctgttcctgagagtgaagttcagcagaagcgccgacgcccctgcctaccagcagggacagaaccaactgtacaacgagctgaacctgggcagacgggaagagtacgacgtgctggacaagcggagaggcagggaccctgagatgggcggaaagccccagcggagaaagaacccccaggaaggactgtataacgaactccagaaagacaagatggccgaagcctacagcgagatcggcatgaagggcgagcggagaagaggcaagggccacgatggcctgtaccagggcctgagcaccgccaccaaggacacctatgacgccctgcacatgcaggccctgcctccaagaagggccaagcgatctggatctggagcaacaaacttctcactactcaaacaagcaggtgacgtggaggagaatcccgggcctactagtatggactggatttggcgcatccttttccttgtcggcgctgctaccggcgcgcattccttcgaacaagttcagctggttcagagcggagccgaagtgaagaaacctggcagcagcgtgaaggtgtcctgcaaagcaagcggcggcacctttagctcctacgccatccactgggttcgacaggcaccaggacaaggactggaatggatgggcagaatcatccccatcgagggcagagcctactacgcccagaaattccagggcagagtgaccatcaccgccgacgagtctacaagcaccgcctacatggaactgagcagcctgagaagcgaggataccgctgtgtactattgcgccagaggccggtacagctacagatattggttcgactactggggccagggcaccctggttacagtctcttctgcctctacaaagggaccctccgtgtttcctctggctcccagcagcaagtctacaagcggaggaacagccgctctgggctgcctggtcaaggattactttcccgagcctgtgaccgtgtcctggaatagcggagcactgacaagcggcgtgcacacctttccagccgtgctgcaaagcagcggcctgtactctctgagcagcgtggtcacagtgcctagctctagcctgggcacccagacctacatctgcaatgtgaaccacaagcctagcaacaccaaggtggacaagagagtggaacccaagagctgtggtacccagagttttgggttgttggaccctaaattgtgctatctgttggacggaatcctgttcatttacggagtgatcctgaccgcattgttcctgcgggttaagttttccagatccgcagacgcacccgcttaccaacaagggcagaaccaactctacaatgaacttaatttggggcggagggaagagtacgacgttctggacaaaaggaggggacgagatcccgagatgggcggaaagcctcagcgaaggaagaatccgcaagaggggctttataacgaactccagaaagataaaatggcagaagcctatagtgagattgggatgaagggagaaaggaggaggggtaaaggtcacgatgggttgtaccaaggattgagcacagccactaaagatacctatgatgcgctccacatgcaggccctgccgccaaga

SEQ ID NO: 39683 - DNA, 2448 bp, synthetic construct
  source 1..2448: mol_type = other DNA
atggccttaccagtgaccgccttgctcctgccgctggccttgctgctccacgccgccaggccggagatcgtgctgacacagtctcccgccacactgtcactgtctccaggcgaaagagccacactgagctgtagagccagccagagcgtgtcctcttacctggcctggtatcagcagaagcctggacaggctccccggctgctgatctacgatgccagcaatagagccacaggcatccccgccagattttctggctctggcagcggcaccgatttcaccctgaccataagcagcctggaacctgaggacttcgccgtgtactactgccagcagagaagcgactggcccctgacatttggcggcggaacaaaggtggaaatcaaactcgaggacctgaagaacgtgttcccacctgaggtggccgtgttcgagcctagcgaggccgagatcagccacacccagaaagccaccctcgtgtgcctggctaccggcttctaccccgaccatgtggaactgtcttggtgggtcaacggcaaagaggtgcacagcggcgtgtctaccgacccccagccactgaaagaacagcccgccctgaacgacagccggtactgcctgagcagcagactgagagtgtccgccaccttctggcagaacccccggaaccacttcagatgccaggtgcagttctacggcctgagcgagaacgacgagtggacccaggacagagccaagcccgtgacccagatcgtgtctgccgaagcctggggcagagccgattgcggatcccagagcttcggcctgctggaccccaagctgtgctacctgctggatggcatcctgttcatctacggcgtgatcctgaccgccctgttcctgagagtgaagttcagcagaagcgccgacgcccctgcctaccagcagggacagaaccaactgtacaacgagctgaacctgggcagacgggaagagtacgacgtgctggacaagcggagaggcagggaccctgagatgggcggaaagccccagcggagaaagaacccccaggaaggactgtataacgaactccagaaagacaagatggccgaagcctacagcgagatcggcatgaagggcgagcggagaagaggcaagggccacgatggcctgtaccagggcctgagcaccgccaccaaggacacctatgacgccctgcacatgcaggccctgcctccaagaagggccaagcgatctggatctggagcaacaaacttctcactactcaaacaagcaggtgacgtggaggagaatcccgggcctactagtatggactggatttggcgcatccttttccttgtcggcgctgctaccggcgcgcattccttcgaacaagttcagctggttcagagcggagccgaagtgaagaaacctggcagcagcgtgaaggtgtcctgcaaagcaagcggcggcacctttagctcctacgccatccactgggttcgacaggcaccaggacaaggactggaatggatgggcagaatcatccccatcgagggcagagcctactacgcccagaaattccagggcagagtgaccatcaccgccgacgagtctacaagcaccgcctacatggaactgagcagcctgagaagcgaggataccgctgtgtactattgcgccagaggccggtacagctacagatattggttcgactactggggccagggcaccctggttacagtctcttctacgcgtatccagaaccctgatcctgccgtgtaccagctgcgggatagcaagagcagcgacaagagcgtgtgtctgttcaccgacttcgacagccagaccaacgtgtcccagagcaaggactccgacgtgtacatcaccgataagaccgtgctggacatgcggagcatggacttcaagagcaactccgccgtggcctggtccaacaagtccgatttcgcctgcgccaacgccttcaacaacagcattatccccgaggacacattcttcccaagccccgagagcagctgcggtacccagagttttgggttgttggaccctaaattgtgctatctgttggacggaatcctgttcatttacggagtgatcctgaccgcattgttcctgcgggttaagttttccagatccgcagacgcacccgcttaccaacaagggcagaaccaactctacaatgaacttaatttggggcggagggaagagtacgacgttctggacaaaaggaggggacgagatcccgagatgggcggaaagcctcagcgaaggaagaatccgcaagaggggctttataacgaactccagaaagataaaatggcagaagcctatagtgagattgggatgaagggagaaaggaggaggggtaaaggtcacgatgggttgtaccaaggattgagcacagccactaaagatacctatgatgcgctccacatgcaggccctgccgccaaga

SEQ ID NO: 39684 - DNA, 2574 bp, synthetic construct
  source 1..2574: mol_type = other DNA
atggccttaccagtgaccgccttgctcctgccgctggccttgctgctccacgccgccaggccggagatcgtgctgacacagtctcccgccacactgtcactgtctccaggcgaaagagccacactgagctgtagagccagccagagcgtgtcctcttacctggcctggtatcagcagaagcctggacaggctccccggctgctgatctacgatgccagcaatagagccacaggcatccccgccagattttctggctctggcagcggcaccgatttcaccctgaccataagcagcctggaacctgaggacttcgccgtgtactactgccagcagagaagcgactggcccctgacatttggcggcggaacaaaggtggaaatcaaactcgaggaggacctgaagaacgtgttcccacctgaggtggccgtgttcgagcctagcgaggccgagatcagccacacccagaaagccaccctcgtgtgcctggctaccggcttctaccccgaccatgtggaactgtcttggtgggtcaacggcaaagaggtgcacagcggcgtgtctaccgacccccagccactgaaagaacagcccgccctgaacgacagccggtactgcctgagcagcagactgagagtgtccgccaccttctggcagaacccccggaaccacttcagatgccaggtgcagttctacggcctgagcgagaacgacgagtggacccaggacagagccaagcccgtgacccagatcgtgtctgccgaagcctggggcagagccgattgcggatcccagagcttcggcctgctggaccccaagctgtgctacctgctggatggcatcctgttcatctacggcgtgatcctgaccgccctgttcctgagagtgaagttcagcagaagcgccgacgcccctgcctaccagcagggacagaaccaactgtacaacgagctgaacctgggcagacgggaagagtacgacgtgctggacaagcggagaggcagggaccctgagatgggcggaaagccccagcggagaaagaacccccaggaaggactgtataacgaactccagaaagacaagatggccgaagcctacagcgagatcggcatgaagggcgagcggagaagaggcaagggccacgatggcctgtaccagggcctgagcaccgccaccaaggacacctatgacgccctgcacatgcaggccctgcctccaagaagggccaagcgatctggatctggagcaacaaacttctcactactcaaacaagcaggtgacgtggaggagaatcccgggcctactagtatggactggatttggcgcatccttttccttgtcggcgctgctaccggcgcgcattccttcgaacaagttcagctggttcagagcggagccgaagtgaagaaacctggcagcagcgtgaaggtgtcctgcaaagcaagcggcggcacctttagctcctacgccatccactgggttcgacaggcaccaggacaaggactggaatggatgggcagaatcatccccatcgagggcagagcctactacgcccagaaattccagggcagagtgaccatcaccgccgacgagtctacaagcaccgcctacatggaactgagcagcctgagaagcgaggataccgctgtgtactattgcgccagaggccggtacagctacagatattggttcgactactggggccagggcaccctggttacagtctcttctacgcgtatccagaaccctgatcctgccgtgtaccagctgcgggatagcaagagcagcgacaagagcgtgtgtctgttcaccgacttcgacagccagaccaacgtgtcccagagcaaggactccgacgtgtacatcaccgataagaccgtgctggacatgcggagcatggacttcaagagcaactccgccgtggcctggtccaacaagtccgatttcgcctgcgccaacgccttcaacaacagcattatccccgaggacacattcttcccaagccccgagagcagctgcggtacccagagttttgggttgttggaccctaaattgtgctatctgttggacggaatcctgttcatttacggagtgatcctgaccgcattgttcctgaggagcaagcggtcacggctgctccacagcgattacatgaatatgacaccacgaagaccgggtcctactcgcaaacactaccaaccctacgcacctccccgcgactttgcagcgtaccgatctcgggttaagttttccagatccgcagacgcacccgcttaccaacaagggcagaaccaactctacaatgaacttaatttggggcggagggaagagtacgacgttctggacaaaaggaggggacgagatcccgagatgggcggaaagcctcagcgaaggaagaatccgcaagaggggctttataacgaactccagaaagataaaatggcagaagcctatagtgagattgggatgaagggagaaaggaggaggggtaaaggtcacgatgggttgtaccaaggattgagcacagccactaaagatacctatgatgcgctccacatgcaggccctgccgccaaga

SEQ ID NO: 39685 - DNA, 2703 bp, synthetic construct
  source 1..2703: mol_type = other DNA
atggccttaccagtgaccgccttgctcctgccgctggccttgctgctccacgccgccaggccggagatcgtgctgacacagtctcccgccacactgtcactgtctccaggcgaaagagccacactgagctgtagagccagccagagcgtgtcctcttacctggcctggtatcagcagaagcctggacaggctccccggctgctgatctacgatgccagcaatagagccacaggcatccccgccagattttctggctctggcagcggcaccgatttcaccctgaccataagcagcctggaacctgaggacttcgccgtgtactactgccagcagagaagcgactggcccctgacatttggcggcggaacaaaggtggaaatcaaactcgaggaggacctgaagaacgtgttcccacctgaggtggccgtgttcgagcctagcgaggccgagatcagccacacccagaaagccaccctcgtgtgcctggctaccggcttctaccccgaccatgtggaactgtcttggtgggtcaacggcaaagaggtgcacagcggcgtgtctaccgacccccagccactgaaagaacagcccgccctgaacgacagccggtactgcctgagcagcagactgagagtgtccgccaccttctggcagaacccccggaaccacttcagatgccaggtgcagttctacggcctgagcgagaacgacgagtggacccaggacagagccaagcccgtgacccagatcgtgtctgccgaagcctggggcagagccgattgcggatcccagagcttcggcctgctggaccccaagctgtgctacctgctggatggcatcctgttcatctacggcgtgatcctgaccgccctgttcctgaaacggggcagaaagaaactcctgtatatattcaaacaaccatttatgagaccagtacaaactactcaagaggaagatggctgtagctgccgatttccagaagaagaagaaggaggatgtgaactgagagtgaagttcagcagaagcgccgacgcccctgcctaccagcagggacagaaccaactgtacaacgagctgaacctgggcagacgggaagagtacgacgtgctggacaagcggagaggcagggaccctgagatgggcggaaagccccagcggagaaagaacccccaggaaggactgtataacgaactccagaaagacaagatggccgaagcctacagcgagatcggcatgaagggcgagcggagaagaggcaagggccacgatggcctgtaccagggcctgagcaccgccaccaaggacacctatgacgccctgcacatgcaggccctgcctccaagaagggccaagcgatctggatctggagcaacaaacttctcactactcaaacaagcaggtgacgtggaggagaatcccgggcctactagtatggactggatttggcgcatccttttccttgtcggcgctgctaccggcgcgcattccttcgaacaagttcagctggttcagagcggagccgaagtgaagaaacctggcagcagcgtgaaggtgtcctgcaaagcaagcggcggcacctttagctcctacgccatccactgggttcgacaggcaccaggacaaggactggaatggatgggcagaatcatccccatcgagggcagagcctactacgcccagaaattccagggcagagtgaccatcaccgccgacgagtctacaagcaccgcctacatggaactgagcagcctgagaagcgaggataccgctgtgtactattgcgccagaggccggtacagctacagatattggttcgactactggggccagggcaccctggttacagtctcttctacgcgtatccagaaccctgatcctgccgtgtaccagctgcgggatagcaagagcagcgacaagagcgtgtgtctgttcaccgacttcgacagccagaccaacgtgtcccagagcaaggactccgacgtgtacatcaccgataagaccgtgctggacatgcggagcatggacttcaagagcaactccgccgtggcctggtccaacaagtccgatttcgcctgcgccaacgccttcaacaacagcattatccccgaggacacattcttcccaagccccgagagcagctgcggtacccagagttttgggttgttggaccctaaattgtgctatctgttggacggaatcctgttcatttacggagtgatcctgaccgcattgttcctgaagagaggccggaagaagctgctgtacatcttcaagcagcctttcatgcggcccgtgcagaccacccaggaagaggacggctgctcctgccggttccccgaggaagaagaaggcggctgcgagctgcgggttaagttttccagatccgcagacgcacccgcttaccaacaagggcagaaccaactctacaatgaacttaatttggggcggagggaagagtacgacgttctggacaaaaggaggggacgagatcccgagatgggcggaaagcctcagcgaaggaagaatccgcaagaggggctttataacgaactccagaaagataaaatggcagaagcctatagtgagattgggatgaagggagaaaggaggaggggtaaaggtcacgatgggttgtaccaaggattgagcacagccactaaagatacctatgatgcgctccacatgcaggccctgccgccaaga

SEQ ID NO: 39686 - DNA, 1764 bp, synthetic construct
  source 1..1764: mol_type = other DNA
atggccttaccagtgaccgccttgctcctgccgctggccttgctgctccacgccgccaggccggagatcgtgctgacacagtctcccgccacactgtcactgtctccaggcgaaagagccacactgagctgtagagccagccagagcgtgtcctcttacctggcctggtatcagcagaagcctggacaggctccccggctgctgatctacgatgccagcaatagagccacaggcatccccgccagattttctggctctggcagcggcaccgatttcaccctgaccataagcagcctggaacctgaggacttcgccgtgtactactgccagcagagaagcgactggcccctgacatttggcggcggaacaaaggtggaaatcaaactcgagcagagcttcggcctgctggaccccaagctgtgctacctgctggatggcatcctgttcatctacggcgtgatcctgaccgccctgttcctgagagtgaagttcagcagaagcgccgacgcccctgcctaccagcagggacagaaccaactgtacaacgagctgaacctgggcagacgggaagagtacgacgtgctggacaagcggagaggcagggaccctgagatgggcggaaagccccagcggagaaagaacccccaggaaggactgtataacgaactccagaaagacaagatggccgaagcctacagcgagatcggcatgaagggcgagcggagaagaggcaagggccacgatggcctgtaccagggcctgagcaccgccaccaaggacacctatgacgccctgcacatgcaggccctgcctccaagaagggccaagcgatctggatctggagcaacaaacttctcactactcaaacaagcaggtgacgtggaggagaatcccgggcctactagtatggactggatttggcgcatccttttccttgtcggcgctgctaccggcgcgcattccttcgaacaagttcagctggttcagagcggagccgaagtgaagaaacctggcagcagcgtgaaggtgtcctgcaaagcaagcggcggcacctttagctcctacgccatccactgggttcgacaggcaccaggacaaggactggaatggatgggcagaatcatccccatcgagggcagagcctactacgcccagaaattccagggcagagtgaccatcaccgccgacgagtctacaagcaccgcctacatggaactgagcagcctgagaagcgaggataccgctgtgtactattgcgccagaggccggtacagctacagatattggttcgactactggggccagggcaccctggttacagtctcttctacgcgtcagagttttgggttgttggaccctaaattgtgctatctgttggacggaatcctgttcatttacggagtgatcctgaccgcattgttcctgcgggttaagttttccagatccgcagacgcacccgcttaccaacaagggcagaaccaactctacaatgaacttaatttggggcggagggaagagtacgacgttctggacaaaaggaggggacgagatcccgagatgggcggaaagcctcagcgaaggaagaatccgcaagaggggctttataacgaactccagaaagataaaatggcagaagcctatagtgagattgggatgaagggagaaaggaggaggggtaaaggtcacgatgggttgtaccaaggattgagcacagccactaaagatacctatgatgcgctccacatgcaggccctgccgccaaga

SEQ ID NO: 39687 - DNA, 1938 bp, synthetic construct
  source 1..1938: mol_type = other DNA
atggccttaccagtgaccgccttgctcctgccgctggccttgctgctccacgccgccaggccggagatcgtgctgacacagtctcccgccacactgtcactgtctccaggcgaaagagccacactgagctgtagagccagccagagcgtgtcctcttacctggcctggtatcagcagaagcctggacaggctccccggctgctgatctacgatgccagcaatagagccacaggcatccccgccagattttctggctctggcagcggcaccgatttcaccctgaccataagcagcctggaacctgaggacttcgccgtgtactactgccagcagagaagcgactggcccctgacatttggcggcggaacaaaggtggaaatcaaactcgagggacagcctaaggccaatcctaccgtgacactgttccctccaagcagcgaagaactccaggccaacaaggccacacttgtgtgcctgatctccgacttctaccctggggctgtgacagtggcttggaaggccgatggatctcctgtgaaagccggcgtggaaaccaccaagccatccaagcagagcaacaacaaatacgccgccagctcctacctgagcctgacacctgagcagtggaagtcccacagatcctacagctgccaagtgacccacgaaggcagcaccgtggaaaagacagtggcccctacagagtgcagccccatcaagaccgatgtgattacaatggaccccaaggacaactgctccaaggacgccaacgataccctgctgctccagctgaccaacaccagcgcctactacatgtacttgttgctgctgctgaagtccgtggtgtacttcgccatcatcacatgctgcctgctgcggagaaccgccttctgctgcaacggcgagaagtctagggccaagcgatctggatctggagcaacaaacttctcactactcaaacaagcaggtgacgtggaggagaatcccgggcctactagtatggactggatttggcgcatccttttccttgtcggcgctgctaccggcgcgcattccttcgaacaagttcagctggttcagagcggagccgaagtgaagaaacctggcagcagcgtgaaggtgtcctgcaaagcaagcggcggcacctttagctcctacgccatccactgggttcgacaggcaccaggacaaggactggaatggatgggcagaatcatccccatcgagggcagagcctactacgcccagaaattccagggcagagtgaccatcaccgccgacgagtctacaagcaccgcctacatggaactgagcagcctgagaagcgaggataccgctgtgtactattgcgccagaggccggtacagctacagatattggttcgactactggggccagggcaccctggttacagtctcttctacgcgtgcctctacaaagggaccctccgtgtttcctctggctcccagcagcaagtctacaagcggaggaacagccgctctgggctgcctggtcaaggattactttcccgagcctgtgaccgtgtcctggaatagcggagcactgacaagcggcgtgcacacctttccagccgtgctgcaaagcagcggcctgtactctctgagcagcgtggtcacagtgcctagctctagcctgggcacccagacctacatctgcaatgtgaaccacaagcctagcaacaccaaggtggacaagagagtggaacccaagagctgtgaagtgaaaaccgactccaccgaccacgtgaagcccaaagagacagagaacaccaagcagcccagcaagagctgccacaagcccaaggccatcgtgcacaccgagaaagtgaacatgatgagcctgaccgtgctgggcctgcggatgctgttcgccaaaaccgtggccgtgaacttcctgctgaccgccaagctgttcttcctc

SEQ ID NO: 39688 - DNA, 1872 bp, synthetic construct
  source 1..1872: mol_type = other DNA
atggccttaccagtgaccgccttgctcctgccgctggccttgctgctccacgccgccaggccggagatcgtgctgacacagtctcccgccacactgtcactgtctccaggcgaaagagccacactgagctgtagagccagccagagcgtgtcctcttacctggcctggtatcagcagaagcctggacaggctccccggctgctgatctacgatgccagcaatagagccacaggcatccccgccagattttctggctctggcagcggcaccgatttcaccctgaccataagcagcctggaacctgaggacttcgccgtgtactactgccagcagagaagcgactggcccctgacatttggcggcggaacaaaggtggaaatcaaactcgagggacagcctaaggccaatcctaccgtgacactgttccctccaagcagcgaagaactccaggccaacaaggccacacttgtgtgcctgatctccgacttctaccctggggctgtgacagtggcttggaaggccgatggatctcctgtgaaagccggcgtggaaaccaccaagccatccaagcagagcaacaacaaatacgccgccagctcctacctgagcctgacacctgagcagtggaagtcccacagatcctacagctgccaagtgacccacgaaggcagcaccgtggaaaagacagtggcccctacagagtgcagcggcagagccgattgcggcatcaccagcgccagctaccaccagggcgtgctgagcgccaccatcctgtacgagatcctgctgggcaaggccaccctgtacgccgtgctggtgtctgccctggtgctgatggctatggtcaagcggaaggacagccggggaagggccaagcgatctggatctggagcaacaaacttctcactactcaaacaagcaggtgacgtggaggagaatcccgggcctactagtatggactggatttggcgcatccttttccttgtcggcgctgctaccggcgcgcattccttcgaacaagttcagctggttcagagcggagccgaagtgaagaaacctggcagcagcgtgaaggtgtcctgcaaagcaagcggcggcacctttagctcctacgccatccactgggttcgacaggcaccaggacaaggactggaatggatgggcagaatcatccccatcgagggcagagcctactacgcccagaaattccagggcagagtgaccatcaccgccgacgagtctacaagcaccgcctacatggaactgagcagcctgagaagcgaggataccgctgtgtactattgcgccagaggccggtacagctacagatattggttcgactactggggccagggcaccctggttacagtctcttctacgcgtgcctctacaaagggaccctccgtgtttcctctggctcccagcagcaagtctacaagcggaggaacagccgctctgggctgcctggtcaaggattactttcccgagcctgtgaccgtgtcctggaatagcggagcactgacaagcggcgtgcacacctttccagccgtgctgcaaagcagcggcctgtactctctgagcagcgtggtcacagtgcctagctctagcctgggcacccagacctacatctgcaatgtgaaccacaagcctagcaacaccaaggtggacaagagagtggaacccaagagctgtatccccgaggacacattcttcccaagcagcgacgtgccctgcgacgtgaagctggtggaaaagagcttcgagacagacaccaacctgaacttccagaacctgagcgtgatcggcttcagaatcctgctgctgaaagtggccggctttaacctgctgatgaccctgcggctgtggtccagc

SEQ ID NO: 39689 - DNA, 1872 bp, synthetic construct
  source 1..1872: mol_type = other DNA
atggccttaccagtgaccgccttgctcctgccgctggccttgctgctccacgccgccaggccggagatcgtgctgacacagtctcccgccacactgtcactgtctccaggcgaaagagccacactgagctgtagagccagccagagcgtgtcctcttacctggcctggtatcagcagaagcctggacaggctccccggctgctgatctacgatgccagcaatagagccacaggcatccccgccagattttctggctctggcagcggcaccgatttcaccctgaccataagcagcctggaacctgaggacttcgccgtgtactactgccagcagagaagcgactggcccctgacatttggcggcggaacaaaggtggaaatcaaactcgagggacagcctaaggccaatcctaccgtgacactgttccctccaagcagcgaagaactccaggccaacaaggccacacttgtgtgcctgatctccgacttctaccctggggctgtgacagtggcttggaaggccgatggatctcctgtgaaagccggcgtggaaaccaccaagccatccaagcagagcaacaacaaatacgccgccagctcctacctgagcctgacacctgagcagtggaagtcccacagatcctacagctgccaagtgacccacgaaggcagcaccgtggaaaagacagtggcccctacagagtgcagcggcagagccgattgcggctttaccagcgagagctaccagcagggcgtgctgagcgccaccatcctgtacgagatcctgctgggcaaggccaccctgtacgccgtgctggtgtctgccctggtgctgatggctatggtcaagcggaaggacagccggggaagggccaagcgatctggatctggagcaacaaacttctcactactcaaacaagcaggtgacgtggaggagaatcccgggcctactagtatggactggatttggcgcatccttttccttgtcggcgctgctaccggcgcgcattccttcgaacaagttcagctggttcagagcggagccgaagtgaagaaacctggcagcagcgtgaaggtgtcctgcaaagcaagcggcggcacctttagctcctacgccatccactgggttcgacaggcaccaggacaaggactggaatggatgggcagaatcatccccatcgagggcagagcctactacgcccagaaattccagggcagagtgaccatcaccgccgacgagtctacaagcaccgcctacatggaactgagcagcctgagaagcgaggataccgctgtgtactattgcgccagaggccggtacagctacagatattggttcgactactggggccagggcaccctggttacagtctcttctacgcgtgcctctacaaagggaccctccgtgtttcctctggctcccagcagcaagtctacaagcggaggaacagccgctctgggctgcctggtcaaggattactttcccgagcctgtgaccgtgtcctggaatagcggagcactgacaagcggcgtgcacacctttccagccgtgctgcaaagcagcggcctgtactctctgagcagcgtggtcacagtgcctagctctagcctgggcacccagacctacatctgcaatgtgaaccacaagcctagcaacaccaaggtggacaagagagtggaacccaagagctgtatccccgaggacacattcttcccaagccccgagagcagctgcgacgtgaagctggtggaaaagagcttcgagacagacaccaacctgaacttccagaacctgagcgtgatcggcttcagaatcctgctgctgaaagtggccggctttaacctgctgatgaccctgcggctgtggtccagc

SEQ ID NO: 39690 - DNA, 1350 bp, synthetic construct
  source 1..1350: mol_type = other DNA
atggccttaccagtgaccgccttgctcctgccgctggccttgctgctccacgccgccaggccggagatcgtgctgacacagtctcccgccacactgtcactgtctccaggcgaaagagccacactgagctgtagagccagccagagcgtgtcctcttacctggcctggtatcagcagaagcctggacaggctccccggctgctgatctacgatgccagcaatagagccacaggcatccccgccagattttctggctctggcagcggcaccgatttcaccctgaccataagcagcctggaacctgaggacttcgccgtgtactactgccagcagagaagcgactggcccctgacatttggcggcggaacaaaggtggaaatcaaaggcggaggcggaagtggaggcggaggatctggcggcggaggctctcaagttcagctggttcagagcggagccgaagtgaagaaacctggcagcagcgtgaaggtgtcctgcaaagcaagcggcggcacctttagctcctacgccatccactgggttcgacaggcaccaggacaaggactggaatggatgggcagaatcatccccatcgagggcagagcctactacgcccagaaattccagggcagagtgaccatcaccgccgacgagtctacaagcaccgcctacatggaactgagcagcctgagaagcgaggataccgctgtgtactattgcgccagaggccggtacagctacagatattggttcgactactggggccagggcaccctggttacagtctcttctacgcgtgacggtaacgaggagatgggaggaatcactcaaaccccttacaaagtctcaatttcaggaacaactgttatccttacatgtccccagtatcctggcagcgagatcctttggcagcataacgacaagaatatagggggagatgaagacgataagaatatcggatctgacgaggatcacttgagcctgaaagagttctccgagcttgaacaaagcggatattatgtgtgctatccgcgcgggtcaaagccggaagacgctaacttttacctttatctccgagccagagtgtgcgaaaattgcatggaaatggacgttatgtccgttgctacaatagttatcgtagatatatgcatcacgggtggactgcttctgctggtttattattggtccaagaatagaaaggccaaagctaaacccgtgaccagaggcgctggcgcaggcggaaggcaaaggggacaaaacaaagaacggccaccaccagtgccaaatccagattatgagcctattcggaaaggacagagggacctgtactctggcctgaatcagagaagaatc

SEQ ID NO: 39691 - DNA, 1245 bp, synthetic construct
  source 1..1245: mol_type = other DNA
atggccttaccagtgaccgccttgctcctgccgctggccttgctgctccacgccgccaggccggagatcgtgctgacacagtctcccgccacactgtcactgtctccaggcgaaagagccacactgagctgtagagccagccagagcgtgtcctcttacctggcctggtatcagcagaagcctggacaggctccccggctgctgatctacgatgccagcaatagagccacaggcatccccgccagattttctggctctggcagcggcaccgatttcaccctgaccataagcagcctggaacctgaggacttcgccgtgtactactgccagcagagaagcgactggcccctgacatttggcggcggaacaaaggtggaaatcaaaggcggaggcggaagtggaggcggaggatctggcggcggaggctctcaagttcagctggttcagagcggagccgaagtgaagaaacctggcagcagcgtgaaggtgtcctgcaaagcaagcggcggcacctttagctcctacgccatccactgggttcgacaggcaccaggacaaggactggaatggatgggcagaatcatccccatcgagggcagagcctactacgcccagaaattccagggcagagtgaccatcaccgccgacgagtctacaagcaccgcctacatggaactgagcagcctgagaagcgaggataccgctgtgtactattgcgccagaggccggtacagctacagatattggttcgactactggggccagggcaccctggttacagtctcttctacgcgtttcaagatccccatcgaggaactggaagatcgggtgttcgtgaactgcaacacctctatcacctgggtggaaggcaccgtgggaacactgctgagcgacatcaccagactggacctcggcaagcggattctggaccctcggggcatctacagatgcaacggcaccgacatctacaaggacaaagaaagcaccgtgcaggtccactacagaatgtgccagtcctgcgtggaactggaccctgctacagtggccggcatcatcgtgaccgatgtgatcgctactctgctgctggctctgggagtgttctgcttcgccggacacgaaacaggcagactgtctggcgctgccgatacacaggccctgctgagaaacgaccaagtgtatcagcccctgcgcgacagagatgatgcccagtattctcacctcggcggcaactgggctagaaacaag

SEQ ID NO: 39692 - DNA, 1275 bp, synthetic construct
  source 1..1275: mol_type = other DNA
atggccttaccagtgaccgccttgctcctgccgctggccttgctgctccacgccgccaggccggagatcgtgctgacacagtctcccgccacactgtcactgtctccaggcgaaagagccacactgagctgtagagccagccagagcgtgtcctcttacctggcctggtatcagcagaagcctggacaggctccccggctgctgatctacgatgccagcaatagagccacaggcatccccgccagattttctggctctggcagcggcaccgatttcaccctgaccataagcagcctggaacctgaggacttcgccgtgtactactgccagcagagaagcgactggcccctgacatttggcggcggaacaaaggtggaaatcaaaggcggaggcggaagtggaggcggaggatctggcggcggaggctctcaagttcagctggttcagagcggagccgaagtgaagaaacctggcagcagcgtgaaggtgtcctgcaaagcaagcggcggcacctttagctcctacgccatccactgggttcgacaggcaccaggacaaggactggaatggatgggcagaatcatccccatcgagggcagagcctactacgcccagaaattccagggcagagtgaccatcaccgccgacgagtctacaagcaccgcctacatggaactgagcagcctgagaagcgaggataccgctgtgtactattgcgccagaggccggtacagctacagatattggttcgactactggggccagggcaccctggttacagtctcttctacgcgtcagagcatcaagggcaaccacctggtcaaggtgtacgactaccaagaggacggcagcgtgctgctgacatgtgatgccgaggccaagaacatcacctggtttaaggacggcaagatgatcggcttcctgaccgaggacaagaagaagtggaacctgggcagcaacgctaaggaccccagaggcatgtatcagtgcaagggcagccagaacaagagcaagcccctccaggtgtactaccggatgtgccagaactgcatcgagctgaacgccgctaccatcagcggctttctgttcgccgagatcgtgtccatcttcgtgctggccgtgggcgtgtactttatcgctggacaggatggcgtgcggcagagcagagcttccgataagcaaaccctgctgcctaacgaccagctgtaccagcctctgaaggacagagaggacgaccagtacagccacctccagggcaatcagctgagaagaaac

SEQ ID NO: 39693 - DNA, 1224 bp, synthetic construct
  source 1..1224: mol_type = other DNA
atggccttaccagtgaccgccttgctcctgccgctggccttgctgctccacgccgccaggccggagatcgtgctgacacagtctcccgccacactgtcactgtctccaggcgaaagagccacactgagctgtagagccagccagagcgtgtcctcttacctggcctggtatcagcagaagcctggacaggctccccggctgctgatctacgatgccagcaatagagccacaggcatccccgccagattttctggctctggcagcggcaccgatttcaccctgaccataagcagcctggaacctgaggacttcgccgtgtactactgccagcagagaagcgactggcccctgacatttggcggcggaacaaaggtggaaatcaaaggcggaggcggaagtggaggcggaggatctggcggcggaggctctcaagttcagctggttcagagcggagccgaagtgaagaaacctggcagcagcgtgaaggtgtcctgcaaagcaagcggcggcacctttagctcctacgccatccactgggttcgacaggcaccaggacaaggactggaatggatgggcagaatcatccccatcgagggcagagcctactacgcccagaaattccagggcagagtgaccatcaccgccgacgagtctacaagcaccgcctacatggaactgagcagcctgagaagcgaggataccgctgtgtactattgcgccagaggccggtacagctacagatattggttcgactactggggccagggcaccctggttacagtctcttctacgcgtcagagttttgggttgttggaccctaaattgtgctatctgttggacggaatcctgttcatttacggagtgatcctgaccgcattgttcctgcgggttaagttttccagatccgcagacgcacccgcttaccaacaagggcagaaccaactctacaatgaacttaatttggggcggagggaagagtacgacgttctggacaaaaggaggggacgagatcccgagatgggcggaaagcctcagcgaaggaagaatccgcaagaggggctttataacgaactccagaaagataaaatggcagaagcctatagtgagattgggatgaagggagaaaggaggaggggtaaaggtcacgatgggttgtaccaaggattgagcacagccactaaagatacctatgatgcgctccacatgcaggccctgccgccaaga

SEQ ID NO: 39694 - DNA, 1509 bp, synthetic construct
  source 1..1509: mol_type = other DNA
atggccttaccagtgaccgccttgctcctgccgctggccttgctgctccacgccgccaggccggagatcgtgctgacacagtctcccgccacactgtcactgtctccaggcgaaagagccacactgagctgtagagccagccagagcgtgtcctcttacctggcctggtatcagcagaagcctggacaggctccccggctgctgatctacgatgccagcaatagagccacaggcatccccgccagattttctggctctggcagcggcaccgatttcaccctgaccataagcagcctggaacctgaggacttcgccgtgtactactgccagcagagaagcgactggcccctgacatttggcggcggaacaaaggtggaaatcaaaggcggaggcggaagtggaggcggaggatctggcggcggaggctctcaagttcagctggttcagagcggagccgaagtgaagaaacctggcagcagcgtgaaggtgtcctgcaaagcaagcggcggcacctttagctcctacgccatccactgggttcgacaggcaccaggacaaggactggaatggatgggcagaatcatccccatcgagggcagagcctactacgcccagaaattccagggcagagtgaccatcaccgccgacgagtctacaagcaccgcctacatggaactgagcagcctgagaagcgaggataccgctgtgtactattgcgccagaggccggtacagctacagatattggttcgactactggggccagggcaccctggttacagtctcttctacgcgtggaatgaggactgaggatcttcccaaagctgtcgtctttctcgaaccccaatggtatcgggtgctcgaaaaagactctgtgacactgaaatgccaaggggcctactctcccgaggacaactccacacagtggtttcataatgagtccctcatcagctctcaggccagctcttatttcattgatgccgctacagtggacgactccggcgagtatcggtgtcagaccaatctgtctacactgtctgaccccgtgcagcttgaggtccacattggatggttgctcttgcaagccccacgctgggttttcaaagaggaagatccaatccatctgcggtgccacagctggaaaaacaccgctctccacaaagtcacatacctgcaaaatggcaaaggacgcaaatacttccatcacaattccgatttttacattccgaaggctaccctgaaagacagcggcagctatttctgccggggactcgtcggctccaagaatgtgtcctccgaaaccgtgaatatcacgattacccaaggactggctgtgcctacaatctctagcttctttccgcctggataccaagtctccttctgtcttgtgatggtcctcctgtttgctgtggacacaggactgtacttttccgtgaaaacgaacatccgcagctccacacgcgattggaaagatcacaagtttaaatggcgcaaagatccccaggacaag

SEQ ID NO: 39695 - DNA, 1434 bp, synthetic construct
  source 1..1434: mol_type = other DNA
atggccttaccagtgaccgccttgctcctgccgctggccttgctgctccacgccgccaggccggagatcgtgctgacacagtctcccgccacactgtcactgtctccaggcgaaagagccacactgagctgtagagccagccagagcgtgtcctcttacctggcctggtatcagcagaagcctggacaggctccccggctgctgatctacgatgccagcaatagagccacaggcatccccgccagattttctggctctggcagcggcaccgatttcaccctgaccataagcagcctggaacctgaggacttcgccgtgtactactgccagcagagaagcgactggcccctgacatttggcggcggaacaaaggtggaaatcaaaggcggaggcggaagtggaggcggaggatctggcggcggaggctctcaagttcagctggttcagagcggagccgaagtgaagaaacctggcagcagcgtgaaggtgtcctgcaaagcaagcggcggcacctttagctcctacgccatccactgggttcgacaggcaccaggacaaggactggaatggatgggcagaatcatccccatcgagggcagagcctactacgcccagaaattccagggcagagtgaccatcaccgccgacgagtctacaagcaccgcctacatggaactgagcagcctgagaagcgaggataccgctgtgtactattgcgccagaggccggtacagctacagatattggttcgactactggggccagggcaccctggttacagtctcttctacgcgtggaatgaggactgaggatcttcccaaagctgtcgtctttctcgaaccccaatggtatcgggtgctcgaaaaagactctgtgacactgaaatgccaaggggcctactctcccgaggacaactccacacagtggtttcataatgagtccctcatcagctctcaggccagctcttatttcattgatgccgctacagtggacgactccggcgagtatcggtgtcagaccaatctgtctacactgtctgaccccgtgcagcttgaggtccacattggatggttgctcttgcaagccccacgctgggttttcaaagaggaagatccaatccatctgcggtgccacagctggaaaaacaccgctctccacaaagtcacatacctgcaaaatggcaaaggacgcaaatacttccatcacaattccgatttttacattccgaaggctaccctgaaagacagcggcagctatttctgccggggactcgtcggctccaagaatgtgtcctccgaaaccgtgaatatcacgattacccaaggactggctgtgcctacaatctctagcttctttccgcctggataccaagtctccttctgtcttgtgatggtcctcctgtttgctgtggacacaggactgtacttttccgtg

SEQ ID NO: 39696 - DNA, 1437 bp, synthetic construct
  source 1..1437: mol_type = other DNA
atggccttaccagtgaccgccttgctcctgccgctggccttgctgctccacgccgccaggccggagatcgtgctgacacagtctcccgccacactgtcactgtctccaggcgaaagagccacactgagctgtagagccagccagagcgtgtcctcttacctggcctggtatcagcagaagcctggacaggctccccggctgctgatctacgatgccagcaatagagccacaggcatccccgccagattttctggctctggcagcggcaccgatttcaccctgaccataagcagcctggaacctgaggacttcgccgtgtactactgccagcagagaagcgactggcccctgacatttggcggcggaacaaaggtggaaatcaaaggcggaggcggaagtggaggcggaggatctggcggcggaggctctcaagttcagctggttcagagcggagccgaagtgaagaaacctggcagcagcgtgaaggtgtcctgcaaagcaagcggcggcacctttagctcctacgccatccactgggttcgacaggcaccaggacaaggactggaatggatgggcagaatcatccccatcgagggcagagcctactacgcccagaaattccagggcagagtgaccatcaccgccgacgagtctacaagcaccgcctacatggaactgagcagcctgagaagcgaggataccgctgtgtactattgcgccagaggccggtacagctacagatattggttcgactactggggccagggcaccctggttacagtctcttctacgcgtggaatgaggactgaggatcttcccaaagctgtcgtctttctcgaaccccaatggtatcgggtgctcgaaaaagactctgtgacactgaaatgccaaggggcctactctcccgaggacaactccacacagtggtttcataatgagtccctcatcagctctcaggccagctcttatttcattgatgccgctacagtggacgactccggcgagtatcggtgtcagaccaatctgtctacactgtctgaccccgtgcagcttgaggtccacattggatggttgctcttgcaagccccacgctgggttttcaaagaggaagatccaatccatctgcggtgccacagctggaaaaacaccgctctccacaaagtcacatacctgcaaaatggcaaaggacgcaaatacttccatcacaattccgatttttacattccgaaggctaccctgaaagacagcggcagctatttctgccggggactcgtcggctccaagaatgtgtcctccgaaaccgtgaatatcacgattacccaaggactggctgtgcctacaatctctagcttctttccgcctggataccaagtctccttctgtcttgtgatggtcctcctgtttgctgtggacacaggactgtacttttccgtgaaa

SEQ ID NO: 39697 - DNA, 2169 bp, synthetic construct
  source 1..2169: mol_type = other DNA
atggccttaccagtgaccgccttgctcctgccgctggccttgctgctccacgccgccaggccggagatcgtgctgacacagtctcccgccacactgtcactgtctccaggcgaaagagccacactgagctgtagagccagccagagcgtgtcctcttacctggcctggtatcagcagaagcctggacaggctccccggctgctgatctacgatgccagcaatagagccacaggcatccccgccagattttctggctctggcagcggcaccgatttcaccctgaccataagcagcctggaacctgaggacttcgccgtgtactactgccagcagagaagcgactggcccctgacatttggcggcggaacaaaggtggaaatcaaactcgagggacagcctaaggccaatcctaccgtgacactgttccctccaagcagcgaagaactccaggccaacaaggccacacttgtgtgcctgatctccgacttctaccctggggctgtgacagtggcttggaaggccgatggatctcctgtgaaagccggcgtggaaaccaccaagccatccaagcagagcaacaacaaatacgccgccagctcctacctgagcctgacacctgagcagtggaagtcccacagatcctacagctgccaagtgacccacgaaggcagcaccgtggaaaagacagtggcccctacagagtgcagcggatcccagagcttcggcctgctggaccccaagctgtgctacctgctggatggcatcctgttcatctacggcgtgatcctgaccgccctgttcctgagagtgaagttcagcagaagcgccgacgcccctgcctaccagcagggacagaaccaactgtacaacgagctgaacctgggcagacgggaagagtacgacgtgctggacaagcggagaggcagggaccctgagatgggcggaaagccccagcggagaaagaacccccaggaaggactgtataacgaactccagaaagacaagatggccgaagcctacagcgagatcggcatgaagggcgagcggagaagaggcaagggccacgatggcctgtaccagggcctgagcaccgccaccaaggacacctatgacgccctgcacatgcaggccctgcctccaagaagggccaagcgatctggatctggagcaacaaacttctcactactcaaacaagcaggtgacgtggaggagaatcccgggcctactagtatggactggatttggcgcatccttttccttgtcggcgctgctaccggcgcgcattccttcgaacaagttcagctggttcagagcggagccgaagtgaagaaacctggcagcagcgtgaaggtgtcctgcaaagcaagcggcggcacctttagctcctacgccatccactgggttcgacaggcaccaggacaaggactggaatggatgggcagaatcatccccatcgagggcagagcctactacgcccagaaattccagggcagagtgaccatcaccgccgacgagtctacaagcaccgcctacatggaactgagcagcctgagaagcgaggataccgctgtgtactattgcgccagaggccggtacagctacagatattggttcgactactggggccagggcaccctggttacagtctcttctacgcgtgcctctacaaagggaccctccgtgtttcctctggctcccagcagcaagtctacaagcggaggaacagccgctctgggctgcctggtcaaggattactttcccgagcctgtgaccgtgtcctggaatagcggagcactgacaagcggcgtgcacacctttccagccgtgctgcaaagcagcggcctgtactctctgagcagcgtggtcacagtgcctagctctagcctgggcacccagacctacatctgcaatgtgaaccacaagcctagcaacaccaaggtggacaagagagtggaacccaagagctgtggtaccatcactcaaggtttggcagtgtcaaccatctcatcattctttccacctggctaccaagtgtccttctgcctggtcatggtgctgctgttcgccgtggataccggcctgtacttcagcgtcaagaccaacatccggtccagcaccagagactggaaggaccacaagttcaagtggcggaaggaccctcaggacaag

SEQ ID NO: 39698 - DNA, 2214 bp, synthetic construct
  source 1..2214: mol_type = other DNA
atggccttaccagtgaccgccttgctcctgccgctggccttgctgctccacgccgccaggccggagatcgtgctgacacagtctcccgccacactgtcactgtctccaggcgaaagagccacactgagctgtagagccagccagagcgtgtcctcttacctggcctggtatcagcagaagcctggacaggctccccggctgctgatctacgatgccagcaatagagccacaggcatccccgccagattttctggctctggcagcggcaccgatttcaccctgaccataagcagcctggaacctgaggacttcgccgtgtactactgccagcagagaagcgactggcccctgacatttggcggcggaacaaaggtggaaatcaaactcgaggacctgaagaacgtgttcccacctgaggtggccgtgttcgagcctagcgaggccgagatcagccacacccagaaagccaccctcgtgtgcctggctaccggcttctaccccgaccatgtggaactgtcttggtgggtcaacggcaaagaggtgcacagcggcgtgtctaccgacccccagccactgaaagaacagcccgccctgaacgacagccggtactgcctgagcagcagactgagagtgtccgccaccttctggcagaacccccggaaccacttcagatgccaggtgcagttctacggcctgagcgagaacgacgagtggacccaggacagagccaagcccgtgacccagatcgtgtctgccgaagcctggggcagagccgattgcggatcccagagcttcggcctgctggaccccaagctgtgctacctgctggatggcatcctgttcatctacggcgtgatcctgaccgccctgttcctgagagtgaagttcagcagaagcgccgacgcccctgcctaccagcagggacagaaccaactgtacaacgagctgaacctgggcagacgggaagagtacgacgtgctggacaagcggagaggcagggaccctgagatgggcggaaagccccagcggagaaagaacccccaggaaggactgtataacgaactccagaaagacaagatggccgaagcctacagcgagatcggcatgaagggcgagcggagaagaggcaagggccacgatggcctgtaccagggcctgagcaccgccaccaaggacacctatgacgccctgcacatgcaggccctgcctccaagaagggccaagcgatctggatctggagcaacaaacttctcactactcaaacaagcaggtgacgtggaggagaatcccgggcctactagtatggactggatttggcgcatccttttccttgtcggcgctgctaccggcgcgcattccttcgaacaagttcagctggttcagagcggagccgaagtgaagaaacctggcagcagcgtgaaggtgtcctgcaaagcaagcggcggcacctttagctcctacgccatccactgggttcgacaggcaccaggacaaggactggaatggatgggcagaatcatccccatcgagggcagagcctactacgcccagaaattccagggcagagtgaccatcaccgccgacgagtctacaagcaccgcctacatggaactgagcagcctgagaagcgaggataccgctgtgtactattgcgccagaggccggtacagctacagatattggttcgactactggggccagggcaccctggttacagtctcttctacgcgtatccagaaccctgatcctgccgtgtaccagctgcgggatagcaagagcagcgacaagagcgtgtgtctgttcaccgacttcgacagccagaccaacgtgtcccagagcaaggactccgacgtgtacatcaccgataagaccgtgctggacatgcggagcatggacttcaagagcaactccgccgtggcctggtccaacaagtccgatttcgcctgcgccaacgccttcaacaacagcattatccccgaggacacattcttcccaagccccgagagcagctgcggtaccatcactcaaggtttggcagtgtcaaccatctcatcattctttccacctggctaccaagtgtccttctgcctggtcatggtgctgctgttcgccgtggataccggcctgtacttcagcgtcaagaccaacatccggtccagcaccagagactggaaggaccacaagttcaagtggcggaaggaccctcaggacaag

SEQ ID NO: 39699 - DNA, 2139 bp, synthetic construct
  source 1..2139: mol_type = other DNA
atggccttaccagtgaccgccttgctcctgccgctggccttgctgctccacgccgccaggccggagatcgtgctgacacagtctcccgccacactgtcactgtctccaggcgaaagagccacactgagctgtagagccagccagagcgtgtcctcttacctggcctggtatcagcagaagcctggacaggctccccggctgctgatctacgatgccagcaatagagccacaggcatccccgccagattttctggctctggcagcggcaccgatttcaccctgaccataagcagcctggaacctgaggacttcgccgtgtactactgccagcagagaagcgactggcccctgacatttggcggcggaacaaaggtggaaatcaaactcgaggacctgaagaacgtgttcccacctgaggtggccgtgttcgagcctagcgaggccgagatcagccacacccagaaagccaccctcgtgtgcctggctaccggcttctaccccgaccatgtggaactgtcttggtgggtcaacggcaaagaggtgcacagcggcgtgtctaccgacccccagccactgaaagaacagcccgccctgaacgacagccggtactgcctgagcagcagactgagagtgtccgccaccttctggcagaacccccggaaccacttcagatgccaggtgcagttctacggcctgagcgagaacgacgagtggacccaggacagagccaagcccgtgacccagatcgtgtctgccgaagcctggggcagagccgattgcggatcccagagcttcggcctgctggaccccaagctgtgctacctgctggatggcatcctgttcatctacggcgtgatcctgaccgccctgttcctgagagtgaagttcagcagaagcgccgacgcccctgcctaccagcagggacagaaccaactgtacaacgagctgaacctgggcagacgggaagagtacgacgtgctggacaagcggagaggcagggaccctgagatgggcggaaagccccagcggagaaagaacccccaggaaggactgtataacgaactccagaaagacaagatggccgaagcctacagcgagatcggcatgaagggcgagcggagaagaggcaagggccacgatggcctgtaccagggcctgagcaccgccaccaaggacacctatgacgccctgcacatgcaggccctgcctccaagaagggccaagcgatctggatctggagcaacaaacttctcactactcaaacaagcaggtgacgtggaggagaatcccgggcctactagtatggactggatttggcgcatccttttccttgtcggcgctgctaccggcgcgcattccttcgaacaagttcagctggttcagagcggagccgaagtgaagaaacctggcagcagcgtgaaggtgtcctgcaaagcaagcggcggcacctttagctcctacgccatccactgggttcgacaggcaccaggacaaggactggaatggatgggcagaatcatccccatcgagggcagagcctactacgcccagaaattccagggcagagtgaccatcaccgccgacgagtctacaagcaccgcctacatggaactgagcagcctgagaagcgaggataccgctgtgtactattgcgccagaggccggtacagctacagatattggttcgactactggggccagggcaccctggttacagtctcttctacgcgtatccagaaccctgatcctgccgtgtaccagctgcgggatagcaagagcagcgacaagagcgtgtgtctgttcaccgacttcgacagccagaccaacgtgtcccagagcaaggactccgacgtgtacatcaccgataagaccgtgctggacatgcggagcatggacttcaagagcaactccgccgtggcctggtccaacaagtccgatttcgcctgcgccaacgccttcaacaacagcattatccccgaggacacattcttcccaagccccgagagcagctgcggtaccatcactcaaggtttggcagtgtcaaccatctcatcattctttccacctggctaccaagtgtccttctgcctggtcatggtgctgctgttcgccgtggataccggcctgtacttcagcgtc

SEQ ID NO: 39700 - DNA, 2142 bp, synthetic construct
  source 1..2142: mol_type = other DNA
atggccttaccagtgaccgccttgctcctgccgctggccttgctgctccacgccgccaggccggagatcgtgctgacacagtctcccgccacactgtcactgtctccaggcgaaagagccacactgagctgtagagccagccagagcgtgtcctcttacctggcctggtatcagcagaagcctggacaggctccccggctgctgatctacgatgccagcaatagagccacaggcatccccgccagattttctggctctggcagcggcaccgatttcaccctgaccataagcagcctggaacctgaggacttcgccgtgtactactgccagcagagaagcgactggcccctgacatttggcggcggaacaaaggtggaaatcaaactcgaggacctgaagaacgtgttcccacctgaggtggccgtgttcgagcctagcgaggccgagatcagccacacccagaaagccaccctcgtgtgcctggctaccggcttctaccccgaccatgtggaactgtcttggtgggtcaacggcaaagaggtgcacagcggcgtgtctaccgacccccagccactgaaagaacagcccgccctgaacgacagccggtactgcctgagcagcagactgagagtgtccgccaccttctggcagaacccccggaaccacttcagatgccaggtgcagttctacggcctgagcgagaacgacgagtggacccaggacagagccaagcccgtgacccagatcgtgtctgccgaagcctggggcagagccgattgcggatcccagagcttcggcctgctggaccccaagctgtgctacctgctggatggcatcctgttcatctacggcgtgatcctgaccgccctgttcctgagagtgaagttcagcagaagcgccgacgcccctgcctaccagcagggacagaaccaactgtacaacgagctgaacctgggcagacgggaagagtacgacgtgctggacaagcggagaggcagggaccctgagatgggcggaaagccccagcggagaaagaacccccaggaaggactgtataacgaactccagaaagacaagatggccgaagcctacagcgagatcggcatgaagggcgagcggagaagaggcaagggccacgatggcctgtaccagggcctgagcaccgccaccaaggacacctatgacgccctgcacatgcaggccctgcctccaagaagggccaagcgatctggatctggagcaacaaacttctcactactcaaacaagcaggtgacgtggaggagaatcccgggcctactagtatggactggatttggcgcatccttttccttgtcggcgctgctaccggcgcgcattccttcgaacaagttcagctggttcagagcggagccgaagtgaagaaacctggcagcagcgtgaaggtgtcctgcaaagcaagcggcggcacctttagctcctacgccatccactgggttcgacaggcaccaggacaaggactggaatggatgggcagaatcatccccatcgagggcagagcctactacgcccagaaattccagggcagagtgaccatcaccgccgacgagtctacaagcaccgcctacatggaactgagcagcctgagaagcgaggataccgctgtgtactattgcgccagaggccggtacagctacagatattggttcgactactggggccagggcaccctggttacagtctcttctacgcgtatccagaaccctgatcctgccgtgtaccagctgcgggatagcaagagcagcgacaagagcgtgtgtctgttcaccgacttcgacagccagaccaacgtgtcccagagcaaggactccgacgtgtacatcaccgataagaccgtgctggacatgcggagcatggacttcaagagcaactccgccgtggcctggtccaacaagtccgatttcgcctgcgccaacgccttcaacaacagcattatccccgaggacacattcttcccaagccccgagagcagctgcggtaccatcactcaaggtttggcagtgtcaaccatctcatcattctttccacctggctaccaagtgtccttctgcctggtcatggtgctgctgttcgccgtggataccggcctgtacttcagcgtcaag

SEQ ID NO: 39701 - DNA, 2145 bp, synthetic construct
  source 1..2145: mol_type = other DNA
atggccttaccagtgaccgccttgctcctgccgctggccttgctgctccacgccgccaggccggagatcgtgctgacacagtctcccgccacactgtcactgtctccaggcgaaagagccacactgagctgtagagccagccagagcgtgtcctcttacctggcctggtatcagcagaagcctggacaggctccccggctgctgatctacgatgccagcaatagagccacaggcatccccgccagattttctggctctggcagcggcaccgatttcaccctgaccataagcagcctggaacctgaggacttcgccgtgtactactgccagcagagaagcgactggcccctgacatttggcggcggaacaaaggtggaaatcaaactcgaggacctgaagaacgtgttcccacctgaggtggccgtgttcgagcctagcgaggccgagatcagccacacccagaaagccaccctcgtgtgcctggctaccggcttctaccccgaccatgtggaactgtcttggtgggtcaacggcaaagaggtgcacagcggcgtgtctaccgacccccagccactgaaagaacagcccgccctgaacgacagccggtactgcctgagcagcagactgagagtgtccgccaccttctggcagaacccccggaaccacttcagatgccaggtgcagttctacggcctgagcgagaacgacgagtggacccaggacagagccaagcccgtgacccagatcgtgtctgccgaagcctggggcagagccgattgcggatcccagagcttcggcctgctggaccccaagctgtgctacctgctggatggcatcctgttcatctacggcgtgatcctgaccgccctgttcctgagagtgaagttcagcagaagcgccgacgcccctgcctaccagcagggacagaaccaactgtacaacgagctgaacctgggcagacgggaagagtacgacgtgctggacaagcggagaggcagggaccctgagatgggcggaaagccccagcggagaaagaacccccaggaaggactgtataacgaactccagaaagacaagatggccgaagcctacagcgagatcggcatgaagggcgagcggagaagaggcaagggccacgatggcctgtaccagggcctgagcaccgccaccaaggacacctatgacgccctgcacatgcaggccctgcctccaagaagggccaagcgatctggatctggagcaacaaacttctcactactcaaacaagcaggtgacgtggaggagaatcccgggcctactagtatggactggatttggcgcatccttttccttgtcggcgctgctaccggcgcgcattccttcgaacaagttcagctggttcagagcggagccgaagtgaagaaacctggcagcagcgtgaaggtgtcctgcaaagcaagcggcggcacctttagctcctacgccatccactgggttcgacaggcaccaggacaaggactggaatggatgggcagaatcatccccatcgagggcagagcctactacgcccagaaattccagggcagagtgaccatcaccgccgacgagtctacaagcaccgcctacatggaactgagcagcctgagaagcgaggataccgctgtgtactattgcgccagaggccggtacagctacagatattggttcgactactggggccagggcaccctggttacagtctcttctacgcgtatccagaaccctgatcctgccgtgtaccagctgcgggatagcaagagcagcgacaagagcgtgtgtctgttcaccgacttcgacagccagaccaacgtgtcccagagcaaggactccgacgtgtacatcaccgataagaccgtgctggacatgcggagcatggacttcaagagcaactccgccgtggcctggtccaacaagtccgatttcgcctgcgccaacgccttcaacaacagcattatccccgaggacacattcttcccaagccccgagagcagctgcggtaccatcactcaaggtttggcagtgtcaaccatctcatcattctttccacctggctaccaagtgtccttctgcctggtcatggtgctgctgttcgccgtggataccggcctgtacttcagcgtcaagacc

SEQ ID NO: 39702 - DNA, 1956 bp, synthetic construct
  source 1..1956: mol_type = other DNA
atggccttaccagtgaccgccttgctcctgccgctggccttgctgctccacgccgccaggccggagatcgtgctgacacagtctcccgccacactgtcactgtctccaggcgaaagagccacactgagctgtagagccagccagagcgtgtcctcttacctggcctggtatcagcagaagcctggacaggctccccggctgctgatctacgatgccagcaatagagccacaggcatccccgccagattttctggctctggcagcggcaccgatttcaccctgaccataagcagcctggaacctgaggacttcgccgtgtactactgccagcagagaagcgactggcccctgacatttggcggcggaacaaaggtggaaatcaaactcgagggacagcctaaggccaatcctaccgtgacactgttccctccaagcagcgaagaactccaggccaacaaggccacacttgtgtgcctgatctccgacttctaccctggggctgtgacagtggcttggaaggccgatggatctcctgtgaaagccggcgtggaaaccaccaagccatccaagcagagcaacaacaaatacgccgccagctcctacctgagcctgacacctgagcagtggaagtcccacagatcctacagctgccaagtgacccacgaaggcagcaccgtggaaaagacagtggcccctacagagtgcagcggatccctgggagagcctcagctgtgctatatcctggacgccatcctgtttctgtacggcatcgtgctgaccctgctgtactgccggctgaagatccaagtgcggaaggccgccatcaccagctacgagaaatccgacggcgtgtacaccggcctgagcaccagaaatcaagagacatacgagacactgaagcacgaaaagcctccacaaagggccaagcgatctggatctggagcaacaaacttctcactactcaaacaagcaggtgacgtggaggagaatcccgggcctactagtatggactggatttggcgcatccttttccttgtcggcgctgctaccggcgcgcattccttcgaacaagttcagctggttcagagcggagccgaagtgaagaaacctggcagcagcgtgaaggtgtcctgcaaagcaagcggcggcacctttagctcctacgccatccactgggttcgacaggcaccaggacaaggactggaatggatgggcagaatcatccccatcgagggcagagcctactacgcccagaaattccagggcagagtgaccatcaccgccgacgagtctacaagcaccgcctacatggaactgagcagcctgagaagcgaggataccgctgtgtactattgcgccagaggccggtacagctacagatattggttcgactactggggccagggcaccctggttacagtctcttctacgcgtgcctctacaaagggaccctccgtgtttcctctggctcccagcagcaagtctacaagcggaggaacagccgctctgggctgcctggtcaaggattactttcccgagcctgtgaccgtgtcctggaatagcggagcactgacaagcggcgtgcacacctttccagccgtgctgcaaagcagcggcctgtactctctgagcagcgtggtcacagtgcctagctctagcctgggcacccagacctacatctgcaatgtgaaccacaagcctagcaacaccaaggtggacaagagagtggaacccaagagctgtggtaccctcggagaaccacagctctgttacattctggatgctatcctgttcctctatgggatcgtcctgacactcctgtattgcagactcaaaattcaagttcgcaaagccgccattacctcttacgagaagagtgatggggtgtacacaggactgtctacccggaatcaagaaacctacgaaaccctcaaacatgagaagccacctcagtaa

SEQ ID NO: 39703 - DNA, 1863 bp, synthetic construct
  source 1..1863: mol_type = other DNA
atggccttaccagtgaccgccttgctcctgccgctggccttgctgctccacgccgccaggccggagatcgtgctgacacagtctcccgccacactgtcactgtctccaggcgaaagagccacactgagctgtagagccagccagagcgtgtcctcttacctggcctggtatcagcagaagcctggacaggctccccggctgctgatctacgatgccagcaatagagccacaggcatccccgccagattttctggctctggcagcggcaccgatttcaccctgaccataagcagcctggaacctgaggacttcgccgtgtactactgccagcagagaagcgactggcccctgacatttggcggcggaacaaaggtggaaatcaaactcgaggacctgaagaacgtgttcccacctgaggtggccgtgttcgagcctagcgaggccgagatcagccacacccagaaagccaccctcgtgtgcctggctaccggcttctaccccgaccatgtggaactgtcttggtgggtcaacggcaaagaggtgcacagcggcgtgtgtaccgacccccagccactgaaagaacagcccgccctgaacgacagccggtactgcctgagcagcagactgagagtgtccgccaccttctggcagaacccccggaaccacttcagatgccaggtgcagttctacggcctgagcgagaacgacgagtggacccaggacagagccaagcccgtgacccagatcgtgtctgccgaagcctggggcagagccgattgcggctttaccagcgagagctaccagcagggcgtgctgagcgcctactacatgtacttgttgctgctgctgaagtccgtggtgtacttcgccatcatcacatgctgcctgctgcggagaaccgccttctgctgcaacggcgagaagtctagggccaagcgatctggatctggagcaacaaacttctcactactcaaacaagcaggtgacgtggaggagaatcccgggcctactagtatggactggatttggcgcatccttttccttgtcggcgctgctaccggcgcgcattccttcgaacaagttcagctggttcagagcggagccgaagtgaagaaacctggcagcagcgtgaaggtgtcctgcaaagcaagcggcggcacctttagctcctacgccatccactgggttcgacaggcaccaggacaaggactggaatggatgggcagaatcatccccatcgagggcagagcctactacgcccagaaattccagggcagagtgaccatcaccgccgacgagtctacaagcaccgcctacatggaactgagcagcctgagaagcgaggataccgctgtgtactattgcgccagaggccggtacagctacagatattggttcgactactggggccagggcaccctggttacagtctcttctacgcgtatccagaaccctgatcctgccgtgtaccagctgcgggatagcaagagcagcgacaagagcgtgtgtctgttcaccgacttcgacagccagaccaacgtgtcccagagcaaggactccgacgtgtacatcaccgataagtgcgtgctggacatgcggagcatggacttcaagagcaactccgccgtggcctggtccaacaagtccgatttcgcctgcgccaacgccttcaacaacagcattatccccgaggacacattcttcccaagccccgagagcagctgcgacgtgaagctggtggaaaagagcttcgagacagacaccaacctgaacttccagaacctgagcgtgatcggcttcagaatcctgctgctgaaagtggccggctttaacctgctgatgaccctgcggctgtggtccagc

SEQ ID NO: 39704 - DNA, 1884 bp, synthetic construct
  source 1..1884: mol_type = other DNA
atggccttaccagtgaccgccttgctcctgccgctggccttgctgctccacgccgccaggccggagatcgtgctgacacagtctcccgccacactgtcactgtctccaggcgaaagagccacactgagctgtagagccagccagagcgtgtcctcttacctggcctggtatcagcagaagcctggacaggctccccggctgctgatctacgatgccagcaatagagccacaggcatccccgccagattttctggctctggcagcggcaccgatttcaccctgaccataagcagcctggaacctgaggacttcgccgtgtactactgccagcagagaagcgactggcccctgacatttggcggcggaacaaaggtggaaatcaaactcgaggacaagcagctggacgccgacgtgtcccccaagcctaccatcttcctgccctctatcgccgagacaaagctccagaaggccggcacctacctgtgcctgctggaaaagttcttcccagatgtgattaagatccactggcaggaaaagaagtccaacaccatcctgggcagccaggaaggcaacaccatgaagaccaacgacacctacatgaagttcagctggctgaccgtgcccgagaagtccctggacaaagaacacagatgcatcgtgcggcacgaaaacaacaagaacggcgtggaccaggaaatcatcttcccacccatcaagaccgatgtgattacaatggaccccaaggacaactgctccaaggacgccaacgataccctgctgctccagctgaccaacaccagcgcctactacatgtacgagatcctgctgggcaaggccaccctgtacgccgtgctggtgtctgccctggtgctgatggctatggtcaagcggaaggacagccggggaagggccaagcgatctggatctggagcaacaaacttctcactactcaaacaagcaggtgacgtggaggagaatcccgggcctactagtatggactggatttggcgcatccttttccttgtcggcgctgctaccggcgcgcattccttcgaacaagttcagctggttcagagcggagccgaagtgaagaaacctggcagcagcgtgaaggtgtcctgcaaagcaagcggcggcacctttagctcctacgccatccactgggttcgacaggcaccaggacaaggactggaatggatgggcagaatcatccccatcgagggcagagcctactacgcccagaaattccagggcagagtgaccatcaccgccgacgagtctacaagcaccgcctacatggaactgagcagcctgagaagcgaggataccgctgtgtactattgcgccagaggccggtacagctacagatattggttcgactactggggccagggcaccctggttacagtctcttctacgcgtagccagcctcacaccaagcccagcgtgttcgtgatgaagaacggcaccaacgtggcctgcctcgtgaaagagttctaccccaaggacatcaggatcaacctggtgtccagcaagaagatcaccgagttcgaccccgccatcgtgatctcccccagcggcaagtacaacgccgtgaagctggggaagtatgaggacagcaacagcgtgacctgctccgtgcagcacgacaacaagaccgtgcacagcaccgactttgaagtgaaaaccgactccaccgaccacgtgaagcccaaagagacagagaacaccaagcagcccagcaagagctgccacaagcccaaggccatcgtgcacaccgagaaagtgaacatgatgagcctgaccgtgatcggcttcagaatcctgctgctgaaagtggccggctttaacctgctgatgaccctgcggctgtggtccagctaa

SEQ ID NO: 39705 - DNA, 1884 bp, synthetic construct
  source 1..1884: mol_type = other DNA
atggccttaccagtgaccgccttgctcctgccgctggccttgctgctccacgccgccaggccggagatcgtgctgacacagtctcccgccacactgtcactgtctccaggcgaaagagccacactgagctgtagagccagccagagcgtgtcctcttacctggcctggtatcagcagaagcctggacaggctccccggctgctgatctacgatgccagcaatagagccacaggcatccccgccagattttctggctctggcagcggcaccgatttcaccctgaccataagcagcctggaacctgaggacttcgccgtgtactactgccagcagagaagcgactggcccctgacatttggcggcggaacaaaggtggaaatcaaactcgaggacaagcagctggacgccgacgtgtcccccaagcctaccatcttcctgccctctatcgccgagacaaagctccagaaggccggcacctacctgtgcctgctggaaaagttcttcccagatgtgattaagatccactggcaggaaaagaagtccaacaccatcctgggcagccaggaaggcaacaccatgaagaccaacgacacctacatgaagttcagctggctgaccgtgcccgagaagtccctggacaaagaacacagatgcatcgtgcggcacgaaaacaacaagaacggcgtggaccaggaaatcatcttcccacccatcaagaccgatgtgattacaatggaccccaaggacaactgctccaaggacgccaacgataccctgctgctccagctgaccaacaccagcgccaccatcctgtacgagatcctgctgggcaaggccaccctgtacgccgtgctggtgtctgccctggtgctgatggctatggtcaagcggaaggacagccggggaagggccaagcgatctggatctggagcaacaaacttctcactactcaaacaagcaggtgacgtggaggagaatcccgggcctactagtatggactggatttggcgcatccttttccttgtcggcgctgctaccggcgcgcattccttcgaacaagttcagctggttcagagcggagccgaagtgaagaaacctggcagcagcgtgaaggtgtcctgcaaagcaagcggcggcacctttagctcctacgccatccactgggttcgacaggcaccaggacaaggactggaatggatgggcagaatcatccccatcgagggcagagcctactacgcccagaaattccagggcagagtgaccatcaccgccgacgagtctacaagcaccgcctacatggaactgagcagcctgagaagcgaggataccgctgtgtactattgcgccagaggccggtacagctacagatattggttcgactactggggccagggcaccctggttacagtctcttctacgcgtagccagcctcacaccaagcccagcgtgttcgtgatgaagaacggcaccaacgtggcctgcctcgtgaaagagttctaccccaaggacatcaggatcaacctggtgtccagcaagaagatcaccgagttcgaccccgccatcgtgatctcccccagcggcaagtacaacgccgtgaagctggggaagtatgaggacagcaacagcgtgacctgctccgtgcagcacgacaacaagaccgtgcacagcaccgactttgaagtgaaaaccgactccaccgaccacgtgaagcccaaagagacagagaacaccaagcagcccagcaagagctgccacaagcccaaggccatcgtgcacaccgagaaagtgaacatgatgagcctgaccgtgatcggcttcagaatcctgctgctgaaagtggccggctttaacctgctgatgaccctgcggctgtggtccagctaa

SEQ ID NO: 39706 - DNA, 1884 bp, synthetic construct
  source 1..1884: mol_type = other DNA
atggccttaccagtgaccgccttgctcctgccgctggccttgctgctccacgccgccaggccggagatcgtgctgacacagtctcccgccacactgtcactgtctccaggcgaaagagccacactgagctgtagagccagccagagcgtgtcctcttacctggcctggtatcagcagaagcctggacaggctccccggctgctgatctacgatgccagcaatagagccacaggcatccccgccagattttctggctctggcagcggcaccgatttcaccctgaccataagcagcctggaacctgaggacttcgccgtgtactactgccagcagagaagcgactggcccctgacatttggcggcggaacaaaggtggaaatcaaactcgaggacaagcagctggacgccgacgtgtcccccaagcctaccatcttcctgccctctatcgccgagacaaagctccagaaggccggcacctacctgtgcctgctggaaaagttcttcccagatgtgattaagatccactggcaggaaaagaagtccaacaccatcctgggcagccaggaaggcaacaccatgaagaccaacgacacctacatgaagttcagctggctgaccgtgcccgagaagtccctggacaaagaacacagatgcatcgtgcggcacgaaaacaacaagaacggcgtggaccaggaaatcatcttcccacccatcaagaccgatgtgattacaatggaccccaaggacaactgctccaaggacgccaacgataccctgctgctccagctgaccaacaccagcgcctactacatgtacgagatcctgctgggcaaggccaccctgtacgccgtgctggtgtctgccctggtgctgatggctatggtcaagcggaaggacagccggggaagggccaagcgatctggatctggagcaacaaacttctcactactcaaacaagcaggtgacgtggaggagaatcccgggcctactagtatggactggatttggcgcatccttttccttgtcggcgctgctaccggcgcgcattccttcgaacaagttcagctggttcagagcggagccgaagtgaagaaacctggcagcagcgtgaaggtgtcctgcaaagcaagcggcggcacctttagctcctacgccatccactgggttcgacaggcaccaggacaaggactggaatggatgggcagaatcatccccatcgagggcagagcctactacgcccagaaattccagggcagagtgaccatcaccgccgacgagtctacaagcaccgcctacatggaactgagcagcctgagaagcgaggataccgctgtgtactattgcgccagaggccggtacagctacagatattggttcgactactggggccagggcaccctggttacagtctcttctacgcgtagccagcctcacaccaagcccagcgtgttcgtgatgaagaacggcaccaacgtggcctgcctcgtgaaagagttctaccccaaggacatcaggatcaacctggtgtccagcaagaagatcaccgagttcgaccccgccatcgtgatctcccccagcggcaagtacaacgccgtgaagctggggaagtacgaggacagcaacagcgtgacctgctccgtgcagcacgacaacaagaccgtgcacagcaccgactttgaagtgaaaaccgactccaccgaccacgtgaagcccaaagagacagagaacaccaagcagcccagcaagagctgccacaagcccaaggccatcgtgcacaccgagaaagtgaacatgatgagcctgaccgtgctgggcttcagaatcctgctgctgaaagtggccggctttaacctgctgatgaccctgcggctgtggtccagctaa

SEQ ID NO: 39707 - DNA, 1884 bp, synthetic construct
  source 1..1884: mol_type = other DNA
atggccttaccagtgaccgccttgctcctgccgctggccttgctgctccacgccgccaggccggagatcgtgctgacacagtctcccgccacactgtcactgtctccaggcgaaagagccacactgagctgtagagccagccagagcgtgtcctcttacctggcctggtatcagcagaagcctggacaggctccccggctgctgatctacgatgccagcaatagagccacaggcatccccgccagattttctggctctggcagcggcaccgatttcaccctgaccataagcagcctggaacctgaggacttcgccgtgtactactgccagcagagaagcgactggcccctgacatttggcggcggaacaaaggtggaaatcaaactcgaggacaagcagctggacgccgacgtgtcccccaagcctaccatcttcctgccctctatcgccgagacaaagctccagaaggccggcacctacctgtgcctgctggaaaagttcttcccagatgtgattaagatccactggcaggaaaagaagtccaacaccatcctgggcagccaggaaggcaacaccatgaagaccaacgacacctacatgaagttcagctggctgaccgtgcccgagaagtccctggacaaagaacacagatgcatcgtgcggcacgaaaacaacaagaacggcgtggaccaggaaatcatcttcccacccatcaagaccgatgtgattacaatggaccccaaggacaactgctccaaggacgccaacgataccctgctgctccagctgaccaacaccagcgccaccatcctgtacgagatcctgctgggcaaggccaccctgtacgccgtgctggtgtctgccctggtgctgatggctatggtcaagcggaaggacagccggggaagggccaagcgatctggatctggagcaacaaacttctcactactcaaacaagcaggtgacgtggaggagaatcccgggcctactagtatggactggatttggcgcatccttttccttgtcggcgctgctaccggcgcgcattccttcgaacaagttcagctggttcagagcggagccgaagtgaagaaacctggcagcagcgtgaaggtgtcctgcaaagcaagcggcggcacctttagctcctacgccatccactgggttcgacaggcaccaggacaaggactggaatggatgggcagaatcatccccatcgagggcagagcctactacgcccagaaattccagggcagagtgaccatcaccgccgacgagtctacaagcaccgcctacatggaactgagcagcctgagaagcgaggataccgctgtgtactattgcgccagaggccggtacagctacagatattggttcgactactggggccagggcaccctggttacagtctcttctacgcgtagccagcctcacaccaagcccagcgtgttcgtgatgaagaacggcaccaacgtggcctgcctcgtgaaagagttctaccccaaggacatcaggatcaacctggtgtccagcaagaagatcaccgagttcgaccccgccatcgtgatctcccccagcggcaagtacaacgccgtgaagctggggaagtacgaggacagcaacagcgtgacctgctccgtgcagcacgacaacaagaccgtgcacagcaccgactttgaagtgaaaaccgactccaccgaccacgtgaagcccaaagagacagagaacaccaagcagcccagcaagagctgccacaagcccaaggccatcgtgcacaccgagaaagtgaacatgatgagcctgaccgtgctgggcttcagaatcctgctgctgaaagtggccggctttaacctgctgatgaccctgcggctgtggtccagctaa

SEQ ID NO: 39708 - DNA, 1866 bp, synthetic construct
  source 1..1866: mol_type = other DNA
atggccttaccagtgaccgccttgctcctgccgctggccttgctgctccacgccgccaggccggagatcgtgctgacacagtctcccgccacactgtcactgtctccaggcgaaagagccacactgagctgtagagccagccagagcgtgtcctcttacctggcctggtatcagcagaagcctggacaggctccccggctgctgatctacgatgccagcaatagagccacaggcatccccgccagattttctggctctggcagcggcaccgatttcaccctgaccataagcagcctggaacctgaggacttcgccgtgtactactgccagcagagaagcgactggcccctgacatttggcggcggaacaaaggtggaaatcaaactcgaggacctgaagaacgtgttcccacctgaggtggccgtgttcgagcctagcgaggccgagatcagccacacccagaaagccaccctcgtgtgcctggctaccggcttctaccccgaccatgtggaactgtcttggtgggtcaacggcaaagaggtgcacagcggcgtgtgtaccgacccccagccactgaaagaacagcccgccctgaacgacagccggtactgcctgagcagcagactgagagtgtccgccaccttctggcagaacccccggaaccacttcagatgccaggtgcagttctacggcctgagcgagaacgacgagtggacccaggacagagccaagcccgtgacccagatcgtgtctgccgaagcctggggcagagccgattgcggctttaccagcgagagctaccagcagggcgtgctgagcgccaccatcctgtacttgttgctgctgctgaagtccgtggtgtacttcgccatcatcacatgctgcctgctgcggagaaccgccttctgctgcaacggcgagaagtctagggccaagcgatctggatctggagcaacaaacttctcactactcaaacaagcaggtgacgtggaggagaatcccgggcctactagtatggactggatttggcgcatccttttccttgtcggcgctgctaccggcgcgcattccttcgaacaagttcagctggttcagagcggagccgaagtgaagaaacctggcagcagcgtgaaggtgtcctgcaaagcaagcggcggcacctttagctcctacgccatccactgggttcgacaggcaccaggacaaggactggaatggatgggcagaatcatccccatcgagggcagagcctactacgcccagaaattccagggcagagtgaccatcaccgccgacgagtctacaagcaccgcctacatggaactgagcagcctgagaagcgaggataccgctgtgtactattgcgccagaggccggtacagctacagatattggttcgactactggggccagggcaccctggttacagtctcttctacgcgtatccagaaccctgatcctgccgtgtaccagctgcgggatagcaagagcagcgacaagagcgtgtgtctgttcaccgacttcgacagccagaccaacgtgtcccagagcaaggactccgacgtgtacatcaccgataagtgcgtgctggacatgcggagcatggacttcaagagcaactccgccgtggcctggtccaacaagtccgatttcgcctgcgccaacgccttcaacaacagcattatccccgaggacacattcttcccaagccccgagagcagctgcgacgtgaagctggtggaaaagagcttcgagacagacaccaacctgaacttccagaacctgagcgtgatcggcctgcggatgctgttcgccaaaaccgtggccgtgaacttcctgctgaccgccaagctgttcttcctctaa

SEQ ID NO: 39709 - DNA, 1953 bp, synthetic construct
  source 1..1953: mol_type = other DNA
atggccttaccagtgaccgccttgctcctgccgctggccttgctgctccacgccgccaggccggagatcgtgctgacacagtctcccgccacactgtcactgtctccaggcgaaagagccacactgagctgtagagccagccagagcgtgtcctcttacctggcctggtatcagcagaagcctggacaggctccccggctgctgatctacgatgccagcaatagagccacaggcatccccgccagattttctggctctggcagcggcaccgatttcaccctgaccataagcagcctggaacctgaggacttcgccgtgtactactgccagcagagaagcgactggcccctgacatttggcggcggaacaaaggtggaaatcaaactcgaggacctgaagaacgtgttcccacctgaggtggccgtgttcgagcctagcgaggccgagatcagccacacccagaaagccaccctcgtgtgcctggctaccggcttctaccccgaccatgtggaactgtcttggtgggtcaacggcaaagaggtgcacagcggcgtgtctaccgacccccagccactgaaagaacagcccgccctgaacgacagccggtactgcctgagcagcagactgagagtgtccgccaccttctggcagaacccccggaaccacttcagatgccaggtgcagttctacggcctgagcgagaacgacgagtggacccaggacagagccaagcccgtgacccagatcgtgtctgccgaagcctggggcagagccgattgcggatcctccaaggacgccaacgataccctgctgctccagctgaccaacaccagcgcctactacatgtacttgttgctgctgctgaagtccgtggtgtacttcgccatcatcacatgctgcctgctgcggagaaccgccttctgctgcaacggcgagaagtctagggccaagcgatctggatctggagcaacaaacttctcactactcaaacaagcaggtgacgtggaggagaatcccgggcctactagtatggactggatttggcgcatccttttccttgtcggcgctgctaccggcgcgcattccttcgaacaagttcagctggttcagagcggagccgaagtgaagaaacctggcagcagcgtgaaggtgtcctgcaaagcaagcggcggcacctttagctcctacgccatccactgggttcgacaggcaccaggacaaggactggaatggatgggcagaatcatccccatcgagggcagagcctactacgcccagaaattccagggcagagtgaccatcaccgccgacgagtctacaagcaccgcctacatggaactgagcagcctgagaagcgaggataccgctgtgtactattgcgccagaggccggtacagctacagatattggttcgactactggggccagggcaccctggttacagtctcttctacgcgtatccagaaccctgatcctgccgtgtaccagctgcgggatagcaagagcagcgacaagagcgtgtgtctgttcaccgacttcgacagccagaccaacgtgtcccagagcaaggactccgacgtgtacatcaccgataagaccgtgctggacatgcggagcatggacttcaagagcaactccgccgtggcctggtccaacaagtccgatttcgcctgcgccaacgccttcaacaacagcattatccccgaggacacattcttcccaagccccgagagcagctgcggtaccgaagtgaaaaccgactccaccgaccacgtgaagcccaaagagacagagaacaccaagcagcccagcaagagctgccacaagcccaaggccatcgtgcacaccgagaaagtgaacatgatgagcctgaccgtgctgggcctgcggatgctgttcgccaaaaccgtggccgtgaacttcctgctgaccgccaagctgttcttcctctaa

SEQ ID NO: 39710 - DNA, 1863 bp, synthetic construct
  source 1..1863: mol_type = other DNA
atggccttaccagtgaccgccttgctcctgccgctggccttgctgctccacgccgccaggccggagatcgtgctgacacagtctcccgccacactgtcactgtctccaggcgaaagagccacactgagctgtagagccagccagagcgtgtcctcttacctggcctggtatcagcagaagcctggacaggctccccggctgctgatctacgatgccagcaatagagccacaggcatccccgccagattttctggctctggcagcggcaccgatttcaccctgaccataagcagcctggaacctgaggacttcgccgtgtactactgccagcagagaagcgactggcccctgacatttggcggcggaacaaaggtggaaatcaaactcgaggacctgaagaacgtgttcccacctgaggtggccgtgttcgagcctagcgaggccgagatcagccacacccagaaagccaccctcgtgtgcctggctaccggcttctaccccgaccatgtggaactgtcttggtgggtcaacggcaaagaggtgcacagcggcgtgtgtaccgacccccagccactgaaagaacagcccgccctgaacgacagccggtactgcctgagcagcagactgagagtgtccgccaccttctggcagaacccccggaaccacttcagatgccaggtgcagttctacggcctgagcgagaacgacgagtggacccaggacagagccaagcccgtgacccagatcgtgtctgccgaagcctggggcagagccgattgcgacgtgaagctggtggaaaagagcttcgagacagacaccaacctgaacttccagaacctgagcgtgatcggcttcagaatcctgctgctgaaagtggccggctttaacctgctgatgaccctgcggctgtggtccagcagggccaagcgatctggatctggagcaacaaacttctcactactcaaacaagcaggtgacgtggaggagaatcccgggcctactagtatggactggatttggcgcatccttttccttgtcggcgctgctaccggcgcgcattccttcgaacaagttcagctggttcagagcggagccgaagtgaagaaacctggcagcagcgtgaaggtgtcctgcaaagcaagcggcggcacctttagctcctacgccatccactgggttcgacaggcaccaggacaaggactggaatggatgggcagaatcatccccatcgagggcagagcctactacgcccagaaattccagggcagagtgaccatcaccgccgacgagtctacaagcaccgcctacatggaactgagcagcctgagaagcgaggataccgctgtgtactattgcgccagaggccggtacagctacagatattggttcgactactggggccagggcaccctggttacagtctcttctacgcgtatccagaaccctgatcctgccgtgtaccagctgcgggatagcaagagcagcgacaagagcgtgtgtctgttcaccgacttcgacagccagaccaacgtgtcccagagcaaggactccgacgtgtacatcaccgataagtgcgtgctggacatgcggagcatggacttcaagagcaactccgccgtggcctggtccaacaagtccgatttcgcctgcgccaacgccttcaacaacagcattatccccgaggacacattcttcccaagccccgagagcagctgcggctttaccagcgagagctaccagcagggcgtgctgagcgccaccatcctgtacgagatcctgctgggcaaggccaccctgtacgccgtgctggtgtctgccctggtgctgatggctatggtcaagcggaaggacagccggggataa

SEQ ID NO: 39711 - DNA, 1863 bp, synthetic construct
  source 1..1863: mol_type = other DNA
atggccttaccagtgaccgccttgctcctgccgctggccttgctgctccacgccgccaggccggagatcgtgctgacacagtctcccgccacactgtcactgtctccaggcgaaagagccacactgagctgtagagccagccagagcgtgtcctcttacctggcctggtatcagcagaagcctggacaggctccccggctgctgatctacgatgccagcaatagagccacaggcatccccgccagattttctggctctggcagcggcaccgatttcaccctgaccataagcagcctggaacctgaggacttcgccgtgtactactgccagcagagaagcgactggcccctgacatttggcggcggaacaaaggtggaaatcaaactcgaggacctgaagaacgtgttcccacctgaggtggccgtgttcgagcctagcgaggccgagatcagccacacccagaaagccaccctcgtgtgcctggctaccggcttctaccccgaccatgtggaactgtcttggtgggtcaacggcaaagaggtgcacagcggcgtgtgtaccgacccccagccactgaaagaacagcccgccctgaacgacagccggtactgcctgagcagcagactgagagtgtccgccaccttctggcagaacccccggaaccacttcagatgccaggtgcagttctacggcctgagcgagaacgacgagtggacccaggacagagccaagcccgtgacccagatcgtgtctgccgaagcctggggcagagccgattgcggctttaccagcgagagctaccagcagggcgtgctgagcgccaccaacctgagcgtgatcggcttcagaatcctgctgctgaaagtggccggctttaacctgctgatgaccctgcggctgtggtccagcagggccaagcgatctggatctggagcaacaaacttctcactactcaaacaagcaggtgacgtggaggagaatcccgggcctactagtatggactggatttggcgcatccttttccttgtcggcgctgctaccggcgcgcattccttcgaacaagttcagctggttcagagcggagccgaagtgaagaaacctggcagcagcgtgaaggtgtcctgcaaagcaagcggcggcacctttagctcctacgccatccactgggttcgacaggcaccaggacaaggactggaatggatgggcagaatcatccccatcgagggcagagcctactacgcccagaaattccagggcagagtgaccatcaccgccgacgagtctacaagcaccgcctacatggaactgagcagcctgagaagcgaggataccgctgtgtactattgcgccagaggccggtacagctacagatattggttcgactactggggccagggcaccctggttacagtctcttctacgcgtatccagaaccctgatcctgccgtgtaccagctgcgggatagcaagagcagcgacaagagcgtgtgtctgttcaccgacttcgacagccagaccaacgtgtcccagagcaaggactccgacgtgtacatcaccgataagtgcgtgctggacatgcggagcatggacttcaagagcaactccgccgtggcctggtccaacaagtccgatttcgcctgcgccaacgccttcaacaacagcattatccccgaggacacattcttcccaagccccgagagcagctgcgacgtgaagctggtggaaaagagcttcgagacagacaccaacctgaacttccagatcctgtacgagatcctgctgggcaaggccaccctgtacgccgtgctggtgtctgccctggtgctgatggctatggtcaagcggaaggacagccggggataa

SEQ ID NO: 39712 - DNA, 1863 bp, synthetic construct; identical to SEQ ID NO: 39710
  source 1..1863: mol_type = other DNA

SEQ ID NO: 39713 - DNA, 1863 bp, synthetic construct; identical to SEQ ID NO: 39711
  source 1..1863: mol_type = other DNA

SEQ ID NO: 39714 - DNA, 1860 bp, synthetic construct
  source 1..1860: mol_type = other DNA
atggccttaccagtgaccgccttgctcctgccgctggccttgctgctccacgccgccaggccggagatcgtgctgacacagtctcccgccacactgtcactgtctccaggcgaaagagccacactgagctgtagagccagccagagcgtgtcctcttacctggcctggtatcagcagaagcctggacaggctccccggctgctgatctacgatgccagcaatagagccacaggcatccccgccagattttctggctctggcagcggcaccgatttcaccctgaccataagcagcctggaacctgaggacttcgccgtgtactactgccagcagagaagcgactggcccctgacatttggcggcggaacaaaggtggaaatcaaactcgaggacctgaagaacgtgttcccacctgaggtggccgtgttcgagcctagcgaggccgagatcagccacacccagaaagccaccctcgtgtgcctggctaccggcttctaccccgaccatgtggaactgtcttggtgggtcaacggcaaagaggtgcacagcggcgtgtgtaccgacccccagccactgaaagaacagcccgccctgaacgacagccggtactgcctgagcagcagactgagagtgtccgccaccttctggcagaacccccggaaccacttcagatgccaggtgcagttctacggcctgagcgagaacgacgagtggacccaggacagagccaagcccgtgacccagatcgtgtctgccgaagcctggggcagagccgattgcgacgtgaagctggtggaaaagagcttcgagacagacaccaacctgaacttccagaacctgagcgtgatcggcttcagaatcctgctgctgaaagtggccggctttaacctgctgatgaccctgcggctgtggtccagcagggccaagcgatctggatctggagcaacaaacttctcactactcaaacaagcaggtgacgtggaggagaatcccgggcctactagtatggactggatttggcgcatccttttccttgtcggcgctgctaccggcgcgcattccttcgaacaagttcagctggttcagagcggagccgaagtgaagaaacctggcagcagcgtgaaggtgtcctgcaaagcaagcggcggcacctttagctcctacgccatccactgggttcgacaggcaccaggacaaggactggaatggatgggcagaatcatccccatcgagggcagagcctactacgcccagaaattccagggcagagtgaccatcaccgccgacgagtctacaagcaccgcctacatggaactgagcagcctgagaagcgaggataccgctgtgtactattgcgccagaggccggtacagctacagatattggttcgactactggggccagggcaccctggttacagtctcttctacgcgtatccagaaccctgatcctgccgtgtaccagctgcgggatagcaagagcagcgacaagagcgtgtgtctgttcaccgacttcgacagccagaccaacgtgtcccagagcaaggactccgacgtgtacatcaccgataagtgcgtgctggacatgcggagcatggacttcaagagcaactccgccgtggcctggtccaacaagtccgatttcgcctgcgccaacgccttcaacaacagcattatccccgaggacacattcttcccaagccccgagagcagctgcggctttaccagcgagagctaccagcagggcgtgctgagcgccaccatcctgtacgagatcctgctgggcaaggccaccctgtacgccgtgctggtgtctgccctggtgctgatggctatggtcaagcggaaggacagccgggga

SEQ ID NO: 39715 - DNA, 1872 bp, synthetic construct
  source 1..1872: mol_type = other DNA
atggccttaccagtgaccgccttgctcctgccgctggccttgctgctccacgccgccaggccggagatcgtgctgacacagtctcccgccacactgtcactgtctccaggcgaaagagccacactgagctgtagagccagccagagcgtgtcctcttacctggcctggtatcagcagaagcctggacaggctccccggctgctgatctacgatgccagcaatagagccacaggcatccccgccagattttctggctctggcagcggcaccgatttcaccctgaccataagcagcctggaacctgaggacttcgccgtgtactactgccagcagagaagcgactggcccctgacatttggcggcggaacaaaggtggaaatcaaactcgaggccgacgtgtcccccaagcctaccatcttcctgccctctatcgccgagacaaagctccagaaggccggcacctacctgtgcctgctggaaaagttcttcccagatgtgattaagatccactggcaggaaaagaagtccaacaccatcctgggcagccaggaaggcaacaccatgaagaccaacgacacctacatgaagttcagctggctgaccgtgcccgagaagtccctggacaaagaacacagatgcatcgtgcggcacgaaaacaacaagaacggcgtggaccaggaaatcatcttcccacccatcaagaccgatgtgattacaatggaccccaaggacaactgctccaaggacgccaacgataccctgctgctccagctgaccaacaccagcgcctactacatgtacttgttgctgctgctgaagtccgtggtgtacttcgccatcatcacatgctgcctgctgcggagaaccgccttctgctgcaacggcgagaagtctagggccaagcgatctggatctggagcaacaaacttctcactactcaaacaagcaggtgacgtggaggagaatcccgggcctactagtatggactggatttggcgcatccttttccttgtcggcgctgctaccggcgcgcattccttcgaacaagttcagctggttcagagcggagccgaagtgaagaaacctggcagcagcgtgaaggtgtcctgcaaagcaagcggcggcacctttagctcctacgccatccactgggttcgacaggcaccaggacaaggactggaatggatgggcagaatcatccccatcgagggcagagcctactacgcccagaaattccagggcagagtgaccatcaccgccgacgagtctacaagcaccgcctacatggaactgagcagcctgagaagcgaggataccgctgtgtactattgcgccagaggccggtacagctacagatattggttcgactactggggccagggcaccctggttacagtctcttctacgcgtagccagcctcacaccaagcccagcgtgttcgtgatgaagaacggcaccaacgtggcctgcctcgtgaaagagttctaccccaaggacatcaggatcaacctggtgtccagcaagaagatcaccgagttcgaccccgccatcgtgatctcccccagcggcaagtacaacgccgtgaagctggggaagtatgaggacagcaacagcgtgacctgctccgtgcagcacgacaacaagaccgtgcacagcaccgactttgaagtgaaaaccgactccaccgaccacgtgaagcccaaagagacagagaacaccaagcagcccagcaagagctgccacaagcccaaggccatcgtgcacaccgagaaagtgaacatgatgagcctgaccgtgatcggcttcagaatcctgctgctgaaagtggccggctttaacctgctgatgaccctgcggctgtggtccagctaa

SEQ ID NO: 39716 - DNA, 1872 bp, synthetic construct
  source 1..1872: mol_type = other DNA
atggccttaccagtgaccgccttgctcctgccgctggccttgctgctccacgccgccaggccggagatcgtgctgacacagtctcccgccacactgtcactgtctccaggcgaaagagccacactgagctgtagagccagccagagcgtgtcctcttacctggcctggtatcagcagaagcctggacaggctccccggctgctgatctacgatgccagcaatagagccacaggcatccccgccagattttctggctctggcagcggcaccgatttcaccctgaccataagcagcctggaacctgaggacttcgccgtgtactactgccagcagagaagcgactggcccctgacatttggcggcggaacaaaggtggaaatcaaactcgaggccgacgtgtcccccaagcctaccatcttcctgccctctatcgccgagacaaagctccagaaggccggcacctacctgtgcctgctggaaaagttcttcccagatgtgattaagatccactggcaggaaaagaagtccaacaccatcctgggcagccaggaaggcaacaccatgaagaccaacgacacctacatgaagttcagctggctgaccgtgcccgagaagtccctggacaaagaacacagatgcatcgtgcggcacgaaaacaacaagaacggcgtggaccaggaaatcatcttcccacccatcaagaccgatgtgattacaatggaccccaaggacaactgctccaaggacgccaacgataccctgctgctccagctgaccaacaccagcgcctactacatgtacttgttgctgctgctgaagtccgtggtgtacttcgccatcatcacatgctgcctgctgcggagaaccgccttctgctgcaacggcgagaagtctagggccaagcgatctggatctggagcaacaaacttctcactactcaaacaagcaggtgacgtggaggagaatcccgggcctactagtatggactggatttggcgcatccttttccttgtcggcgctgctaccggcgcgcattccttcgaacaagttcagctggttcagagcggagccgaagtgaagaaacctggcagcagcgtgaaggtgtcctgcaaagcaagcggcggcacctttagctcctacgccatccactgggttcgacaggcaccaggacaaggactggaatggatgggcagaatcatccccatcgagggcagagcctactacgcccagaaattccagggcagagtgaccatcaccgccgacgagtctacaagcaccgcctacatggaactgagcagcctgagaagcgaggataccgctgtgtactattgcgccagaggccggtacagctacagatattggttcgactactggggccagggcaccctggttacagtctcttctacgcgtagccagcctcacaccaagcccagcgtgttcgtgatgaagaacggcaccaacgtggcctgcctcgtgaaagagttctaccccaaggacatcaggatcaacctggtgtccagcaagaagatcaccgagttcgaccccgccatcgtgatctcccccagcggcaagtacaacgccgtgaagctggggaagtacgaggacagcaacagcgtgacctgctccgtgcagcacgacaacaagaccgtgcacagcaccgactttgaagtgaaaaccgactccaccgaccacgtgaagcccaaagagacagagaacaccaagcagcccagcaagagctgccacaagcccaaggccatcgtgcacaccgagaaagtgaacatgatgagcctgaccgtgctgggcttcagaatcctgctgctgaaagtggccggctttaacctgctgatgaccctgcggctgtggtccagctaa

SEQ ID NO: 39717 - DNA, 1860 bp, synthetic construct; identical to SEQ ID NO: 39714
  source 1..1860: mol_type = other DNA

SEQ ID NO: 39718 - DNA, 1872 bp, synthetic construct
  source 1..1872: mol_type = other DNA
atggccttaccagtgaccgccttgctcctgccgctggccttgctgctccacgccgccaggccggagatcgtgctgacacagtctcccgccacactgtcactgtctccaggcgaaagagccacactgagctgtagagccagccagagcgtgtcctcttacctggcctggtatcagcagaagcctggacaggctccccggctgctgatctacgatgccagcaatagagccacaggcatccccgccagattttctggctctggcagcggcaccgatttcaccctgaccataagcagcctggaacctgaggacttcgccgtgtactactgccagcagagaagcgactggcccctgacatttggcggcggaacaaaggtggaaatcaaactcgagatccagaaccctgatcctgccgtgtaccagctgcgggatagcaagagcagcgacaagagcgtgtgtctgttcaccgacttcgacagccagaccaacgtgtcccagagcaaggactccgacgtgtacatcaccgataagtgcgtgctggacatgcggagcatggacttcaagagcaactccgccgtggcctggtccaacaagtccgatttcgcctgcgccaacgccttcaacaacagcattatccccgaggacacattcttcccaagccccgagagcagctgcggctttaccagcgagagctaccagcagggcgtgctgagcgccaccatcctgtacgagatcctgctgggcaaggccaccctgtacgccgtgctggtgtctgccctggtgctgatggctatggtcaagcggaaggacagccggggacgcgccaagagaagcggatctggcgtgaagcagaccctgaatttcgacctgctgaagctggctggcgacgtggaatccaacccaggccctactagtatggactggatttggcgcatccttttccttgtcggcgctgctaccggcgcgcattccttcgaacaagttcagctggttcagagcggagccgaagtgaagaaacctggcagcagcgtgaaggtgtcctgcaaagcaagcggcggcacctttagctcctacgccatccactgggttcgacaggcaccaggacaaggactggaatggatgggcagaatcatccccatcgagggcagagcctactacgcccagaaattccagggcagagtgaccatcaccgccgacgagtctacaagcaccgcctacatggaactgagcagcctgagaagcgaggataccgctgtgtactattgcgccagaggccggtacagctacagatattggttcgactactggggccagggcaccctggttacagtctcttctacgcgtgaggacctgaagaacgtgttcccacctgaggtggccgtgttcgagcctagcgaggccgagatcagccacacccagaaagccaccctcgtgtgcctggctaccggcttctaccccgaccatgtggaactgtcttggtgggtcaacggcaaagaggtgcacagcggcgtgtgtaccgacccccagccactgaaagaacagcccgccctgaacgacagccggtactgcctgagcagcagactgagagtgtccgccaccttctggcagaacccccggaaccacttcagatgccaggtgcagttctacggcctgagcgagaacgacgagtggacccaggacagagccaagcccgtgacccagatcgtgtctgccgaagcctggggcagagccgattgcgacgtgaagctggtggaaaagagcttcgagacagacaccaacctgaacttccagaacctgagcgtgatcggcttcagaatcctgctgctgaaagtggccggctttaacctgctgatgaccctgcggctgtggtccagc

SEQ ID NO: 39719 - DNA, 2265 bp, synthetic construct
  source 1..2265: mol_type = other DNA
atggccttaccagtgaccgccttgctcctgccgctggccttgctgctccacgccgccaggccggaagtgcagctggttgaatctggcggaggactggttcagcctggcggatctctgagactgtcttgtgccgccagcggcttcagcttcagcgacttttggatgagctgggtccgacaggcccctggcaaaggacttgaatgggtcgccacaatcagccaggccggcagcgagaaggactacgtggactctgtgaagggcagattcaccatcagccgggacaacgccaagaagtccctgtacctccagatgaacagcctgagagccgaggacaccgccgtgtactattgtgcctctggcgtgtacagcttcgactacagaggccagggcaccctggtcacagtctcttctggtaccggcggaggcggatctggcggcggaggtagcggtggcggaggatctgaattcgagatcgtgctgacacagtctcccgccacactgtcactgtctccaggcgaaagagccacactgagctgtagagccagccagagcgtgtcctcttacctggcctggtatcagcagaagcctggacaggctccccggctgctgatctacgatgccagcaatagagccacaggcatccccgccagattttctggctctggcagcggcaccgatttcaccctgaccataagcagcctggaacctgaggacttcgccgtgtactactgccagcagagaagcgactggcccctgacatttggcggcggaacaaaggtggaaatcaaactcgaggacctgaagaacgtgttcccacctgaggtggccgtgttcgagcctagcgaggccgagatcagccacacccagaaagccaccctcgtgtgcctggctaccggcttctaccccgaccatgtggaactgtcttggtgggtcaacggcaaagaggtgcacagcggcgtgtgtaccgacccccagccactgaaagaacagcccgccctgaacgacagccggtactgcctgagcagcagactgagagtgtccgccaccttctggcagaacccccggaaccacttcagatgccaggtgcagttctacggcctgagcgagaacgacgagtggacccaggacagagccaagcccgtgacccagatcgtgtctgccgaagcctggggcagagccgattgcgacgtgaagctggtggaaaagagcttcgagacagacaccaacctgaacttccagaacctgagcgtgatcggcttcagaatcctgctgctgaaagtggccggctttaacctgctgatgaccctgcggctgtggtccagcagggccaagcgatctggatctggagcaacaaacttctcactactcaaacaagcaggtgacgtggaggagaatcccgggcctactagtatggactggatttggcgcatccttttccttgtcggcgctgctaccggcgcgcattccttcgaacaagttcagctggttcagagcggagccgaagtgaagaaacctggcagcagcgtgaaggtgtcctgcaaagcaagcggcggcacctttagctcctacgccatccactgggttcgacaggcaccaggacaaggactggaatggatgggcagaatcatccccatcgagggcagagcctactacgcccagaaattccagggcagagtgaccatcaccgccgacgagtctacaagcaccgcctacatggaactgagcagcctgagaagcgaggataccgctgtgtactattgcgccagaggccggtacagctacagatattggttcgactactggggccagggcaccctggttacagtctcttctacgcgtatccagaaccctgatcctgccgtgtaccagctgcgggatagcaagagcagcgacaagagcgtgtgtctgttcaccgacttcgacagccagaccaacgtgtcccagagcaaggactccgacgtgtacatcaccgataagtgcgtgctggacatgcggagcatggacttcaagagcaactccgccgtggcctggtccaacaagtccgatttcgcctgcgccaacgccttcaacaacagcattatccccgaggacacattcttcccaagccccgagagcagctgcggctttaccagcgagagctaccagcagggcgtgctgagcgccaccatcctgtacgagatcctgctgggcaaggccaccctgtacgccgtgctggtgtctgccctggtgctgatggctatggtcaagcggaaggacagccgggga

SEQ ID NO: 39720 - DNA, 2277 bp, synthetic construct
  source 1..2277: mol_type = other DNA
atggccttaccagtgaccgccttgctcctgccgctggccttgctgctccacgccgccaggccggaagtgcagctggttgaatctggcggaggactggttcagcctggcggatctctgagactgtcttgtgccgccagcggcttcagcttcagcgacttttggatgagctgggtccgacaggcccctggcaaaggacttgaatgggtcgccacaatcagccaggccggcagcgagaaggactacgtggactctgtgaagggcagattcaccatcagccgggacaacgccaagaagtccctgtacctccagatgaacagcctgagagccgaggacaccgccgtgtactattgtgcctctggcgtgtacagcttcgactacagaggccagggcaccctggtcacagtctcttctggtaccggcggaggcggatctggcggcggaggtagcggtggcggaggatctgaattcgagatcgtgctgacacagtctcccgccacactgtcactgtctccaggcgaaagagccacactgagctgtagagccagccagagcgtgtcctcttacctggcctggtatcagcagaagcctggacaggctccccggctgctgatctacgatgccagcaatagagccacaggcatccccgccagattttctggctctggcagcggcaccgatttcaccctgaccataagcagcctggaacctgaggacttcgccgtgtactactgccagcagagaagcgactggcccctgacatttggcggcggaacaaaggtggaaatcaaactcgagatccagaaccctgatcctgccgtgtaccagctgcgggatagcaagagcagcgacaagagcgtgtgtctgttcaccgacttcgacagccagaccaacgtgtcccagagcaaggactccgacgtgtacatcaccgataagtgcgtgctggacatgcggagcatggacttcaagagcaactccgccgtggcctggtccaacaagtccgatttcgcctgcgccaacgccttcaacaacagcattatccccgaggacacattcttcccaagccccgagagcagctgcggctttaccagcgagagctaccagcagggcgtgctgagcgccaccatcctgtacgagatcctgctgggcaaggccaccctgtacgccgtgctggtgtctgccctggtgctgatggctatggtcaagcggaaggacagccggggacgcgccaagagaagcggatctggcgtgaagcagaccctgaatttcgacctgctgaagctggctggcgacgtggaatccaacccaggccctactagtatggactggatttggcgcatccttttccttgtcggcgctgctaccggcgcgcattccttcgaacaagttcagctggttcagagcggagccgaagtgaagaaacctggcagcagcgtgaaggtgtcctgcaaagcaagcggcggcacctttagctcctacgccatccactgggttcgacaggcaccaggacaaggactggaatggatgggcagaatcatccccatcgagggcagagcctactacgcccagaaattccagggcagagtgaccatcaccgccgacgagtctacaagcaccgcctacatggaactgagcagcctgagaagcgaggataccgctgtgtactattgcgccagaggccggtacagctacagatattggttcgactactggggccagggcaccctggttacagtctcttctacgcgtgaggacctgaagaacgtgttcccacctgaggtggccgtgttcgagcctagcgaggccgagatcagccacacccagaaagccaccctcgtgtgcctggctaccggcttctaccccgaccatgtggaactgtcttggtgggtcaacggcaaagaggtgcacagcggcgtgtgtaccgacccccagccactgaaagaacagcccgccctgaacgacagccggtactgcctgagcagcagactgagagtgtccgccaccttctggcagaacccccggaaccacttcagatgccaggtgcagttctacggcctgagcgagaacgacgagtggacccaggacagagccaagcccgtgacccagatcgtgtctgccgaagcctggggcagagccgattgcgacgtgaagctggtggaaaagagcttcgagacagacaccaacctgaacttccagaacctgagcgtgatcggcttcagaatcctgctgctgaaagtggccggctttaacctgctgatgaccctgcggctgtggtccagc

SEQ ID NO: 39721 - DNA, 2676 bp, synthetic construct
  source 1..2676: mol_type = other DNA
atggccttaccagtgaccgccttgctcctgccgctggccttgctgctccacgccgccaggccggaagtgcagctggttgaatctggcggaggactggttcagcctggcggatctctgagactgtcttgtgccgccagcggcttcagcttcagcgacttttggatgagctgggtccgacaggcccctggcaaaggacttgaatgggtcgccacaatcagccaggccggcagcgagaaggactacgtggactctgtgaagggcagattcaccatcagccgggacaacgccaagaagtccctgtacctccagatgaacagcctgagagccgaggacaccgccgtgtactattgtgcctctggcgtgtacagcttcgactacagaggccagggcaccctggtcacagtctcttctggtaccggcggaggcggatctggcggcggaggtagcggtggcggaggatctgaattcgagatcgtgctgacacagtctcccgccacactgtcactgtctccaggcgaaagagccacactgagctgtagagccagccagagcgtgtcctcttacctggcctggtatcagcagaagcctggacaggctccccggctgctgatctacgatgccagcaatagagccacaggcatccccgccagattttctggctctggcagcggcaccgatttcaccctgaccataagcagcctggaacctgaggacttcgccgtgtactactgccagcagagaagcgactggcccctgacatttggcggcggaacaaaggtggaaatcaaactcgaggacctgaagaacgtgttcccacctgaggtggccgtgttcgagcctagcgaggccgagatcagccacacccagaaagccaccctcgtgtgcctggctaccggcttctaccccgaccatgtggaactgtcttggtgggtcaacggcaaagaggtgcacagcggcgtgtgtaccgacccccagccactgaaagaacagcccgccctgaacgacagccggtactgcctgagcagcagactgagagtgtccgccaccttctggcagaacccccggaaccacttcagatgccaggtgcagttctacggcctgagcgagaacgacgagtggacccaggacagagccaagcccgtgacccagatcgtgtctgccgaagcctggggcagagccgattgcgacgtgaagctggtggaaaagagcttcgagacagacaccaacctgaacttccagaacctgagcgtgatcggcttcagaatcctgctgctgaaagtggccggctttaacctgctgatgaccctgcggctgtggtccagcagggccaagcgatctggatctggagcaacaaacttctcactactcaaacaagcaggtgacgtggaggagaatcccgggcctactagtatggactggatttggcgcatccttttccttgtcggcgctgctaccggcgcgcattccgggccccagctccagctgcaagagtctggacctggcctggtcaagcctagcgagacactgagcctgacctgtaccgtgtccggcgatagcatcagcagcggcgattactactggggctggatcagacagcctcctggcaaaggactggaatggatcggccacatctactacagcggcgtgacctactacaaccccagcctgaagtccagagtgaccatcagcgtggacaccagccggaaccagttctccctgaagctgtctagcgtgacagccgccgataccgccgtgtactactgcaccagagaggacagcagcaactggcggagtagaggccagggaacactggtcacagttagctctggatccggcggaggcggaagtggaggcggaggatctggcggcggaggctctttcgaacaagttcagctggttcagagcggagccgaagtgaagaaacctggcagcagcgtgaaggtgtcctgcaaagcaagcggcggcacctttagctcctacgccatccactgggttcgacaggcaccaggacaaggactggaatggatgggcagaatcatccccatcgagggcagagcctactacgcccagaaattccagggcagagtgaccatcaccgccgacgagtctacaagcaccgcctacatggaactgagcagcctgagaagcgaggataccgctgtgtactattgcgccagaggccggtacagctacagatattggttcgactactggggccagggcaccctggttacagtctcttctacgcgtatccagaaccctgatcctgccgtgtaccagctgcgggatagcaagagcagcgacaagagcgtgtgtctgttcaccgacttcgacagccagaccaacgtgtcccagagcaaggactccgacgtgtacatcaccgataagtgcgtgctggacatgcggagcatggacttcaagagcaactccgccgtggcctggtccaacaagtccgatttcgcctgcgccaacgccttcaacaacagcattatccccgaggacacattcttcccaagccccgagagcagctgcggctttaccagcgagagctaccagcagggcgtgctgagcgccaccatcctgtacgagatcctgctgggcaaggccaccctgtacgccgtgctggtgtctgccctggtgctgatggctatggtcaagcggaaggacagccgggga

SEQ ID NO: 39722 - DNA, 2688 bp, synthetic construct
  source 1..2688: mol_type = other DNA
atggccttaccagtgaccgccttgctcctgccgctggccttgctgctccacgccgccaggccggaagtgcagctggttgaatctggcggaggactggttcagcctggcggatctctgagactgtcttgtgccgccagcggcttcagcttcagcgacttttggatgagctgggtccgacaggcccctggcaaaggacttgaatgggtcgccacaatcagccaggccggcagcgagaaggactacgtggactctgtgaagggcagattcaccatcagccgggacaacgccaagaagtccctgtacctccagatgaacagcctgagagccgaggacaccgccgtgtactattgtgcctctggcgtgtacagcttcgactacagaggccagggcaccctggtcacagtctcttctggtaccggcggaggcggatctggcggcggaggtagcggtggcggaggatctgaattcgagatcgtgctgacacagtctcccgccacactgtcactgtctccaggcgaaagagccacactgagctgtagagccagccagagcgtgtcctcttacctggcctggtatcagcagaagcctggacaggctccccggctgctgatctacgatgccagcaatagagccacaggcatccccgccagattttctggctctggcagcggcaccgatttcaccctgaccataagcagcctggaacctgaggacttcgccgtgtactactgccagcagagaagcgactggcccctgacatttggcggcggaacaaaggtggaaatcaaactcgagatccagaaccctgatcctgccgtgtaccagctgcgggatagcaagagcagcgacaagagcgtgtgtctgttcaccgacttcgacagccagaccaacgtgtcccagagcaaggactccgacgtgtacatcaccgataagtgcgtgctggacatgcggagcatggacttcaagagcaactccgccgtggcctggtccaacaagtccgatttcgcctgcgccaacgccttcaacaacagcattatccccgaggacacattcttcccaagccccgagagcagctgcggctttaccagcgagagctaccagcagggcgtgctgagcgccaccatcctgtacgagatcctgctgggcaaggccaccctgtacgccgtgctggtgtctgccctggtgctgatggctatggtcaagcggaaggacagccggggacgcgccaagagaagcggatctggcgtgaagcagaccctgaatttcgacctgctgaagctggctggcgacgtggaatccaacccaggccctactagtatggactggatttggcgcatccttttccttgtcggcgctgctaccggcgcgcattccgggccccagctccagctgcaagagtctggacctggcctggtcaagcctagcgagacactgagcctgacctgtaccgtgtccggcgatagcatcagcagcggcgattactactggggctggatcagacagcctcctggcaaaggactggaatggatcggccacatctactacagcggcgtgacctactacaaccccagcctgaagtccagagtgaccatcagcgtggacaccagccggaaccagttctccctgaagctgtctagcgtgacagccgccgataccgccgtgtactactgcaccagagaggacagcagcaactggcggagtagaggccagggaacactggtcacagttagctctggatccggcggaggcggaagtggaggcggaggatctggcggcggaggctctttcgaacaagttcagctggttcagagcggagccgaagtgaagaaacctggcagcagcgtgaaggtgtcctgcaaagcaagcggcggcacctttagctcctacgccatccactgggttcgacaggcaccaggacaaggactggaatggatgggcagaatcatccccatcgagggcagagcctactacgcccagaaattccagggcagagtgaccatcaccgccgacgagtctacaagcaccgcctacatggaactgagcagcctgagaagcgaggataccgctgtgtactattgcgccagaggccggtacagctacagatattggttcgactactggggccagggcaccctggttacagtctcttctacgcgtgaggacctgaagaacgtgttcccacctgaggtggccgtgttcgagcctagcgaggccgagatcagccacacccagaaagccaccctcgtgtgcctggctaccggcttctaccccgaccatgtggaactgtcttggtgggtcaacggcaaagaggtgcacagcggcgtgtgtaccgacccccagccactgaaagaacagcccgccctgaacgacagccggtactgcctgagcagcagactgagagtgtccgccaccttctggcagaacccccggaaccacttcagatgccaggtgcagttctacggcctgagcgagaacgacgagtggacccaggacagagccaagcccgtgacccagatcgtgtctgccgaagcctggggcagagccgattgcgacgtgaagctggtggaaaagagcttcgagacagacaccaacctgaacttccagaacctgagcgtgatcggcttcagaatcctgctgctgaaagtggccggctttaacctgctgatgaccctgcggctgtggtccagc

SEQ ID NO: 39723 - DNA, 2070 bp, synthetic construct
  source 1..2070: mol_type = other DNA
atggccttaccagtgaccgccttgctcctgccgctggccttgctgctccacgccgccaggccggagatcgtgctgacacagtctcccgccacactgtcactgtctccaggcgaaagagccacactgagctgtagagccagccagagcgtgtcctcttacctggcctggtatcagcagaagcctggacaggctccccggctgctgatctacgatgccagcaatagagccacaggcatccccgccagattttctggctctggcagcggcaccgatttcaccctgaccataagcagcctggaacctgaggacttcgccgtgtactactgccagcagagaagcgactggcccctgacatttggcggcggaacaaaggtggaaatcaaactcgaggacctgaagaacgtgttcccacctgaggtggccgtgttcgagcctagcgaggccgagatcagccacacccagaaagccaccctcgtgtgcctggctaccggcttctaccccgaccatgtggaactgtcttggtgggtcaacggcaaagaggtgcacagcggcgtgtgtaccgacccccagccactgaaagaacagcccgccctgaacgacagccggtactgcctgagcagcagactgagagtgtccgccaccttctggcagaacccccggaaccacttcagatgccaggtgcagttctacggcctgagcgagaacgacgagtggacccaggacagagccaagcccgtgacccagatcgtgtctgccgaagcctggggcagagccgattgcgacgtgaagctggtggaaaagagcttcgagacagacaccaacctgaacttccagaacctgagcgtgatcggcttcagaatcctgctgctgaaagtggccggctttaacctgctgatgaccctgcggctgtggtccagcagggccaagcgatctggatctggagcaacaaacttctcactactcaaacaagcaggtgacgtggaggagaatcccgggcctactagtatggactggatttggcgcatccttttccttgtcggcgctgctaccggcgcccattccgggcccatggaccccgacctggaaatcagagccgccttcctgcggcagagaaacacagccctgagaacagaggtggccgagctggaacaagaggtgcagcggctggaaaacgaggtgtcccagtacgagacaagatacggccctctcggaggcggaaaaggatccggcggcggaggatctggcggaggcggatctgggggcggaggctctttcgaacaagttcagctggttcagagcggagccgaagtgaagaaacctggcagcagcgtgaaggtgtcctgcaaagcaagcggcggcacctttagctcctacgccatccactgggttcgacaggcaccaggacaaggactggaatggatgggcagaatcatccccatcgagggcagagcctactacgcccagaaattccagggcagagtgaccatcaccgccgacgagtctacaagcaccgcctacatggaactgagcagcctgagaagcgaggataccgctgtgtactattgcgccagaggccggtacagctacagatattggttcgactactggggccagggcaccctggttacagtctcttctacgcgtatccagaaccctgatcctgccgtgtaccagctgcgggatagcaagagcagcgacaagagcgtgtgtctgttcaccgacttcgacagccagaccaacgtgtcccagagcaaggactccgacgtgtacatcaccgataagtgcgtgctggacatgcggagcatggacttcaagagcaactccgccgtggcctggtccaacaagtccgatttcgcctgcgccaacgccttcaacaacagcattatccccgaggacacattcttcccaagccccgagagcagctgcggctttaccagcgagagctaccagcagggcgtgctgagcgccaccatcctgtacgagatcctgctgggcaaggccaccctgtacgccgtgctggtgtctgccctggtgctgatggctatggtcaagcggaaggacagccgggga

SEQ ID NO: 39724 - DNA, 2082 bp, synthetic construct
  source 1..2082: mol_type = other DNA
atggccttaccagtgaccgccttgctcctgccgctggccttgctgctccacgccgccaggccggagatcgtgctgacacagtctcccgccacactgtcactgtctccaggcgaaagagccacactgagctgtagagccagccagagcgtgtcctcttacctggcctggtatcagcagaagcctggacaggctccccggctgctgatctacgatgccagcaatagagccacaggcatccccgccagattttctggctctggcagcggcaccgatttcaccctgaccataagcagcctggaacctgaggacttcgccgtgtactactgccagcagagaagcgactggcccctgacatttggcggcggaacaaaggtggaaatcaaactcgagatccagaaccctgatcctgccgtgtaccagctgcgggatagcaagagcagcgacaagagcgtgtgtctgttcaccgacttcgacagccagaccaacgtgtcccagagcaaggactccgacgtgtacatcaccgataagtgcgtgctggacatgcggagcatggacttcaagagcaactccgccgtggcctggtccaacaagtccgatttcgcctgcgccaacgccttcaacaacagcattatccccgaggacacattcttcccaagccccgagagcagctgcggctttaccagcgagagctaccagcagggcgtgctgagcgccaccatcctgtacgagatcctgctgggcaaggccaccctgtacgccgtgctggtgtctgccctggtgctgatggctatggtcaagcggaaggacagccggggacgcgccaagagaagcggatctggcgtgaagcagaccctgaatttcgacctgctgaagctggctggcgacgtggaatccaacccaggccctactagtatggactggatttggcgcatccttttccttgtcggcgctgctaccggcgcccattccgggcccatggaccccgacctggaaatcagagccgccttcctgcggcagagaaacacagccctgagaacagaggtggccgagctggaacaagaggtgcagcggctggaaaacgaggtgtcccagtacgagacaagatacggccctctcggaggcggaaaaggatccggcggcggaggatctggcggaggcggatctgggggcggaggctctttcgaacaagttcagctggttcagagcggagccgaagtgaagaaacctggcagcagcgtgaaggtgtcctgcaaagcaagcggcggcacctttagctcctacgccatccactgggttcgacaggcaccaggacaaggactggaatggatgggcagaatcatccccatcgagggcagagcctactacgcccagaaattccagggcagagtgaccatcaccgccgacgagtctacaagcaccgcctacatggaactgagcagcctgagaagcgaggataccgctgtgtactattgcgccagaggccggtacagctacagatattggttcgactactggggccagggcaccctggttacagtctcttctacgcgtgaggacctgaagaacgtgttcccacctgaggtggccgtgttcgagcctagcgaggccgagatcagccacacccagaaagccaccctcgtgtgcctggctaccggcttctaccccgaccatgtggaactgtcttggtgggtcaacggcaaagaggtgcacagcggcgtgtgtaccgacccccagccactgaaagaacagcccgccctgaacgacagccggtactgcctgagcagcagactgagagtgtccgccaccttctggcagaacccccggaaccacttcagatgccaggtgcagttctacggcctgagcgagaacgacgagtggacccaggacagagccaagcccgtgacccagatcgtgtctgccgaagcctggggcagagccgattgcgacgtgaagctggtggaaaagagcttcgagacagacaccaacctgaacttccagaacctgagcgtgatcggcttcagaatcctgctgctgaaagtggccggctttaacctgctgatgaccctgcggctgtggtccagc

SEQ ID NO: 39725 - DNA, 2001 bp, synthetic construct
  source 1..2001: mol_type = other DNA
atggccttaccagtgaccgccttgctcctgccgctggccttgctgctccacgccgccaggccggagatcgtgctgacacagtctcccgccacactgtcactgtctccaggcgaaagagccacactgagctgtagagccagccagagcgtgtcctcttacctggcctggtatcagcagaagcctggacaggctccccggctgctgatctacgatgccagcaatagagccacaggcatccccgccagattttctggctctggcagcggcaccgatttcaccctgaccataagcagcctggaacctgaggacttcgccgtgtactactgccagcagagaagcgactggcccctgacatttggcggcggaacaaaggtggaaatcaaactcgaggacctgaagaacgtgttcccacctgaggtggccgtgttcgagcctagcgaggccgagatcagccacacccagaaagccaccctcgtgtgcctggctaccggcttctaccccgaccatgtggaactgtcttggtgggtcaacggcaaagaggtgcacagcggcgtgtgtaccgacccccagccactgaaagaacagcccgccctgaacgacagccggtactgcctgagcagcagactgagagtgtccgccaccttctggcagaacccccggaaccacttcagatgccaggtgcagttctacggcctgagcgagaacgacgagtggacccaggacagagccaagcccgtgacccagatcgtgtctgccgaagcctggggcagagccgattgcgacgtgaagctggtggaaaagagcttcgagacagacaccaacctgaacttccagaacctgagcgtgatcggcttcagaatcctgctgctgaaagtggccggctttaacctgctgatgaccctgcggctgtggtccagcagggccaagcgatctggatctggagcaacaaacttctcactactcaaacaagcaggtgacgtggaggagaatcccgggcctactagtatggactggatttggcgcatccttttccttgtcggcgctgctaccggcgcccattccgggcccgaagttgctgccctcgagaaggaggtagcagctttggaaaaagaagtcgcagcccttgagaaagaagttgcggctctggagaagggatccggcggcggaggatctggcggaggcggatctgggggcggaggctctttcgaacaagttcagctggttcagagcggagccgaagtgaagaaacctggcagcagcgtgaaggtgtcctgcaaagcaagcggcggcacctttagctcctacgccatccactgggttcgacaggcaccaggacaaggactggaatggatgggcagaatcatccccatcgagggcagagcctactacgcccagaaattccagggcagagtgaccatcaccgccgacgagtctacaagcaccgcctacatggaactgagcagcctgagaagcgaggataccgctgtgtactattgcgccagaggccggtacagctacagatattggttcgactactggggccagggcaccctggttacagtctcttctacgcgtatccagaaccctgatcctgccgtgtaccagctgcgggatagcaagagcagcgacaagagcgtgtgtctgttcaccgacttcgacagccagaccaacgtgtcccagagcaaggactccgacgtgtacatcaccgataagtgcgtgctggacatgcggagcatggacttcaagagcaactccgccgtggcctggtccaacaagtccgatttcgcctgcgccaacgccttcaacaacagcattatccccgaggacacattcttcccaagccccgagagcagctgcggctttaccagcgagagctaccagcagggcgtgctgagcgccaccatcctgtacgagatcctgctgggcaaggccaccctgtacgccgtgctggtgtctgccctggtgctgatggctatggtcaagcggaaggacagccgggga

SEQ ID NO: 39726 - DNA, 2013 bp, synthetic construct
  source 1..2013: mol_type = other DNA
atggccttaccagtgaccgccttgctcctgccgctggccttgctgctccacgccgccaggccggagatcgtgctgacacagtctcccgccacactgtcactgtctccaggcgaaagagccacactgagctgtagagccagccagagcgtgtcctcttacctggcctggtatcagcagaagcctggacaggctccccggctgctgatctacgatgccagcaatagagccacaggcatccccgccagattttctggctctggcagcggcaccgatttcaccctgaccataagcagcctggaacctgaggacttcgccgtgtactactgccagcagagaagcgactggcccctgacatttggcggcggaacaaaggtggaaatcaaactcgagatccagaaccctgatcctgccgtgtaccagctgcgggatagcaagagcagcgacaagagcgtgtgtctgttcaccgacttcgacagccagaccaacgtgtcccagagcaaggactccgacgtgtacatcaccgataagtgcgtgctggacatgcggagcatggacttcaagagcaactccgccgtggcctggtccaacaagtccgatttcgcctgcgccaacgccttcaacaacagcattatccccgaggacacattcttcccaagccccgagagcagctgcggctttaccagcgagagctaccagcagggcgtgctgagcgccaccatcctgtacgagatcctgctgggcaaggccaccctgtacgccgtgctggtgtctgccctggtgctgatggctatggtcaagcggaaggacagccggggacgcgccaagagaagcggatctggcgtgaagcagaccctgaatttcgacctgctgaagctggctggcgacgtggaatccaacccaggccctactagtatggactggatttggcgcatccttttccttgtcggcgctgctaccggcgcccattccgggcccgaagttgctgccctcgagaaggaggtagcagctttggaaaaagaagtcgcagcccttgagaaagaagttgcggctctggagaagggatccggcggcggaggatctggcggaggcggatctgggggcggaggctctttcgaacaagttcagctggttcagagcggagccgaagtgaagaaacctggcagcagcgtgaaggtgtcctgcaaagcaagcggcggcacctttagctcctacgccatccactgggttcgacaggcaccaggacaaggactggaatggatgggcagaatcatccccatcgagggcagagcctactacgcccagaaattccagggcagagtgaccatcaccgccgacgagtctacaagcaccgcctacatggaactgagcagcctgagaagcgaggataccgctgtgtactattgcgccagaggccggtacagctacagatattggttcgactactggggccagggcaccctggttacagtctcttctacgcgtgaggacctgaagaacgtgttcccacctgaggtggccgtgttcgagcctagcgaggccgagatcagccacacccagaaagccaccctcgtgtgcctggctaccggcttctaccccgaccatgtggaactgtcttggtgggtcaacggcaaagaggtgcacagcggcgtgtgtaccgacccccagccactgaaagaacagcccgccctgaacgacagccggtactgcctgagcagcagactgagagtgtccgccaccttctggcagaacccccggaaccacttcagatgccaggtgcagttctacggcctgagcgagaacgacgagtggacccaggacagagccaagcccgtgacccagatcgtgtctgccgaagcctggggcagagccgattgcgacgtgaagctggtggaaaagagcttcgagacagacaccaacctgaacttccagaacctgagcgtgatcggcttcagaatcctgctgctgaaagtggccggctttaacctgctgatgaccctgcggctgtggtccagc

SEQ ID NO: 39727 - DNA, 2271 bp, synthetic construct
  source 1..2271: mol_type = other DNA
atggccttaccagtgaccgccttgctcctgccgctggccttgctgctccacgccgccaggccggagatcgtgctgacacagtctcccgccacactgtcactgtctccaggcgaaagagccacactgagctgtagagccagccagagcgtgtcctcttacctggcctggtatcagcagaagcctggacaggctccccggctgctgatctacgatgccagcaatagagccacaggcatccccgccagattttctggctctggcagcggcaccgatttcaccctgaccataagcagcctggaacctgaggacttcgccgtgtactactgccagcagagaagcgactggcccctgacatttggcggcggaacaaaggtggaaatcaaactcgaggacctgaagaacgtgttcccacctgaggtggccgtgttcgagcctagcgaggccgagatcagccacacccagaaagccaccctcgtgtgcctggctaccggcttctaccccgaccatgtggaactgtcttggtgggtcaacggcaaagaggtgcacagcggcgtgtgtaccgacccccagccactgaaagaacagcccgccctgaacgacagccggtactgcctgagcagcagactgagagtgtccgccaccttctggcagaacccccggaaccacttcagatgccaggtgcagttctacggcctgagcgagaacgacgagtggacccaggacagagccaagcccgtgacccagatcgtgtctgccgaagcctggggcagagccgattgcgacgtgaagctggtggaaaagagcttcgagacagacaccaacctgaacttccagaacctgagcgtgatcggcttcagaatcctgctgctgaaagtggccggctttaacctgctgatgaccctgcggctgtggtccagcagggccaagcgatctggatctggagcaacaaacttctcactactcaaacaagcaggtgacgtggaggagaatcccgggcctactagtatggactggatttggcgcatccttttccttgtcggcgctgctaccggcgcccattccgggccccaggttcagctgcaagagtctggcggaggacttgctcaagctggcggaagcctgagactgtcttgtgccgcctctggcagaaccttcagcatgggctggtttagacaggcccctggcaaagagagagagttcgtcgccgccatcacatacagcggcggcagcccttactacgcctcttctgtcagaggccggttcaccatcagccgggacaacgccaagaacaccgtgtacctccagatgaacagcctgaagccagaggacaccgccgtgtactactgtgccgccaatccaacctacggcagcgactggaatgccgagaattggggccagggcacccaagtgacagtgtctagtggatccggcggcggaggatctggcggaggcggatctgggggcggaggctctttcgaacaagttcagctggttcagagcggagccgaagtgaagaaacctggcagcagcgtgaaggtgtcctgcaaagcaagcggcggcacctttagctcctacgccatccactgggttcgacaggcaccaggacaaggactggaatggatgggcagaatcatccccatcgagggcagagcctactacgcccagaaattccagggcagagtgaccatcaccgccgacgagtctacaagcaccgcctacatggaactgagcagcctgagaagcgaggataccgctgtgtactattgcgccagaggccggtacagctacagatattggttcgactactggggccagggcaccctggttacagtctcttctacgcgtatccagaaccctgatcctgccgtgtaccagctgcgggatagcaagagcagcgacaagagcgtgtgtctgttcaccgacttcgacagccagaccaacgtgtcccagagcaaggactccgacgtgtacatcaccgataagtgcgtgctggacatgcggagcatggacttcaagagcaactccgccgtggcctggtccaacaagtccgatttcgcctgcgccaacgccttcaacaacagcattatccccgaggacacattcttcccaagccccgagagcagctgcggctttaccagcgagagctaccagcagggcgtgctgagcgccaccatcctgtacgagatcctgctgggcaaggccaccctgtacgccgtgctggtgtctgccctggtgctgatggctatggtcaagcggaaggacagccgggga

SEQ ID NO: 39728 - DNA, 2283 bp, synthetic construct
  source 1..2283: mol_type = other DNA
atggccttaccagtgaccgccttgctcctgccgctggccttgctgctccacgccgccaggccggagatcgtgctgacacagtctcccgccacactgtcactgtctccaggcgaaagagccacactgagctgtagagccagccagagcgtgtcctcttacctggcctggtatcagcagaagcctggacaggctccccggctgctgatctacgatgccagcaatagagccacaggcatccccgccagattttctggctctggcagcggcaccgatttcaccctgaccataagcagcctggaacctgaggacttcgccgtgtactactgccagcagagaagcgactggcccctgacatttggcggcggaacaaaggtggaaatcaaactcgagatccagaaccctgatcctgccgtgtaccagctgcgggatagcaagagcagcgacaagagcgtgtgtctgttcaccgacttcgacagccagaccaacgtgtcccagagcaaggactccgacgtgtacatcaccgataagtgcgtgctggacatgcggagcatggacttcaagagcaactccgccgtggcctggtccaacaagtccgatttcgcctgcgccaacgccttcaacaacagcattatccccgaggacacattcttcccaagccccgagagcagctgcggctttaccagcgagagctaccagcagggcgtgctgagcgccaccatcctgtacgagatcctgctgggcaaggccaccctgtacgccgtgctggtgtctgccctggtgctgatggctatggtcaagcggaaggacagccggggacgcgccaagagaagcggatctggcgtgaagcagaccctgaatttcgacctgctgaagctggctggcgacgtggaatccaacccaggccctactagtatggactggatttggcgcatccttttccttgtcggcgctgctaccggcgcccattccgggccccaggttcagctgcaagagtctggcggaggacttgctcaagctggcggaagcctgagactgtcttgtgccgcctctggcagaaccttcagcatgggctggtttagacaggcccctggcaaagagagagagttcgtcgccgccatcacatacagcggcggcagcccttactacgcctcttctgtcagaggccggttcaccatcagccgggacaacgccaagaacaccgtgtacctccagatgaacagcctgaagccagaggacaccgccgtgtactactgtgccgccaatccaacctacggcagcgactggaatgccgagaattggggccagggcacccaagtgacagtgtctagtggatccggcggcggaggatctggcggaggcggatctgggggcggaggctctttcgaacaagttcagctggttcagagcggagccgaagtgaagaaacctggcagcagcgtgaaggtgtcctgcaaagcaagcggcggcacctttagctcctacgccatccactgggttcgacaggcaccaggacaaggactggaatggatgggcagaatcatccccatcgagggcagagcctactacgcccagaaattccagggcagagtgaccatcaccgccgacgagtctacaagcaccgcctacatggaactgagcagcctgagaagcgaggataccgctgtgtactattgcgccagaggccggtacagctacagatattggttcgactactggggccagggcaccctggttacagtctcttctacgcgtgaggacctgaagaacgtgttcccacctgaggtggccgtgttcgagcctagcgaggccgagatcagccacacccagaaagccaccctcgtgtgcctggctaccggcttctaccccgaccatgtggaactgtcttggtgggtcaacggcaaagaggtgcacagcggcgtgtgtaccgacccccagccactgaaagaacagcccgccctgaacgacagccggtactgcctgagcagcagactgagagtgtccgccaccttctggcagaacccccggaaccacttcagatgccaggtgcagttctacggcctgagcgagaacgacgagtggacccaggacagagccaagcccgtgacccagatcgtgtctgccgaagcctggggcagagccgattgcgacgtgaagctggtggaaaagagcttcgagacagacaccaacctgaacttccagaacctgagcgtgatcggcttcagaatcctgctgctgaaagtggccggctttaacctgctgatgaccctgcggctgtggtccagc

SEQ ID NO: 39729 - DNA, 2289 bp, synthetic construct
  source 1..2289: mol_type = other DNA
atggccttaccagtgaccgccttgctcctgccgctggccttgctgctccacgccgccaggccggaagtgcaactggtggaatctggaggctctctggtgcagccagggggaagcctgagactgtcttgtgccgcttccggcttcaccttcgacgactacgccatgagctgggtgcgccaggtgccaggcaaaggcctggaatgggtgtccagcatcaactggagcggcacccacaccgattacgccgactccgtgaaaggcagattcacaatcagcagaaacaacgccaacaataccctgtacctgcagatgaactccctgaagtctgaggatacagcagtgtattattgcgccaagaactggcgggacgccggcaccacttggtttgagaaaagcggctctgccggacagggaacccaagtgacagtgtcctccggtaccggcggaggcggatctggcggcggaggtagcggtggcggaggatctgaattcgagatcgtgctgacacagtctcccgccacactgtcactgtctccaggcgaaagagccacactgagctgtagagccagccagagcgtgtcctcttacctggcctggtatcagcagaagcctggacaggctccccggctgctgatctacgatgccagcaatagagccacaggcatccccgccagattttctggctctggcagcggcaccgatttcaccctgaccataagcagcctggaacctgaggacttcgccgtgtactactgccagcagagaagcgactggcccctgacatttggcggcggaacaaaggtggaaatcaaactcgaggacctgaagaacgtgttcccacctgaggtggccgtgttcgagcctagcgaggccgagatcagccacacccagaaagccaccctcgtgtgcctggctaccggcttctaccccgaccatgtggaactgtcttggtgggtcaacggcaaagaggtgcacagcggcgtgtgtaccgacccccagccactgaaagaacagcccgccctgaacgacagccggtactgcctgagcagcagactgagagtgtccgccaccttctggcagaacccccggaaccacttcagatgccaggtgcagttctacggcctgagcgagaacgacgagtggacccaggacagagccaagcccgtgacccagatcgtgtctgccgaagcctggggcagagccgattgcgacgtgaagctggtggaaaagagcttcgagacagacaccaacctgaacttccagaacctgagcgtgatcggcttcagaatcctgctgctgaaagtggccggctttaacctgctgatgaccctgcggctgtggtccagcagggccaagcgatctggatctggagcaacaaacttctcactactcaaacaagcaggtgacgtggaggagaatcccgggcctactagtatggactggatttggcgcatccttttccttgtcggcgctgctaccggcgcgcattccttcgaacaagttcagctggttcagagcggagccgaagtgaagaaacctggcagcagcgtgaaggtgtcctgcaaagcaagcggcggcacctttagctcctacgccatccactgggttcgacaggcaccaggacaaggactggaatggatgggcagaatcatccccatcgagggcagagcctactacgcccagaaattccagggcagagtgaccatcaccgccgacgagtctacaagcaccgcctacatggaactgagcagcctgagaagcgaggataccgctgtgtactattgcgccagaggccggtacagctacagatattggttcgactactggggccagggcaccctggttacagtctcttctacgcgtatccagaaccctgatcctgccgtgtaccagctgcgggatagcaagagcagcgacaagagcgtgtgtctgttcaccgacttcgacagccagaccaacgtgtcccagagcaaggactccgacgtgtacatcaccgataagtgcgtgctggacatgcggagcatggacttcaagagcaactccgccgtggcctggtccaacaagtccgatttcgcctgcgccaacgccttcaacaacagcattatccccgaggacacattcttcccaagccccgagagcagctgcggctttaccagcgagagctaccagcagggcgtgctgagcgccaccatcctgtacgagatcctgctgggcaaggccaccctgtacgccgtgctggtgtctgccctggtgctgatggctatggtcaagcggaaggacagccgggga

SEQ ID NO: 39730 - DNA, 2301 bp, synthetic construct
  source 1..2301: mol_type = other DNA
atggccttaccagtgaccgccttgctcctgccgctggccttgctgctccacgccgccaggccggaagtgcaactggtggaatctggaggctctctggtgcagccagggggaagcctgagactgtcttgtgccgcttccggcttcaccttcgacgactacgccatgagctgggtgcgccaggtgccaggcaaaggcctggaatgggtgtccagcatcaactggagcggcacccacaccgattacgccgactccgtgaaaggcagattcacaatcagcagaaacaacgccaacaataccctgtacctgcagatgaactccctgaagtctgaggatacagcagtgtattattgcgccaagaactggcgggacgccggcaccacttggtttgagaaaagcggctctgccggacagggaacccaagtgacagtgtcctccggtaccggcggaggcggatctggcggcggaggtagcggtggcggaggatctgaattcgagatcgtgctgacacagtctcccgccacactgtcactgtctccaggcgaaagagccacactgagctgtagagccagccagagcgtgtcctcttacctggcctggtatcagcagaagcctggacaggctccccggctgctgatctacgatgccagcaatagagccacaggcatccccgccagattttctggctctggcagcggcaccgatttcaccctgaccataagcagcctggaacctgaggacttcgccgtgtactactgccagcagagaagcgactggcccctgacatttggcggcggaacaaaggtggaaatcaaactcgagatccagaaccctgatcctgccgtgtaccagctgcgggatagcaagagcagcgacaagagcgtgtgtctgttcaccgacttcgacagccagaccaacgtgtcccagagcaaggactccgacgtgtacatcaccgataagtgcgtgctggacatgcggagcatggacttcaagagcaactccgccgtggcctggtccaacaagtccgatttcgcctgcgccaacgccttcaacaacagcattatccccgaggacacattcttcccaagccccgagagcagctgcggctttaccagcgagagctaccagcagggcgtgctgagcgccaccatcctgtacgagatcctgctgggcaaggccaccctgtacgccgtgctggtgtctgccctggtgctgatggctatggtcaagcggaaggacagccggggacgcgccaagagaagcggatctggcgtgaagcagaccctgaatttcgacctgctgaagctggctggcgacgtggaatccaacccaggccctactagtatggactggatttggcgcatccttttccttgtcggcgctgctaccggcgcgcattccttcgaacaagttcagctggttcagagcggagccgaagtgaagaaacctggcagcagcgtgaaggtgtcctgcaaagcaagcggcggcacctttagctcctacgccatccactgggttcgacaggcaccaggacaaggactggaatggatgggcagaatcatccccatcgagggcagagcctactacgcccagaaattccagggcagagtgaccatcaccgccgacgagtctacaagcaccgcctacatggaactgagcagcctgagaagcgaggataccgctgtgtactattgcgccagaggccggtacagctacagatattggttcgactactggggccagggcaccctggttacagtctcttctacgcgtgaggacctgaagaacgtgttcccacctgaggtggccgtgttcgagcctagcgaggccgagatcagccacacccagaaagccaccctcgtgtgcctggctaccggcttctaccccgaccatgtggaactgtcttggtgggtcaacggcaaagaggtgcacagcggcgtgtgtaccgacccccagccactgaaagaacagcccgccctgaacgacagccggtactgcctgagcagcagactgagagtgtccgccaccttctggcagaacccccggaaccacttcagatgccaggtgcagttctacggcctgagcgagaacgacgagtggacccaggacagagccaagcccgtgacccagatcgtgtctgccgaagcctggggcagagccgattgcgacgtgaagctggtggaaaagagcttcgagacagacaccaacctgaacttccagaacctgagcgtgatcggcttcagaatcctgctgctgaaagtggccggctttaacctgctgatgaccctgcggctgtggtccagc

SEQ ID NO: 39731 - DNA, 2283 bp, synthetic construct
  source 1..2283: mol_type = other DNA
atggccttaccagtgaccgccttgctcctgccgctggccttgctgctccacgccgccaggccggaagttcagctgcttgagtctggcggaggactggttcaacctggcggaagcctgagactgtcttgtgccgccagcggcttcatcttcagcagctacgccatgagctgggtccgacaggctcctggaaagggccaagaatgggtttccggcgttagcggcacaggcgtgaacacctactacgccgatagcgtgaagggcagattcaccatcagccgggacaacagcaagaacaccctgtacctccagatgaacagcctgagagccgaggacaccgccgtgtactattgtgcctctggcaaaggctgggacagcggctcttggtacgaggactatagaggccagggcaccctggtcacagtttcttcaggtaccggcggaggcggatctggcggcggaggtagcggtggcggaggatctgaattcgagatcgtgctgacacagtctcccgccacactgtcactgtctccaggcgaaagagccacactgagctgtagagccagccagagcgtgtcctcttacctggcctggtatcagcagaagcctggacaggctccccggctgctgatctacgatgccagcaatagagccacaggcatccccgccagattttctggctctggcagcggcaccgatttcaccctgaccataagcagcctggaacctgaggacttcgccgtgtactactgccagcagagaagcgactggcccctgacatttggcggcggaacaaaggtggaaatcaaactcgaggacctgaagaacgtgttcccacctgaggtggccgtgttcgagcctagcgaggccgagatcagccacacccagaaagccaccctcgtgtgcctggctaccggcttctaccccgaccatgtggaactgtcttggtgggtcaacggcaaagaggtgcacagcggcgtgtgtaccgacccccagccactgaaagaacagcccgccctgaacgacagccggtactgcctgagcagcagactgagagtgtccgccaccttctggcagaacccccggaaccacttcagatgccaggtgcagttctacggcctgagcgagaacgacgagtggacccaggacagagccaagcccgtgacccagatcgtgtctgccgaagcctggggcagagccgattgcgacgtgaagctggtggaaaagagcttcgagacagacaccaacctgaacttccagaacctgagcgtgatcggcttcagaatcctgctgctgaaagtggccggctttaacctgctgatgaccctgcggctgtggtccagcagggccaagcgatctggatctggagcaacaaacttctcactactcaaacaagcaggtgacgtggaggagaatcccgggcctactagtatggactggatttggcgcatccttttccttgtcggcgctgctaccggcgcgcattccttcgaacaagttcagctggttcagagcggagccgaagtgaagaaacctggcagcagcgtgaaggtgtcctgcaaagcaagcggcggcacctttagctcctacgccatccactgggttcgacaggcaccaggacaaggactggaatggatgggcagaatcatccccatcgagggcagagcctactacgcccagaaattccagggcagagtgaccatcaccgccgacgagtctacaagcaccgcctacatggaactgagcagcctgagaagcgaggataccgctgtgtactattgcgccagaggccggtacagctacagatattggttcgactactggggccagggcaccctggttacagtctcttctacgcgtatccagaaccctgatcctgccgtgtaccagctgcgggatagcaagagcagcgacaagagcgtgtgtctgttcaccgacttcgacagccagaccaacgtgtcccagagcaaggactccgacgtgtacatcaccgataagtgcgtgctggacatgcggagcatggacttcaagagcaactccgccgtggcctggtccaacaagtccgatttcgcctgcgccaacgccttcaacaacagcattatccccgaggacacattcttcccaagccccgagagcagctgcggctttaccagcgagagctaccagcagggcgtgctgagcgccaccatcctgtacgagatcctgctgggcaaggccaccctgtacgccgtgctggtgtctgccctggtgctgatggctatggtcaagcggaaggacagccgggga

SEQ ID NO: 39732 - DNA, 2295 bp, synthetic construct
  source 1..2295: mol_type = other DNA
atggccttaccagtgaccgccttgctcctgccgctggccttgctgctccacgccgccaggccggaagttcagctgcttgagtctggcggaggactggttcaacctggcggaagcctgagactgtcttgtgccgccagcggcttcatcttcagcagctacgccatgagctgggtccgacaggctcctggaaagggccaagaatgggtttccggcgttagcggcacaggcgtgaacacctactacgccgatagcgtgaagggcagattcaccatcagccgggacaacagcaagaacaccctgtacctccagatgaacagcctgagagccgaggacaccgccgtgtactattgtgcctctggcaaaggctgggacagcggctcttggtacgaggactatagaggccagggcaccctggtcacagtttcttcaggtaccggcggaggcggatctggcggcggaggtagcggtggcggaggatctgaattcgagatcgtgctgacacagtctcccgccacactgtcactgtctccaggcgaaagagccacactgagctgtagagccagccagagcgtgtcctcttacctggcctggtatcagcagaagcctggacaggctccccggctgctgatctacgatgccagcaatagagccacaggcatccccgccagattttctggctctggcagcggcaccgatttcaccctgaccataagcagcctggaacctgaggacttcgccgtgtactactgccagcagagaagcgactggcccctgacatttggcggcggaacaaaggtggaaatcaaactcgagatccagaaccctgatcctgccgtgtaccagctgcgggatagcaagagcagcgacaagagcgtgtgtctgttcaccgacttcgacagccagaccaacgtgtcccagagcaaggactccgacgtgtacatcaccgataagtgcgtgctggacatgcggagcatggacttcaagagcaactccgccgtggcctggtccaacaagtccgatttcgcctgcgccaacgccttcaacaacagcattatccccgaggacacattcttcccaagccccgagagcagctgcggctttaccagcgagagctaccagcagggcgtgctgagcgccaccatcctgtacgagatcctgctgggcaaggccaccctgtacgccgtgctggtgtctgccctggtgctgatggctatggtcaagcggaaggacagccggggacgcgccaagagaagcggatctggcgtgaagcagaccctgaatttcgacctgctgaagctggctggcgacgtggaatccaacccaggccctactagtatggactggatttggcgcatccttttccttgtcggcgctgctaccggcgcgcattccttcgaacaagttcagctggttcagagcggagccgaagtgaagaaacctggcagcagcgtgaaggtgtcctgcaaagcaagcggcggcacctttagctcctacgccatccactgggttcgacaggcaccaggacaaggactggaatggatgggcagaatcatccccatcgagggcagagcctactacgcccagaaattccagggcagagtgaccatcaccgccgacgagtctacaagcaccgcctacatggaactgagcagcctgagaagcgaggataccgctgtgtactattgcgccagaggccggtacagctacagatattggttcgactactggggccagggcaccctggttacagtctcttctacgcgtgaggacctgaagaacgtgttcccacctgaggtggccgtgttcgagcctagcgaggccgagatcagccacacccagaaagccaccctcgtgtgcctggctaccggcttctaccccgaccatgtggaactgtcttggtgggtcaacggcaaagaggtgcacagcggcgtgtgtaccgacccccagccactgaaagaacagcccgccctgaacgacagccggtactgcctgagcagcagactgagagtgtccgccaccttctggcagaacccccggaaccacttcagatgccaggtgcagttctacggcctgagcgagaacgacgagtggacccaggacagagccaagcccgtgacccagatcgtgtctgccgaagcctggggcagagccgattgcgacgtgaagctggtggaaaagagcttcgagacagacaccaacctgaacttccagaacctgagcgtgatcggcttcagaatcctgctgctgaaagtggccggctttaacctgctgatgaccctgcggctgtggtccagc

SEQ ID NO: 39733 - DNA, 2187 bp, synthetic construct
  source 1..2187: mol_type = other DNA
atggccttaccagtgaccgccttgctcctgccgctggccttgctgctccacgccgccaggccgatgctgcccgctcctaagaatctggtggtgtccagaatcaccgaggacagcgccagactgtcttggacagctcctgatgccgccttcgacagcttccccatccggtacatcgagacactgatctggggcgaagccatctggctggatgtgcctggaagcgagagaagctacgacctgaccggactgaagcctggcacagagtatgccgtggtcatcaccggcgtgaaaggcggcagattctctagccctctggtggcctctttcaccaccggtaccggcggaggcggatctggcggcggaggtagcggtggcggaggatctgaattcgagatcgtgctgacacagtctcccgccacactgtcactgtctccaggcgaaagagccacactgagctgtagagccagccagagcgtgtcctcttacctggcctggtatcagcagaagcctggacaggctccccggctgctgatctacgatgccagcaatagagccacaggcatccccgccagattttctggctctggcagcggcaccgatttcaccctgaccataagcagcctggaacctgaggacttcgccgtgtactactgccagcagagaagcgactggcccctgacatttggcggcggaacaaaggtggaaatcaaactcgaggacctgaagaacgtgttcccacctgaggtggccgtgttcgagcctagcgaggccgagatcagccacacccagaaagccaccctcgtgtgcctggctaccggcttctaccccgaccatgtggaactgtcttggtgggtcaacggcaaagaggtgcacagcggcgtgtgtaccgacccccagccactgaaagaacagcccgccctgaacgacagccggtactgcctgagcagcagactgagagtgtccgccaccttctggcagaacccccggaaccacttcagatgccaggtgcagttctacggcctgagcgagaacgacgagtggacccaggacagagccaagcccgtgacccagatcgtgtctgccgaagcctggggcagagccgattgcgacgtgaagctggtggaaaagagcttcgagacagacaccaacctgaacttccagaacctgagcgtgatcggcttcagaatcctgctgctgaaagtggccggctttaacctgctgatgaccctgcggctgtggtccagcagggccaagcgatctggatctggagcaacaaacttctcactactcaaacaagcaggtgacgtggaggagaatcccgggcctactagtatggactggatttggcgcatccttttccttgtcggcgctgctaccggcgcgcattccttcgaacaagttcagctggttcagagcggagccgaagtgaagaaacctggcagcagcgtgaaggtgtcctgcaaagcaagcggcggcacctttagctcctacgccatccactgggttcgacaggcaccaggacaaggactggaatggatgggcagaatcatccccatcgagggcagagcctactacgcccagaaattccagggcagagtgaccatcaccgccgacgagtctacaagcaccgcctacatggaactgagcagcctgagaagcgaggataccgctgtgtactattgcgccagaggccggtacagctacagatattggttcgactactggggccagggcaccctggttacagtctcttctacgcgtatccagaaccctgatcctgccgtgtaccagctgcgggatagcaagagcagcgacaagagcgtgtgtctgttcaccgacttcgacagccagaccaacgtgtcccagagcaaggactccgacgtgtacatcaccgataagtgcgtgctggacatgcggagcatggacttcaagagcaactccgccgtggcctggtccaacaagtccgatttcgcctgcgccaacgccttcaacaacagcattatccccgaggacacattcttcccaagccccgagagcagctgcggctttaccagcgagagctaccagcagggcgtgctgagcgccaccatcctgtacgagatcctgctgggcaaggccaccctgtacgccgtgctggtgtctgccctggtgctgatggctatggtcaagcggaaggacagccgggga

SEQ ID NO: 39734 - DNA, 2199 bp, synthetic construct
  source 1..2199: mol_type = other DNA
atggccttaccagtgaccgccttgctcctgccgctggccttgctgctccacgccgccaggccgatgctgcccgctcctaagaatctggtggtgtccagaatcaccgaggacagcgccagactgtcttggacagctcctgatgccgccttcgacagcttccccatccggtacatcgagacactgatctggggcgaagccatctggctggatgtgcctggaagcgagagaagctacgacctgaccggactgaagcctggcacagagtatgccgtggtcatcaccggcgtgaaaggcggcagattctctagccctctggtggcctctttcaccaccggtaccggcggaggcggatctggcggcggaggtagcggtggcggaggatctgaattcgagatcgtgctgacacagtctcccgccacactgtcactgtctccaggcgaaagagccacactgagctgtagagccagccagagcgtgtcctcttacctggcctggtatcagcagaagcctggacaggctccccggctgctgatctacgatgccagcaatagagccacaggcatccccgccagattttctggctctggcagcggcaccgatttcaccctgaccataagcagcctggaacctgaggacttcgccgtgtactactgccagcagagaagcgactggcccctgacatttggcggcggaacaaaggtggaaatcaaactcgagatccagaaccctgatcctgccgtgtaccagctgcgggatagcaagagcagcgacaagagcgtgtgtctgttcaccgacttcgacagccagaccaacgtgtcccagagcaaggactccgacgtgtacatcaccgataagtgcgtgctggacatgcggagcatggacttcaagagcaactccgccgtggcctggtccaacaagtccgatttcgcctgcgccaacgccttcaacaacagcattatccccgaggacacattcttcccaagccccgagagcagctgcggctttaccagcgagagctaccagcagggcgtgctgagcgccaccatcctgtacgagatcctgctgggcaaggccaccctgtacgccgtgctggtgtctgccctggtgctgatggctatggtcaagcggaaggacagccggggacgcgccaagagaagcggatctggcgtgaagcagaccctgaatttcgacctgctgaagctggctggcgacgtggaatccaacccaggccctactagtatggactggatttggcgcatccttttccttgtcggcgctgctaccggcgcgcattccttcgaacaagttcagctggttcagagcggagccgaagtgaagaaacctggcagcagcgtgaaggtgtcctgcaaagcaagcggcggcacctttagctcctacgccatccactgggttcgacaggcaccaggacaaggactggaatggatgggcagaatcatccccatcgagggcagagcctactacgcccagaaattccagggcagagtgaccatcaccgccgacgagtctacaagcaccgcctacatggaactgagcagcctgagaagcgaggataccgctgtgtactattgcgccagaggccggtacagctacagatattggttcgactactggggccagggcaccctggttacagtctcttctacgcgtgaggacctgaagaacgtgttcccacctgaggtggccgtgttcgagcctagcgaggccgagatcagccacacccagaaagccaccctcgtgtgcctggctaccggcttctaccccgaccatgtggaactgtcttggtgggtcaacggcaaagaggtgcacagcggcgtgtgtaccgacccccagccactgaaagaacagcccgccctgaacgacagccggtactgcctgagcagcagactgagagtgtccgccaccttctggcagaacccccggaaccacttcagatgccaggtgcagttctacggcctgagcgagaacgacgagtggacccaggacagagccaagcccgtgacccagatcgtgtctgccgaagcctggggcagagccgattgcgacgtgaagctggtggaaaagagcttcgagacagacaccaacctgaacttccagaacctgagcgtgatcggcttcagaatcctgctgctgaaagtggccggctttaacctgctgatgaccctgcggctgtggtccagc

SEQ ID NO: 39735 - DNA, 2274 bp, synthetic construct
  source 1..2274: mol_type = other DNA
atggccttaccagtgaccgccttgctcctgccgctggccttgctgctccacgccgccaggccggaggtgcagctggttgaatctggcggaggactggttcagcctggcggatctctgagactgtcttgtgccgccagcggcttcaacatcaaggatacctgtatcggctgggttcgcagagcccctggcaaagaggaagaactggtcgccaaaatctgcaagtacagcggccacaccagatacgccgacagcgtgaagggcagattcaccatcagcgccgacaccagcaagaacaccgcctacctccagatgaacagcctgagagccgaggacaccgccgtgtactattgtgccgctgtgtccgtcagagatgggcactacaattactggggccagggcaccaccgtgaccgtttcttcaggtaccggcggaggcggatctggcggcggaggtagcggtggcggaggatctgaattcgagatcgtgctgacacagtctcccgccacactgtcactgtctccaggcgaaagagccacactgagctgtagagccagccagagcgtgtcctcttacctggcctggtatcagcagaagcctggacaggctccccggctgctgatctacgatgccagcaatagagccacaggcatccccgccagattttctggctctggcagcggcaccgatttcaccctgaccataagcagcctggaacctgaggacttcgccgtgtactactgccagcagagaagcgactggcccctgacatttggcggcggaacaaaggtggaaatcaaactcgaggacctgaagaacgtgttcccacctgaggtggccgtgttcgagcctagcgaggccgagatcagccacacccagaaagccaccctcgtgtgcctggctaccggcttctaccccgaccatgtggaactgtcttggtgggtcaacggcaaagaggtgcacagcggcgtgtgtaccgacccccagccactgaaagaacagcccgccctgaacgacagccggtactgcctgagcagcagactgagagtgtccgccaccttctggcagaacccccggaaccacttcagatgccaggtgcagttctacggcctgagcgagaacgacgagtggacccaggacagagccaagcccgtgacccagatcgtgtctgccgaagcctggggcagagccgattgcgacgtgaagctggtggaaaagagcttcgagacagacaccaacctgaacttccagaacctgagcgtgatcggcttcagaatcctgctgctgaaagtggccggctttaacctgctgatgaccctgcggctgtggtccagcagggccaagcgatctggatctggagcaacaaacttctcactactcaaacaagcaggtgacgtggaggagaatcccgggcctactagtatggactggatttggcgcatccttttccttgtcggcgctgctaccggcgcgcattccttcgaacaagttcagctggttcagagcggagccgaagtgaagaaacctggcagcagcgtgaaggtgtcctgcaaagcaagcggcggcacctttagctcctacgccatccactgggttcgacaggcaccaggacaaggactggaatggatgggcagaatcatccccatcgagggcagagcctactacgcccagaaattccagggcagagtgaccatcaccgccgacgagtctacaagcaccgcctacatggaactgagcagcctgagaagcgaggataccgctgtgtactattgcgccagaggccggtacagctacagatattggttcgactactggggccagggcaccctggttacagtctcttctacgcgtatccagaaccctgatcctgccgtgtaccagctgcgggatagcaagagcagcgacaagagcgtgtgtctgttcaccgacttcgacagccagaccaacgtgtcccagagcaaggactccgacgtgtacatcaccgataagtgcgtgctggacatgcggagcatggacttcaagagcaactccgccgtggcctggtccaacaagtccgatttcgcctgcgccaacgccttcaacaacagcattatccccgaggacacattcttcccaagccccgagagcagctgcggctttaccagcgagagctaccagcagggcgtgctgagcgccaccatcctgtacgagatcctgctgggcaaggccaccctgtacgccgtgctggtgtctgccctggtgctgatggctatggtcaagcggaaggacagccgggga

SEQ ID NO: 39736 - DNA, 2286 bp, synthetic construct
  source 1..2286: mol_type = other DNA
atggccttaccagtgaccgccttgctcctgccgctggccttgctgctccacgccgccaggccggaggtgcagctggttgaatctggcggaggactggttcagcctggcggatctctgagactgtcttgtgccgccagcggcttcaacatcaaggatacctgtatcggctgggttcgcagagcccctggcaaagaggaagaactggtcgccaaaatctgcaagtacagcggccacaccagatacgccgacagcgtgaagggcagattcaccatcagcgccgacaccagcaagaacaccgcctacctccagatgaacagcctgagagccgaggacaccgccgtgtactattgtgccgctgtgtccgtcagagatgggcactacaattactggggccagggcaccaccgtgaccgtttcttcaggtaccggcggaggcggatctggcggcggaggtagcggtggcggaggatctgaattcgagatcgtgctgacacagtctcccgccacactgtcactgtctccaggcgaaagagccacactgagctgtagagccagccagagcgtgtcctcttacctggcctggtatcagcagaagcctggacaggctccccggctgctgatctacgatgccagcaatagagccacaggcatccccgccagattttctggctctggcagcggcaccgatttcaccctgaccataagcagcctggaacctgaggacttcgccgtgtactactgccagcagagaagcgactggcccctgacatttggcggcggaacaaaggtggaaatcaaactcgagatccagaaccctgatcctgccgtgtaccagctgcgggatagcaagagcagcgacaagagcgtgtgtctgttcaccgacttcgacagccagaccaacgtgtcccagagcaaggactccgacgtgtacatcaccgataagtgcgtgctggacatgcggagcatggacttcaagagcaactccgccgtggcctggtccaacaagtccgatttcgcctgcgccaacgccttcaacaacagcattatccccgaggacacattcttcccaagccccgagagcagctgcggctttaccagcgagagctaccagcagggcgtgctgagcgccaccatcctgtacgagatcctgctgggcaaggccaccctgtacgccgtgctggtgtctgccctggtgctgatggctatggtcaagcggaaggacagccggggacgcgccaagagaagcggatctggcgtgaagcagaccctgaatttcgacctgctgaagctggctggcgacgtggaatccaacccaggccctactagtatggactggatttggcgcatccttttccttgtcggcgctgctaccggcgcgcattccttcgaacaagttcagctggttcagagcggagccgaagtgaagaaacctggcagcagcgtgaaggtgtcctgcaaagcaagcggcggcacctttagctcctacgccatccactgggttcgacaggcaccaggacaaggactggaatggatgggcagaatcatccccatcgagggcagagcctactacgcccagaaattccagggcagagtgaccatcaccgccgacgagtctacaagcaccgcctacatggaactgagcagcctgagaagcgaggataccgctgtgtactattgcgccagaggccggtacagctacagatattggttcgactactggggccagggcaccctggttacagtctcttctacgcgtgaggacctgaagaacgtgttcccacctgaggtggccgtgttcgagcctagcgaggccgagatcagccacacccagaaagccaccctcgtgtgcctggctaccggcttctaccccgaccatgtggaactgtcttggtgggtcaacggcaaagaggtgcacagcggcgtgtgtaccgacccccagccactgaaagaacagcccgccctgaacgacagccggtactgcctgagcagcagactgagagtgtccgccaccttctggcagaacccccggaaccacttcagatgccaggtgcagttctacggcctgagcgagaacgacgagtggacccaggacagagccaagcccgtgacccagatcgtgtctgccgaagcctggggcagagccgattgcgacgtgaagctggtggaaaagagcttcgagacagacaccaacctgaacttccagaacctgagcgtgatcggcttcagaatcctgctgctgaaagtggccggctttaacctgctgatgaccctgcggctgtggtccagc

SEQ ID NO: 39737 - DNA, 3390 bp, synthetic construct
  source 1..3390: mol_type = other DNA
atggccttaccagtgaccgccttgctcctgccgctggccttgctgctccacgccgccaggccggaagtgcagctggttgaatctggcggaggactggttcaggctggcggatctctgagactgtcttgtgccgccagcggcagaacctttagcatgggctggtttagacaggcccctggcaaagagagagagttcgtcgccgccatcacatactctggcggcagcccttactacgccgactctgtgaagggcagattcaccatcagccgggacaacgccaagaacaccgtgtacctccagatgaacagcctgaagcctgaggacaccgccgtgtactactgcgccgccaatccaacatacggcagcgactggaacgccgagaattggggccagggaacccaagtgacagtgtctagcggtaccggcggaggcggatctggcggcggaggtagcggtggcggaggatctgaattcgagatcgtgctgacacagtctcccgccacactgtcactgtctccaggcgaaagagccacactgagctgtagagccagccagagcgtgtcctcttacctggcctggtatcagcagaagcctggacaggctccccggctgctgatctacgatgccagcaatagagccacaggcatccccgccagattttctggctctggcagcggcaccgatttcaccctgaccataagcagcctggaacctgaggacttcgccgtgtactactgccagcagagaagcgactggcccctgacatttggcggcggaacaaaggtggaaatcaaactcgaggacctgaagaacgtgttcccacctgaggtggccgtgttcgagcctagcgaggccgagatcagccacacccagaaagccaccctcgtgtgcctggctaccggcttctaccccgaccatgtggaactgtcttggtgggtcaacggcaaagaggtgcacagcggcgtgtgtaccgacccccagccactgaaagaacagcccgccctgaacgacagccggtactgcctgagcagcagactgagagtgtccgccaccttctggcagaacccccggaaccacttcagatgccaggtgcagttctacggcctgagcgagaacgacgagtggacccaggacagagccaagcccgtgacccagatcgtgtctgccgaagcctggggcagagccgattgcgacgtgaagctggtggaaaagagcttcgagacagacaccaacctgaacttccagaacctgagcgtgatcggcttcagaatcctgctgctgaaagtggccggctttaacctgctgatgaccctgcggctgtggtccagcagggccaagcgatctggatctggagcaacaaacttctcactactcaaacaagcaggtgacgtggaggagaatcccgggcctactagtgccaccatggactggatttggcgcatccttttccttgtcggcgctgctaccggcgcccattccgggcccgaagtgcaactggttgaatccggtggcggcctggtgcaagcaggcggatctctcagacttagctgtgccgcctccggcagaaccttcacaatgggatggtttaggcaggctccagggaaagagagagagttcgtcgccgccatctctctgtctcccacactggcctactacgccgactctgtgaaaggccggttcaccatctccagagataatgccaagaacaccgtggtgctgcaaatgaactctctgaaacccgaggatacagccctgtactattgtgccgctgaccggaagtccgtgatgagcatcagacccgattactggggacagggcacacaagtcacagtgtcctctggatccggcggcggaggatctggcggaggcggatctgggggcggaggctctttcgaacaagttcagctggttcagagcggagccgaagtgaagaaacctggcagcagcgtgaaggtgtcctgcaaagcaagcggcggcacctttagctcctacgccatccactgggttcgacaggcaccaggacaaggactggaatggatgggcagaatcatccccatcgagggcagagcctactacgcccagaaattccagggcagagtgaccatcaccgccgacgagtctacaagcaccgcctacatggaactgagcagcctgagaagcgaggataccgctgtgtactattgcgccagaggccggtacagctacagatattggttcgactactggggccagggcaccctggttacagtctcttctacgcgtatccagaaccctgatcctgccgtgtaccagctgcgggatagcaagagcagcgacaagagcgtgtgtctgttcaccgacttcgacagccagaccaacgtgtcccagagcaaggactccgacgtgtacatcaccgataagtgcgtgctggacatgcggagcatggacttcaagagcaactccgccgtggcctggtccaacaagtccgatttcgcctgcgccaacgccttcaacaacagcattatccccgaggacacattcttcccaagccccgagagcagctgcggctttaccagcgagagctaccagcagggcgtgctgagcgccaccatcctgtacgagatcctgctgggcaaggccaccctgtacgccgtgctggtgtctgccctggtgctgatggctatggtcaagcggaaggacagccggggacgcgccaagagaagcggatctggcgtgaagcagaccctgaatttcgacctgctgaagctggctggcgacgtggaatccaacccaggcccttctagaggccatatgaccgagtacaagcccacggtgcgcctcgccacccgcgacgacgtccccagggccgtacgcaccctcgccgccgcgttcgccgactaccccgccacgcgccacaccgtcgatccggaccgccacatcgagcgggtcaccgagctgcaagaactcttcctcacgcgcgtcgggctcgacatcggcaaggtgtgggtcgcggacgacggcgccgcggtggcggtctggaccacgccggagagcgtcgaagcgggggcggtgttcgccgagatcggcccgcgcatggccgagttgagcggttcccggctggccgcgcagcaacagatggaaggcctcctggcgccgcaccggcccaaggagcccgcgtggttcctggccaccgtcggcgtctcgcccgaccaccagggcaagggtctgggcagcgccgtcgtgctccccggagtggaggcggccgagcgcgccggggtgcccgccttcctggagacctccgcgccccgcaacctccccttctacgagcggctcggcttcaccgtcaccgccgacgtcgaggtgcccgaaggaccgcgcacctggtgcatgacccgcaagcccggtgcctga

SEQ ID NO: 39738 - DNA, 2304 bp, synthetic construct
  source 1..2304: mol_type = other DNA
atggccttaccagtgaccgccttgctcctgccgctggccttgctgctccacgccgccaggccggaagtgcagctggttgaatctggcggaggactggttcagcctggcggatctctgagactgtcttgtgccgcctctggcttcgccagcgactactatatcatcggctggttcagacaggcccctggcaaagagagagagggcgtcagctgtatcagcagcagatacgccaacaccaactacgccgacagcgtgaagggcagattcaccatcagccgggacaacgccaagaacaccgtgtacctccagatgaacagcctgaagcctgaggacaccgccgtgtactactgtgccgccgacaccagaagatacacctgtcctgacattgccaccatgcaccggaacttcgattcttggggccagggcacactggtcaccgtttcttctggtaccggcggaggcggatctggcggcggaggtagcggtggcggaggatctgaattcgagatcgtgctgacacagtctcccgccacactgtcactgtctccaggcgaaagagccacactgagctgtagagccagccagagcgtgtcctcttacctggcctggtatcagcagaagcctggacaggctccccggctgctgatctacgatgccagcaatagagccacaggcatccccgccagattttctggctctggcagcggcaccgatttcaccctgaccataagcagcctggaacctgaggacttcgccgtgtactactgccagcagagaagcgactggcccctgacatttggcggcggaacaaaggtggaaatcaaactcgaggacctgaagaacgtgttcccacctgaggtggccgtgttcgagcctagcgaggccgagatcagccacacccagaaagccaccctcgtgtgcctggctaccggcttctaccccgaccatgtggaactgtcttggtgggtcaacggcaaagaggtgcacagcggcgtgtgtaccgacccccagccactgaaagaacagcccgccctgaacgacagccggtactgcctgagcagcagactgagagtgtccgccaccttctggcagaacccccggaaccacttcagatgccaggtgcagttctacggcctgagcgagaacgacgagtggacccaggacagagccaagcccgtgacccagatcgtgtctgccgaagcctggggcagagccgattgcgacgtgaagctggtggaaaagagcttcgagacagacaccaacctgaacttccagaacctgagcgtgatcggcttcagaatcctgctgctgaaagtggccggctttaacctgctgatgaccctgcggctgtggtccagcagggccaagcgatctggatctggagcaacaaacttctcactactcaaacaagcaggtgacgtggaggagaatcccgggcctactagtatggactggatttggcgcatccttttccttgtcggcgctgctaccggcgcgcattccttcgaacaagttcagctggttcagagcggagccgaagtgaagaaacctggcagcagcgtgaaggtgtcctgcaaagcaagcggcggcacctttagctcctacgccatccactgggttcgacaggcaccaggacaaggactggaatggatgggcagaatcatccccatcgagggcagagcctactacgcccagaaattccagggcagagtgaccatcaccgccgacgagtctacaagcaccgcctacatggaactgagcagcctgagaagcgaggataccgctgtgtactattgcgccagaggccggtacagctacagatattggttcgactactggggccagggcaccctggttacagtctcttctacgcgtatccagaaccctgatcctgccgtgtaccagctgcgggatagcaagagcagcgacaagagcgtgtgtctgttcaccgacttcgacagccagaccaacgtgtcccagagcaaggactccgacgtgtacatcaccgataagtgcgtgctggacatgcggagcatggacttcaagagcaactccgccgtggcctggtccaacaagtccgatttcgcctgcgccaacgccttcaacaacagcattatccccgaggacacattcttcccaagccccgagagcagctgcggctttaccagcgagagctaccagcagggcgtgctgagcgccaccatcctgtacgagatcctgctgggcaaggccaccctgtacgccgtgctggtgtctgccctggtgctgatggctatggtcaagcggaaggacagccggggataa

SEQ ID NO: 39739 - DNA, 2304 bp, synthetic construct
  source 1..2304: mol_type = other DNA
atggccttaccagtgaccgccttgctcctgccgctggccttgctgctccacgccgccaggccggaagtgcagctggttgaatctggcggaggactggttcagcctggcggatctctgagactgagctgtgaagccagcggcttcgccagcgacgattacatcatcggctggttcagacaggcccctggcaaagagagagagggcgtcagctgcatcagctctaagtacgccaacaccgtgtacaccgacagcgtgaagggcagattcagactgagcagaggcaccgccaagaataccgtgtacctccagatgagcgccctgaagcctgaggataccgccgtgtactactgcgctatggacagccgcagagtgacatgccctgagatcagcaccatgcaccggaacttcgattcttggggccagggcacactggtcacagtgtcatctggtaccggcggaggcggatctggcggcggaggtagcggtggcggaggatctgaattcgagatcgtgctgacacagtctcccgccacactgtcactgtctccaggcgaaagagccacactgagctgtagagccagccagagcgtgtcctcttacctggcctggtatcagcagaagcctggacaggctccccggctgctgatctacgatgccagcaatagagccacaggcatccccgccagattttctggctctggcagcggcaccgatttcaccctgaccataagcagcctggaacctgaggacttcgccgtgtactactgccagcagagaagcgactggcccctgacatttggcggcggaacaaaggtggaaatcaaactcgaggacctgaagaacgtgttcccacctgaggtggccgtgttcgagcctagcgaggccgagatcagccacacccagaaagccaccctcgtgtgcctggctaccggcttctaccccgaccatgtggaactgtcttggtgggtcaacggcaaagaggtgcacagcggcgtgtgtaccgacccccagccactgaaagaacagcccgccctgaacgacagccggtactgcctgagcagcagactgagagtgtccgccaccttctggcagaacccccggaaccacttcagatgccaggtgcagttctacggcctgagcgagaacgacgagtggacccaggacagagccaagcccgtgacccagatcgtgtctgccgaagcctggggcagagccgattgcgacgtgaagctggtggaaaagagcttcgagacagacaccaacctgaacttccagaacctgagcgtgatcggcttcagaatcctgctgctgaaagtggccggctttaacctgctgatgaccctgcggctgtggtccagcagggccaagcgatctggatctggagcaacaaacttctcactactcaaacaagcaggtgacgtggaggagaatcccgggcctactagtatggactggatttggcgcatccttttccttgtcggcgctgctaccggcgcgcattccttcgaacaagttcagctggttcagagcggagccgaagtgaagaaacctggcagcagcgtgaaggtgtcctgcaaagcaagcggcggcacctttagctcctacgccatccactgggttcgacaggcaccaggacaaggactggaatggatgggcagaatcatccccatcgagggcagagcctactacgcccagaaattccagggcagagtgaccatcaccgccgacgagtctacaagcaccgcctacatggaactgagcagcctgagaagcgaggataccgctgtgtactattgcgccagaggccggtacagctacagatattggttcgactactggggccagggcaccctggttacagtctcttctacgcgtatccagaaccctgatcctgccgtgtaccagctgcgggatagcaagagcagcgacaagagcgtgtgtctgttcaccgacttcgacagccagaccaacgtgtcccagagcaaggactccgacgtgtacatcaccgataagtgcgtgctggacatgcggagcatggacttcaagagcaactccgccgtggcctggtccaacaagtccgatttcgcctgcgccaacgccttcaacaacagcattatccccgaggacacattcttcccaagccccgagagcagctgcggctttaccagcgagagctaccagcagggcgtgctgagcgccaccatcctgtacgagatcctgctgggcaaggccaccctgtacgccgtgctggtgtctgccctggtgctgatggctatggtcaagcggaaggacagccggggataa

SEQ ID NO: 39740 - DNA, 2301 bp, synthetic construct
  source 1..2301: mol_type = other DNA
atggccttaccagtgaccgccttgctcctgccgctggccttgctgctccacgccgccaggccggaagtgcagctggttgaatctggcggaggactggttcagcctggcggatctctgagactgtcttgtgccgcctctggcttcgccagcgactactatatcatcggctggttcagacaggcccctggcaaagagagagagggcgtcagctgtatcagcagcagatacgccaacaccaactacgccgacagcgtgaagggcagattcaccatcagccgggacaacgccaagaacaccgtgtacctccagatgaacagcctgaagcctgaggacaccgccgtgtactactgtgccgccgacaccagaagatacacctgtcctgacattgccaccatgcaccggaacttcgattcttggggccagggcacactggtcaccgtttcttctggtaccggcggaggcggatctggcggcggaggtagcggtggcggaggatctgaattcgagatcgtgctgacacagtctcccgccacactgtcactgtctccaggcgaaagagccacactgagctgtagagccagccagagcgtgtcctcttacctggcctggtatcagcagaagcctggacaggctccccggctgctgatctacgatgccagcaatagagccacaggcatccccgccagattttctggctctggcagcggcaccgatttcaccctgaccataagcagcctggaacctgaggacttcgccgtgtactactgccagcagagaagcgactggcccctgacatttggcggcggaacaaaggtggaaatcaaactcgagatccagaaccctgatcctgccgtgtaccagctgcgggatagcaagagcagcgacaagagcgtgtgtctgttcaccgacttcgacagccagaccaacgtgtcccagagcaaggactccgacgtgtacatcaccgataagtgcgtgctggacatgcggagcatggacttcaagagcaactccgccgtggcctggtccaacaagtccgatttcgcctgcgccaacgccttcaacaacagcattatccccgaggacacattcttcccaagccccgagagcagctgcggctttaccagcgagagctaccagcagggcgtgctgagcgccaccatcctgtacgagatcctgctgggcaaggccaccctgtacgccgtgctggtgtctgccctggtgctgatggctatggtcaagcggaaggacagccggggaagggccaagcgatctggatctggagcaacaaacttctcactactcaaacaagcaggtgacgtggaggagaatcccgggcctactagtatggactggatttggcgcatccttttccttgtcggcgctgctaccggcgcgcattccttcgaacaagttcagctggttcagagcggagccgaagtgaagaaacctggcagcagcgtgaaggtgtcctgcaaagcaagcggcggcacctttagctcctacgccatccactgggttcgacaggcaccaggacaaggactggaatggatgggcagaatcatccccatcgagggcagagcctactacgcccagaaattccagggcagagtgaccatcaccgccgacgagtctacaagcaccgcctacatggaactgagcagcctgagaagcgaggataccgctgtgtactattgcgccagaggccggtacagctacagatattggttcgactactggggccagggcaccctggttacagtctcttctacgcgtgacctgaagaacgtgttcccacctgaggtggccgtgttcgagcctagcgaggccgagatcagccacacccagaaagccaccctcgtgtgcctggctaccggcttctaccccgaccatgtggaactgtcttggtgggtcaacggcaaagaggtgcacagcggcgtgtgtaccgacccccagccactgaaagaacagcccgccctgaacgacagccggtactgcctgagcagcagactgagagtgtccgccaccttctggcagaacccccggaaccacttcagatgccaggtgcagttctacggcctgagcgagaacgacgagtggacccaggacagagccaagcccgtgacccagatcgtgtctgccgaagcctggggcagagccgattgcgacgtgaagctggtggaaaagagcttcgagacagacaccaacctgaacttccagaacctgagcgtgatcggcttcagaatcctgctgctgaaagtggccggctttaacctgctgatgaccctgcggctgtggtccagc

SEQ ID NO: 39741 - DNA, 2301 bp, synthetic construct
  source 1..2301: mol_type = other DNA
atggccttaccagtgaccgccttgctcctgccgctggccttgctgctccacgccgccaggccggaagtgcagctggttgaatctggcggaggactggttcagcctggcggatctctgagactgagctgtgaagccagcggcttcgccagcgacgattacatcatcggctggttcagacaggcccctggcaaagagagagagggcgtcagctgcatcagctctaagtacgccaacaccgtgtacaccgacagcgtgaagggcagattcagactgagcagaggcaccgccaagaataccgtgtacctccagatgagcgccctgaagcctgaggataccgccgtgtactactgcgctatggacagccgcagagtgacatgccctgagatcagcaccatgcaccggaacttcgattcttggggccagggcacactggtcacagtgtcatctggtaccggcggaggcggatctggcggcggaggtagcggtggcggaggatctgaattcgagatcgtgctgacacagtctcccgccacactgtcactgtctccaggcgaaagagccacactgagctgtagagccagccagagcgtgtcctcttacctggcctggtatcagcagaagcctggacaggctccccggctgctgatctacgatgccagcaatagagccacaggcatccccgccagattttctggctctggcagcggcaccgatttcaccctgaccataagcagcctggaacctgaggacttcgccgtgtactactgccagcagagaagcgactggcccctgacatttggcggcggaacaaaggtggaaatcaaactcgagatccagaaccctgatcctgccgtgtaccagctgcgggatagcaagagcagcgacaagagcgtgtgtctgttcaccgacttcgacagccagaccaacgtgtcccagagcaaggactccgacgtgtacatcaccgataagtgcgtgctggacatgcggagcatggacttcaagagcaactccgccgtggcctggtccaacaagtccgatttcgcctgcgccaacgccttcaacaacagcattatccccgaggacacattcttcccaagccccgagagcagctgcggctttaccagcgagagctaccagcagggcgtgctgagcgccaccatcctgtacgagatcctgctgggcaaggccaccctgtacgccgtgctggtgtctgccctggtgctgatggctatggtcaagcggaaggacagccggggaagggccaagcgatctggatctggagcaacaaacttctcactactcaaacaagcaggtgacgtggaggagaatcccgggcctactagtatggactggatttggcgcatccttttccttgtcggcgctgctaccggcgcgcattccttcgaacaagttcagctggttcagagcggagccgaagtgaagaaacctggcagcagcgtgaaggtgtcctgcaaagcaagcggcggcacctttagctcctacgccatccactgggttcgacaggcaccaggacaaggactggaatggatgggcagaatcatccccatcgagggcagagcctactacgcccagaaattccagggcagagtgaccatcaccgccgacgagtctacaagcaccgcctacatggaactgagcagcctgagaagcgaggataccgctgtgtactattgcgccagaggccggtacagctacagatattggttcgactactggggccagggcaccctggttacagtctcttctacgcgtgacctgaagaacgtgttcccacctgaggtggccgtgttcgagcctagcgaggccgagatcagccacacccagaaagccaccctcgtgtgcctggctaccggcttctaccccgaccatgtggaactgtcttggtgggtcaacggcaaagaggtgcacagcggcgtgtgtaccgacccccagccactgaaagaacagcccgccctgaacgacagccggtactgcctgagcagcagactgagagtgtccgccaccttctggcagaacccccggaaccacttcagatgccaggtgcagttctacggcctgagcgagaacgacgagtggacccaggacagagccaagcccgtgacccagatcgtgtctgccgaagcctggggcagagccgattgcgacgtgaagctggtggaaaagagcttcgagacagacaccaacctgaacttccagaacctgagcgtgatcggcttcagaatcctgctgctgaaagtggccggctttaacctgctgatgaccctgcggctgtggtccagc

SEQ ID NO: 39742 - DNA, 2274 bp, synthetic construct
  source 1..2274: mol_type = other DNA
atggccttaccagtgaccgccttgctcctgccgctggccttgctgctccacgccgccaggccgcaagtcaaactggaagaaagcggtggcggcctggtgcaacctggcgaatctctgagactgagctgtagcgccagcggctccatcttcaaggtgttcagagtgttcgccatgagctggtacaggcaaggccctggcaagcagagagagctggtcgcctctatcagcagcggcgagacaaccacatacgccgaatctgtgaaaggccggttcaccatcagccgggataatgccaagaataccgcctatctccagatggactccctgaagcctgaagatacagctgtgtactactgcaacgccgaccataccttcaccggcgatttttggggccagggaacccaagtgaccgtgtctagtggtaccggcggaggcggatctggcggcggaggtagcggtggcggaggatctgaattcgagatcgtgctgacacagtctcccgccacactgtcactgtctccaggcgaaagagccacactgagctgtagagccagccagagcgtgtcctcttacctggcctggtatcagcagaagcctggacaggctccccggctgctgatctacgatgccagcaatagagccacaggcatccccgccagattttctggctctggcagcggcaccgatttcaccctgaccataagcagcctggaacctgaggacttcgccgtgtactactgccagcagagaagcgactggcccctgacatttggcggcggaacaaaggtggaaatcaaactcgagatccagaaccctgatcctgccgtgtaccagctgcgggatagcaagagcagcgacaagagcgtgtgtctgttcaccgacttcgacagccagaccaacgtgtcccagagcaaggactccgacgtgtacatcaccgataagtgcgtgctggacatgcggagcatggacttcaagagcaactccgccgtggcctggtccaacaagtccgatttcgcctgcgccaacgccttcaacaacagcattatccccgaggacacattcttcccaagccccgagagcagctgcggctttaccagcgagagctaccagcagggcgtgctgagcgccaccatcctgtacgagatcctgctgggcaaggccaccctgtacgccgtgctggtgtctgccctggtgctgatggctatggtcaagcggaaggacagccggggaagggccaagcgatctggatctggagcaacaaacttctcactactcaaacaagcaggtgacgtggaggagaatcccgggcctactagtatggactggatttggcgcatccttttccttgtcggcgctgctaccggcgcgcattccttcgaacaagttcagctggttcagagcggagccgaagtgaagaaacctggcagcagcgtgaaggtgtcctgcaaagcaagcggcggcacctttagctcctacgccatccactgggttcgacaggcaccaggacaaggactggaatggatgggcagaatcatccccatcgagggcagagcctactacgcccagaaattccagggcagagtgaccatcaccgccgacgagtctacaagcaccgcctacatggaactgagcagcctgagaagcgaggataccgctgtgtactattgcgccagaggccggtacagctacagatattggttcgactactggggccagggcaccctggttacagtctcttctacgcgtgacctgaagaacgtgttcccacctgaggtggccgtgttcgagcctagcgaggccgagatcagccacacccagaaagccaccctcgtgtgcctggctaccggcttctaccccgaccatgtggaactgtcttggtgggtcaacggcaaagaggtgcacagcggcgtgtgtaccgacccccagccactgaaagaacagcccgccctgaacgacagccggtactgcctgagcagcagactgagagtgtccgccaccttctggcagaacccccggaaccacttcagatgccaggtgcagttctacggcctgagcgagaacgacgagtggacccaggacagagccaagcccgtgacccagatcgtgtctgccgaagcctggggcagagccgattgcgacgtgaagctggtggaaaagagcttcgagacagacaccaacctgaacttccagaacctgagcgtgatcggcttcagaatcctgctgctgaaagtggccggctttaacctgctgatgaccctgcggctgtggtccagc

SEQ ID NO: 39743 - DNA, 2280 bp, synthetic construct
  source 1..2280: mol_type = other DNA
atggccttaccagtgaccgccttgctcctgccgctggccttgctgctccacgccgccaggccggagatcgtgctgacacagtctcccgccacactgtcactgtctccaggcgaaagagccacactgagctgtagagccagccagagcgtgtcctcttacctggcctggtatcagcagaagcctggacaggctccccggctgctgatctacgatgccagcaatagagccacaggcatccccgccagattttctggctctggcagcggcaccgatttcaccctgaccataagcagcctggaacctgaggacttcgccgtgtactactgccagcagagaagcgactggcccctgacatttggcggcggaacaaaggtggaaatcaaactcgaggacctgaagaacgtgttcccacctgaggtggccgtgttcgagcctagcgaggccgagatcagccacacccagaaagccaccctcgtgtgcctggctaccggcttctaccccgaccatgtggaactgtcttggtgggtcaacggcaaagaggtgcacagcggcgtgtgtaccgacccccagccactgaaagaacagcccgccctgaacgacagccggtactgcctgagcagcagactgagagtgtccgccaccttctggcagaacccccggaaccacttcagatgccaggtgcagttctacggcctgagcgagaacgacgagtggacccaggacagagccaagcccgtgacccagatcgtgtctgccgaagcctggggcagagccgattgcgacgtgaagctggtggaaaagagcttcgagacagacaccaacctgaacttccagaacctgagcgtgatcggcttcagaatcctgctgctgaaagtggccggctttaacctgctgatgaccctgcggctgtggtccagcagggccaagcgatctggatctggagcaacaaacttctcactactcaaacaagcaggtgacgtggaggagaatcccgggcctactagtgccaccatggactggatttggcgcatccttttccttgtcggcgctgctaccggcgcccattccgggcccgaagtgcagctggttgaatctggcggaggactggttcaggctggcggatctctgagactgtcttgtgccgccagcggcagaacctttagcatgggctggtttagacaggcccctggcaaagagagagagttcgtcgccgccatcacatactctggcggcagcccttactacgccgactctgtgaagggcagattcaccatcagccgggacaacgccaagaacaccgtgtacctccagatgaacagcctgaagcctgaggacaccgccgtgtactactgcgccgccaatccaacatacggcagcgactggaacgccgagaattggggccagggaacccaagtgacagtgtctagcggatccggcggcggaggatctggcggaggcggatctgggggcggaggctctttcgaacaagttcagctggttcagagcggagccgaagtgaagaaacctggcagcagcgtgaaggtgtcctgcaaagcaagcggcggcacctttagctcctacgccatccactgggttcgacaggcaccaggacaaggactggaatggatgggcagaatcatccccatcgagggcagagcctactacgcccagaaattccagggcagagtgaccatcaccgccgacgagtctacaagcaccgcctacatggaactgagcagcctgagaagcgaggataccgctgtgtactattgcgccagaggccggtacagctacagatattggttcgactactggggccagggcaccctggttacagtctcttctacgcgtatccagaaccctgatcctgccgtgtaccagctgcgggatagcaagagcagcgacaagagcgtgtgtctgttcaccgacttcgacagccagaccaacgtgtcccagagcaaggactccgacgtgtacatcaccgataagtgcgtgctggacatgcggagcatggacttcaagagcaactccgccgtggcctggtccaacaagtccgatttcgcctgcgccaacgccttcaacaacagcattatccccgaggacacattcttcccaagccccgagagcagctgcggctttaccagcgagagctaccagcagggcgtgctgagcgccaccatcctgtacgagatcctgctgggcaaggccaccctgtacgccgtgctggtgtctgccctggtgctgatggctatggtcaagcggaaggacagccggggataa

SEQ ID NO: 39744 - DNA, 2283 bp, synthetic construct
  source 1..2283: mol_type = other DNA
atggccttaccagtgaccgccttgctcctgccgctggccttgctgctccacgccgccaggccggagatcgtgctgacacagtctcccgccacactgtcactgtctccaggcgaaagagccacactgagctgtagagccagccagagcgtgtcctcttacctggcctggtatcagcagaagcctggacaggctccccggctgctgatctacgatgccagcaatagagccacaggcatccccgccagattttctggctctggcagcggcaccgatttcaccctgaccataagcagcctggaacctgaggacttcgccgtgtactactgccagcagagaagcgactggcccctgacatttggcggcggaacaaaggtggaaatcaaactcgaggacctgaagaacgtgttcccacctgaggtggccgtgttcgagcctagcgaggccgagatcagccacacccagaaagccaccctcgtgtgcctggctaccggcttctaccccgaccatgtggaactgtcttggtgggtcaacggcaaagaggtgcacagcggcgtgtgtaccgacccccagccactgaaagaacagcccgccctgaacgacagccggtactgcctgagcagcagactgagagtgtccgccaccttctggcagaacccccggaaccacttcagatgccaggtgcagttctacggcctgagcgagaacgacgagtggacccaggacagagccaagcccgtgacccagatcgtgtctgccgaagcctggggcagagccgattgcgacgtgaagctggtggaaaagagcttcgagacagacaccaacctgaacttccagaacctgagcgtgatcggcttcagaatcctgctgctgaaagtggccggctttaacctgctgatgaccctgcggctgtggtccagcagggccaagcgatctggatctggagcaacaaacttctcactactcaaacaagcaggtgacgtggaggagaatcccgggcctactagtgccaccatggactggatttggcgcatccttttccttgtcggcgctgctaccggcgcccattccgggcccgaagtgcaactggtggaatctgggggcggactggtgcagccaggcggaagtctgaggctgtcttgtgccgcctccggcagcatcttcggcttcaacgacatggcctggtatcggcaggctcccggaaaacagcgcgagctggtggctctgattagcagagtgggcgtgaccagcagcgccgactctgtgaagggcagattcacaatctccagagtgaacgccaaggatacagtgtacctccagatgaactctctgaaacctgaggatacagcagtgtactattgctacatggaccagcggctggacggcagcacactggcctactggggacagggaactcaagtgacagtgtctagcggatccggcggcggaggatctggcggaggcggatctgggggcggaggctctttcgaacaagttcagctggttcagagcggagccgaagtgaagaaacctggcagcagcgtgaaggtgtcctgcaaagcaagcggcggcacctttagctcctacgccatccactgggttcgacaggcaccaggacaaggactggaatggatgggcagaatcatccccatcgagggcagagcctactacgcccagaaattccagggcagagtgaccatcaccgccgacgagtctacaagcaccgcctacatggaactgagcagcctgagaagcgaggataccgctgtgtactattgcgccagaggccggtacagctacagatattggttcgactactggggccagggcaccctggttacagtctcttctacgcgtatccagaaccctgatcctgccgtgtaccagctgcgggatagcaagagcagcgacaagagcgtgtgtctgttcaccgacttcgacagccagaccaacgtgtcccagagcaaggactccgacgtgtacatcaccgataagtgcgtgctggacatgcggagcatggacttcaagagcaactccgccgtggcctggtccaacaagtccgatttcgcctgcgccaacgccttcaacaacagcattatccccgaggacacattcttcccaagccccgagagcagctgcggctttaccagcgagagctaccagcagggcgtgctgagcgccaccatcctgtacgagatcctgctgggcaaggccaccctgtacgccgtgctggtgtctgccctggtgctgatggctatggtcaagcggaaggacagccggggataa

SEQ ID NO: 39745 - DNA, 2271 bp, synthetic construct
  source 1..2271: mol_type = other DNA
atggccttaccagtgaccgccttgctcctgccgctggccttgctgctccacgccgccaggccggagatcgtgctgacacagtctcccgccacactgtcactgtctccaggcgaaagagccacactgagctgtagagccagccagagcgtgtcctcttacctggcctggtatcagcagaagcctggacaggctccccggctgctgatctacgatgccagcaatagagccacaggcatccccgccagattttctggctctggcagcggcaccgatttcaccctgaccataagcagcctggaacctgaggacttcgccgtgtactactgccagcagagaagcgactggcccctgacatttggcggcggaacaaaggtggaaatcaaactcgaggacctgaagaacgtgttcccacctgaggtggccgtgttcgagcctagcgaggccgagatcagccacacccagaaagccaccctcgtgtgcctggctaccggcttctaccccgaccatgtggaactgtcttggtgggtcaacggcaaagaggtgcacagcggcgtgtgtaccgacccccagccactgaaagaacagcccgccctgaacgacagccggtactgcctgagcagcagactgagagtgtccgccaccttctggcagaacccccggaaccacttcagatgccaggtgcagttctacggcctgagcgagaacgacgagtggacccaggacagagccaagcccgtgacccagatcgtgtctgccgaagcctggggcagagccgattgcgacgtgaagctggtggaaaagagcttcgagacagacaccaacctgaacttccagaacctgagcgtgatcggcttcagaatcctgctgctgaaagtggccggctttaacctgctgatgaccctgcggctgtggtccagcagggccaagcgatctggatctggagcaacaaacttctcactactcaaacaagcaggtgacgtggaggagaatcccgggcctactagtgccaccatggactggatttggcgcatccttttccttgtcggcgctgctaccggcgcccattccgggcccgaggtgcagctggttgaatctggcggaggactggttcaggctggcggatctctgagactgtcttgtgccgccagcggctctgtgttcagcggcaatgtgatgggctggtacagacaggcccctggcaaagaaagagagtgggttgccgccattgccagcggcggcagcatctactacagagactctgtgaagggcagattcaccatcagccgggacaacgccaagaacaccgtgtacctccagatgaacagcctgaagcctgaggacaccgccgtgtactactgcaactctcaccctcctacactgccctattggggcctgggaacccaagtgacagtgtcctctggatccggcggcggaggatctggcggaggcggatctgggggcggaggctctttcgaacaagttcagctggttcagagcggagccgaagtgaagaaacctggcagcagcgtgaaggtgtcctgcaaagcaagcggcggcacctttagctcctacgccatccactgggttcgacaggcaccaggacaaggactggaatggatgggcagaatcatccccatcgagggcagagcctactacgcccagaaattccagggcagagtgaccatcaccgccgacgagtctacaagcaccgcctacatggaactgagcagcctgagaagcgaggataccgctgtgtactattgcgccagaggccggtacagctacagatattggttcgactactggggccagggcaccctggttacagtctcttctacgcgtatccagaaccctgatcctgccgtgtaccagctgcgggatagcaagagcagcgacaagagcgtgtgtctgttcaccgacttcgacagccagaccaacgtgtcccagagcaaggactccgacgtgtacatcaccgataagtgcgtgctggacatgcggagcatggacttcaagagcaactccgccgtggcctggtccaacaagtccgatttcgcctgcgccaacgccttcaacaacagcattatccccgaggacacattcttcccaagccccgagagcagctgcggctttaccagcgagagctaccagcagggcgtgctgagcgccaccatcctgtacgagatcctgctgggcaaggccaccctgtacgccgtgctggtgtctgccctggtgctgatggctatggtcaagcggaaggacagccggggataa

SEQ ID NO: 39746 - DNA, 2265 bp, synthetic construct
  source 1..2265: mol_type = other DNA
atggccttaccagtgaccgccttgctcctgccgctggccttgctgctccacgccgccaggccggagatcgtgctgacacagtctcccgccacactgtcactgtctccaggcgaaagagccacactgagctgtagagccagccagagcgtgtcctcttacctggcctggtatcagcagaagcctggacaggctccccggctgctgatctacgatgccagcaatagagccacaggcatccccgccagattttctggctctggcagcggcaccgatttcaccctgaccataagcagcctggaacctgaggacttcgccgtgtactactgccagcagagaagcgactggcccctgacatttggcggcggaacaaaggtggaaatcaaactcgaggacctgaagaacgtgttcccacctgaggtggccgtgttcgagcctagcgaggccgagatcagccacacccagaaagccaccctcgtgtgcctggctaccggcttctaccccgaccatgtggaactgtcttggtgggtcaacggcaaagaggtgcacagcggcgtgtgtaccgacccccagccactgaaagaacagcccgccctgaacgacagccggtactgcctgagcagcagactgagagtgtccgccaccttctggcagaacccccggaaccacttcagatgccaggtgcagttctacggcctgagcgagaacgacgagtggacccaggacagagccaagcccgtgacccagatcgtgtctgccgaagcctggggcagagccgattgcgacgtgaagctggtggaaaagagcttcgagacagacaccaacctgaacttccagaacctgagcgtgatcggcttcagaatcctgctgctgaaagtggccggctttaacctgctgatgaccctgcggctgtggtccagcagggccaagcgatctggatctggagcaacaaacttctcactactcaaacaagcaggtgacgtggaggagaatcccgggcctactagtgccaccatggactggatttggcgcatccttttccttgtcggcgctgctaccggcgcccattccgggcccgaagttcagctgctggaatctggcggaggactcgttcaacctggcggctctctgagactgagctgtgccgcttctggcttcagcttctctagctacgccctgagctgggttcgacaagctcccggaaagggccttgaatgggtgtccagcatcggcgagaatgacggcaccacagactatgccgatgccgtgaaaggccggtttaccatcagcagagacaattccaagaacacgctctatctgcaaatgaactccctgcgcgtggaagatacagccgtgtattattgcgtgaaggacggcatccactggggacagggaaccctggttacagtgtctagcggatccggcggcggaggatctggcggaggcggatctgggggcggaggctctttcgaacaagttcagctggttcagagcggagccgaagtgaagaaacctggcagcagcgtgaaggtgtcctgcaaagcaagcggcggcacctttagctcctacgccatccactgggttcgacaggcaccaggacaaggactggaatggatgggcagaatcatccccatcgagggcagagcctactacgcccagaaattccagggcagagtgaccatcaccgccgacgagtctacaagcaccgcctacatggaactgagcagcctgagaagcgaggataccgctgtgtactattgcgccagaggccggtacagctacagatattggttcgactactggggccagggcaccctggttacagtctcttctacgcgtatccagaaccctgatcctgccgtgtaccagctgcgggatagcaagagcagcgacaagagcgtgtgtctgttcaccgacttcgacagccagaccaacgtgtcccagagcaaggactccgacgtgtacatcaccgataagtgcgtgctggacatgcggagcatggacttcaagagcaactccgccgtggcctggtccaacaagtccgatttcgcctgcgccaacgccttcaacaacagcattatccccgaggacacattcttcccaagccccgagagcagctgcggctttaccagcgagagctaccagcagggcgtgctgagcgccaccatcctgtacgagatcctgctgggcaaggccaccctgtacgccgtgctggtgtctgccctggtgctgatggctatggtcaagcggaaggacagccggggataa

SEQ ID NO: 39747 - DNA, 3372 bp, synthetic construct
  source 1..3372: mol_type = other DNA
atgggacccagactgctgttttgggctctgctgtgtctgctcggcacaggacctgttgaagctggcgtgacacagagccccacacacctgattaagaccagaggccagcaggccacactgagatgcagccctatcagcggccacaccagcgtgtactggtatcagcaggctctcggactgggcctccagttcctgctttggtacgacgagggcgaagagagaaaccggggcaacttccctcctcggttttccggcagacagttccccaactacagcagcgagctgaacgtgaacgccctggaactggaagatagcgccctgtacctgtgtgcctcttctcttggtggacctcgcggactggctggactgagaggggatgagcagtttttcggccctggcaccagactgaccgtgctggaaggtaccggcggaggcggatctggcggcggagaattcgagatcgtgctgacacagtctcccgccacactgtcactgtctccaggcgaaagagccacactgagctgtagagccagccagagcgtgtcctcttacctggcctggtatcagcagaagcctggacaggctccccggctgctgatctacgatgccagcaatagagccacaggcatccccgccagattttctggctctggcagcggcaccgatttcaccctgaccataagcagcctggaacctgaggacttcgccgtgtactactgccagcagagaagcgactggcccctgacatttggcggcggaacaaaggtggaaatcaaactcgaggacctgaagaacgtgttcccacctgaggtggccgtgttcgagcctagcgaggccgagatcagccacacccagaaagccaccctcgtgtgcctggctaccggcttctaccccgaccatgtggaactgtcttggtgggtcaacggcaaagaggtgcacagcggcgtgtgtaccgacccccagccactgaaagaacagcccgccctgaacgacagccggtactgcctgagcagcagactgagagtgtccgccaccttctggcagaacccccggaaccacttcagatgccaggtgcagttctacggcctgagcgagaacgacgagtggacccaggacagagccaagcccgtgacccagatcgtgtctgccgaagcctggggcagagccgattgcgacgtgaagctggtggaaaagagcttcgagacagacaccaacctgaacttccagaacctgagcgtgatcggcttcagaatcctgctgctgaaagtggccggctttaacctgctgatgaccctgcggctgtggtccagcagggccaagcgatctggatctggagcaacaaacttctcactactcaaacaagcaggtgacgtggaggagaatcccgggcctactagtgccaccatggactggatttggcgcatccttttccttgtcggcgctgctaccggcgcccattccgggcccgaagtgcagctggttgaatctggcggaggactggttcaggctggcggatctctgagactgtcttgtgccgccagcggcagaacctttagcatgggctggtttagacaggcccctggcaaagagagagagttcgtcgccgccatcacatactctggcggcagcccttactacgccgactctgtgaagggcagattcaccatcagccgggacaacgccaagaacaccgtgtacctccagatgaacagcctgaagcctgaggacaccgccgtgtactactgcgccgccaatccaacatacggcagcgactggaacgccgagaattggggccagggaacccaagtgacagtgtctagcggatccggcggcggaggatctggcggaggcggatctgggggcggaggctctttcgaacaagttcagctggttcagagcggagccgaagtgaagaaacctggcagcagcgtgaaggtgtcctgcaaagcaagcggcggcacctttagctcctacgccatccactgggttcgacaggcaccaggacaaggactggaatggatgggcagaatcatccccatcgagggcagagcctactacgcccagaaattccagggcagagtgaccatcaccgccgacgagtctacaagcaccgcctacatggaactgagcagcctgagaagcgaggataccgctgtgtactattgcgccagaggccggtacagctacagatattggttcgactactggggccagggcaccctggttacagtctcttctacgcgtatccagaaccctgatcctgccgtgtaccagctgcgggatagcaagagcagcgacaagagcgtgtgtctgttcaccgacttcgacagccagaccaacgtgtcccagagcaaggactccgacgtgtacatcaccgataagtgcgtgctggacatgcggagcatggacttcaagagcaactccgccgtggcctggtccaacaagtccgatttcgcctgcgccaacgccttcaacaacagcattatccccgaggacacattcttcccaagccccgagagcagctgcggctttaccagcgagagctaccagcagggcgtgctgagcgccaccatcctgtacgagatcctgctgggcaaggccaccctgtacgccgtgctggtgtctgccctggtgctgatggctatggtcaagcggaaggacagccggggacgcgccaagagaagcggatctggcgtgaagcagaccctgaatttcgacctgctgaagctggctggcgacgtggaatccaacccaggcccttctagaggccatatgaccgagtacaagcccacggtgcgcctcgccacccgcgacgacgtccccagggccgtacgcaccctcgccgccgcgttcgccgactaccccgccacgcgccacaccgtcgatccggaccgccacatcgagcgggtcaccgagctgcaagaactcttcctcacgcgcgtcgggctcgacatcggcaaggtgtgggtcgcggacgacggcgccgcggtggcggtctggaccacgccggagagcgtcgaagcgggggcggtgttcgccgagatcggcccgcgcatggccgagttgagcggttcccggctggccgcgcagcaacagatggaaggcctcctggcgccgcaccggcccaaggagcccgcgtggttcctggccaccgtcggcgtctcgcccgaccaccagggcaagggtctgggcagcgccgtcgtgctccccggagtggaggcggccgagcgcgccggggtgcccgccttcctggagacctccgcgccccgcaacctccccttctacgagcggctcggcttcaccgtcaccgccgacgtcgaggtgcccgaaggaccgcgcacctggtgcatgacccgcaagcccggtgcctga

SEQ ID NO: 39748 - DNA, 3369 bp, synthetic construct
  source 1..3369: mol_type = other DNA
atgggacccagactgctgttttgggctctgctgtgtctgctcggcacaggacctgttgaagctggcgtgacacagagccccacacacctgattaagaccagaggccagcaggccacactgagatgcagccctatcagcggccacaccagcgtgtactggtatcagcaggctctcggactgggcctccagttcctgctttggtacgacgagggcgaagagagaaaccggggcaacttccctcctcggttttccggcagacagttccccaactacagcagcgagctgaacgtgaacgccctggaactggaagatagcgccctgtacctgtgtgccagctctctcggcggagatgaactgggagccgatggcaacgagcagttctttggccctggcaccagactgaccgtgctggaaggtaccggcggaggcggatctggcggcggaagcgaattcgagatcgtgctgacacagtctcccgccacactgtcactgtctccaggcgaaagagccacactgagctgtagagccagccagagcgtgtcctcttacctggcctggtatcagcagaagcctggacaggctccccggctgctgatctacgatgccagcaatagagccacaggcatccccgccagattttctggctctggcagcggcaccgatttcaccctgaccataagcagcctggaacctgaggacttcgccgtgtactactgccagcagagaagcgactggcccctgacatttggcggcggaacaaaggtggaaatcaaactcgaggacctgaagaacgtgttcccacctgaggtggccgtgttcgagcctagcgaggccgagatcagccacacccagaaagccaccctcgtgtgcctggctaccggcttctaccccgaccatgtggaactgtcttggtgggtcaacggcaaagaggtgcacagcggcgtgtgtaccgacccccagccactgaaagaacagcccgccctgaacgacagccggtactgcctgagcagcagactgagagtgtccgccaccttctggcagaacccccggaaccacttcagatgccaggtgcagttctacggcctgagcgagaacgacgagtggacccaggacagagccaagcccgtgacccagatcgtgtctgccgaagcctggggcagagccgattgcgacgtgaagctggtggaaaagagcttcgagacagacaccaacctgaacttccagaacctgagcgtgatcggcttcagaatcctgctgctgaaagtggccggctttaacctgctgatgaccctgcggctgtggtccagcagggccaagcgatctggatctggagcaacaaacttctcactactcaaacaagcaggtgacgtggaggagaatcccgggcctactagtgccaccatggactggatttggcgcatccttttccttgtcggcgctgctaccggcgcccattccgggcccgaagtgcagctggttgaatctggcggaggactggttcaggctggcggatctctgagactgtcttgtgccgccagcggcagaacctttagcatgggctggtttagacaggcccctggcaaagagagagagttcgtcgccgccatcacatactctggcggcagcccttactacgccgactctgtgaagggcagattcaccatcagccgggacaacgccaagaacaccgtgtacctccagatgaacagcctgaagcctgaggacaccgccgtgtactactgcgccgccaatccaacatacggcagcgactggaacgccgagaattggggccagggaacccaagtgacagtgtctagcggatccggcggcggaggatctggcggaggcggatctgggggcggaggctctttcgaacaagttcagctggttcagagcggagccgaagtgaagaaacctggcagcagcgtgaaggtgtcctgcaaagcaagcggcggcacctttagctcctacgccatccactgggttcgacaggcaccaggacaaggactggaatggatgggcagaatcatccccatcgagggcagagcctactacgcccagaaattccagggcagagtgaccatcaccgccgacgagtctacaagcaccgcctacatggaactgagcagcctgagaagcgaggataccgctgtgtactattgcgccagaggccggtacagctacagatattggttcgactactggggccagggcaccctggttacagtctcttctacgcgtatccagaaccctgatcctgccgtgtaccagctgcgggatagcaagagcagcgacaagagcgtgtgtctgttcaccgacttcgacagccagaccaacgtgtcccagagcaaggactccgacgtgtacatcaccgataagtgcgtgctggacatgcggagcatggacttcaagagcaactccgccgtggcctggtccaacaagtccgatttcgcctgcgccaacgccttcaacaacagcattatccccgaggacacattcttcccaagccccgagagcagctgcggctttaccagcgagagctaccagcagggcgtgctgagcgccaccatcctgtacgagatcctgctgggcaaggccaccctgtacgccgtgctggtgtctgccctggtgctgatggctatggtcaagcggaaggacagccggggacgcgccaagagaagcggatctggcgtgaagcagaccctgaatttcgacctgctgaagctggctggcgacgtggaatccaacccaggcccttctagaggccatatgaccgagtacaagcccacggtgcgcctcgccacccgcgacgacgtccccagggccgtacgcaccctcgccgccgcgttcgccgactaccccgccacgcgccacaccgtcgatccggaccgccacatcgagcgggtcaccgagctgcaagaactcttcctcacgcgcgtcgggctcgacatcggcaaggtgtgggtcgcggacgacggcgccgcggtggcggtctggaccacgccggagagcgtcgaagcgggggcggtgttcgccgagatcggcccgcgcatggccgagttgagcggttcccggctggccgcgcagcaacagatggaaggcctcctggcgccgcaccggcccaaggagcccgcgtggttcctggccaccgtcggcgtctcgcccgaccaccagggcaagggtctgggcagcgccgtcgtgctccccggagtggaggcggccgagcgcgccggggtgcccgccttcctggagacctccgcgccccgcaacctccccttctacgagcggctcggcttcaccgtcaccgccgacgtcgaggtgcccgaaggaccgcgcacctggtgcatgacccgcaagcccggtgcctga

SEQ ID NO: 39749 - DNA, 2844 bp, synthetic construct
  source 1..2844: mol_type = other DNA
atggccttaccagtgaccgccttgctcctgccgctggccttgctgctccacgccgccaggccggagatcgtgctgacacagtctcccgccacactgtcactgtctccaggcgaaagagccacactgagctgtagagccagccagagcgtgtcctcttacctggcctggtatcagcagaagcctggacaggctccccggctgctgatctacgatgccagcaatagagccacaggcatccccgccagattttctggctctggcagcggcaccgatttcaccctgaccataagcagcctggaacctgaggacttcgccgtgtactactgccagcagagaagcgactggcccctgacatttggcggcggaacaaaggtggaaatcaaactcgaggacctgaagaacgtgttcccacctgaggtggccgtgttcgagcctagcgaggccgagatcagccacacccagaaagccaccctcgtgtgcctggctaccggcttctaccccgaccatgtggaactgtcttggtgggtcaacggcaaagaggtgcacagcggcgtgtgtaccgacccccagccactgaaagaacagcccgccctgaacgacagccggtactgcctgagcagcagactgagagtgtccgccaccttctggcagaacccccggaaccacttcagatgccaggtgcagttctacggcctgagcgagaacgacgagtggacccaggacagagccaagcccgtgacccagatcgtgtctgccgaagcctggggcagagccgattgcgacgtgaagctggtggaaaagagcttcgagacagacaccaacctgaacttccagaacctgagcgtgatcggcttcagaatcctgctgctgaaagtggccggctttaacctgctgatgaccctgcggctgtggtccagcagggccaagcgatctggatctggagcaacaaacttctcactactcaaacaagcaggtgacgtggaggagaatcccgggcctactagtgccaccatggactggatttggcgcatccttttccttgtcggcgctgctaccggcgcccattccgggcccatgggaagctggcttgagttctaccacagactcaacgccattgacagcaggctgtgggcacttggcggaagcgaagctgaactcgccgcttttgaaaaagaaattgccgctttcgagtccgagcttcaggcttacaaaggcaaagggaatcctgaggtcgagagcctgagagatcacgctgcccacattagagagtggttgcaggcataccggcacaatggatccggcggcggaggatctggcggaggcggatctgggggcggaggctctttcgaacaagttcagctggttcagagcggagccgaagtgaagaaacctggcagcagcgtgaaggtgtcctgcaaagcaagcggcggcacctttagctcctacgccatccactgggttcgacaggcaccaggacaaggactggaatggatgggcagaatcatccccatcgagggcagagcctactacgcccagaaattccagggcagagtgaccatcaccgccgacgagtctacaagcaccgcctacatggaactgagcagcctgagaagcgaggataccgctgtgtactattgcgccagaggccggtacagctacagatattggttcgactactggggccagggcaccctggttacagtctcttctacgcgtatccagaaccctgatcctgccgtgtaccagctgcgggatagcaagagcagcgacaagagcgtgtgtctgttcaccgacttcgacagccagaccaacgtgtcccagagcaaggactccgacgtgtacatcaccgataagtgcgtgctggacatgcggagcatggacttcaagagcaactccgccgtggcctggtccaacaagtccgatttcgcctgcgccaacgccttcaacaacagcattatccccgaggacacattcttcccaagccccgagagcagctgcggctttaccagcgagagctaccagcagggcgtgctgagcgccaccatcctgtacgagatcctgctgggcaaggccaccctgtacgccgtgctggtgtctgccctggtgctgatggctatggtcaagcggaaggacagccggggacgcgccaagagaagcggatctggcgtgaagcagaccctgaatttcgacctgctgaagctggctggcgacgtggaatccaacccaggcccttctagaggccatatgaccgagtacaagcccacggtgcgcctcgccacccgcgacgacgtccccagggccgtacgcaccctcgccgccgcgttcgccgactaccccgccacgcgccacaccgtcgatccggaccgccacatcgagcgggtcaccgagctgcaagaactcttcctcacgcgcgtcgggctcgacatcggcaaggtgtgggtcgcggacgacggcgccgcggtggcggtctggaccacgccggagagcgtcgaagcgggggcggtgttcgccgagatcggcccgcgcatggccgagttgagcggttcccggctggccgcgcagcaacagatggaaggcctcctggcgccgcaccggcccaaggagcccgcgtggttcctggccaccgtcggcgtctcgcccgaccaccagggcaagggtctgggcagcgccgtcgtgctccccggagtggaggcggccgagcgcgccggggtgcccgccttcctggagacctccgcgccccgcaacctccccttctacgagcggctcggcttcaccgtcaccgccgacgtcgaggtgcccgaaggaccgcgcacctggtgcatgacccgcaagcccggtgcctga

SEQ ID NO: 39750 - DNA, 2844 bp, synthetic construct
  source 1..2844: mol_type = other DNA
atggccttaccagtgaccgccttgctcctgccgctggccttgctgctccacgccgccaggccggcatgcatgggcagttggttcgagttctacgaccggctgaatgccatcgacgccagactgtgggctctcggaggatctgaagctgagctggccgccttcgagaaagagatcgccgcctttgagagcgagctgcaagcctacaaaggcaagggcaaccccgaggtggaaaacctgagagtgcacgccgctgccatcagagaatggctccaggcttacagacacaacggtaccggcggaggcggatctggcggcggaggtagcggtggcggaggatctgaattcgagatcgtgctgacacagtctcccgccacactgtcactgtctccaggcgaaagagccacactgagctgtagagccagccagagcgtgtcctcttacctggcctggtatcagcagaagcctggacaggctccccggctgctgatctacgatgccagcaatagagccacaggcatccccgccagattttctggctctggcagcggcaccgatttcaccctgaccataagcagcctggaacctgaggacttcgccgtgtactactgccagcagagaagcgactggcccctgacatttggcggcggaacaaaggtggaaatcaaactcgaggacctgaagaacgtgttcccacctgaggtggccgtgttcgagcctagcgaggccgagatcagccacacccagaaagccaccctcgtgtgcctggctaccggcttctaccccgaccatgtggaactgtcttggtgggtcaacggcaaagaggtgcacagcggcgtgtgtaccgacccccagccactgaaagaacagcccgccctgaacgacagccggtactgcctgagcagcagactgagagtgtccgccaccttctggcagaacccccggaaccacttcagatgccaggtgcagttctacggcctgagcgagaacgacgagtggacccaggacagagccaagcccgtgacccagatcgtgtctgccgaagcctggggcagagccgattgcgacgtgaagctggtggaaaagagcttcgagacagacaccaacctgaacttccagaacctgagcgtgatcggcttcagaatcctgctgctgaaagtggccggctttaacctgctgatgaccctgcggctgtggtccagcagggccaagcgatctggatctggagcaacaaacttctcactactcaaacaagcaggtgacgtggaggagaatcccgggcctactagtatggactggatttggcgcatccttttccttgtcggcgctgctaccggcgcgcattccttcgaacaagttcagctggttcagagcggagccgaagtgaagaaacctggcagcagcgtgaaggtgtcctgcaaagcaagcggcggcacctttagctcctacgccatccactgggttcgacaggcaccaggacaaggactggaatggatgggcagaatcatccccatcgagggcagagcctactacgcccagaaattccagggcagagtgaccatcaccgccgacgagtctacaagcaccgcctacatggaactgagcagcctgagaagcgaggataccgctgtgtactattgcgccagaggccggtacagctacagatattggttcgactactggggccagggcaccctggttacagtctcttctacgcgtatccagaaccctgatcctgccgtgtaccagctgcgggatagcaagagcagcgacaagagcgtgtgtctgttcaccgacttcgacagccagaccaacgtgtcccagagcaaggactccgacgtgtacatcaccgataagtgcgtgctggacatgcggagcatggacttcaagagcaactccgccgtggcctggtccaacaagtccgatttcgcctgcgccaacgccttcaacaacagcattatccccgaggacacattcttcccaagccccgagagcagctgcggctttaccagcgagagctaccagcagggcgtgctgagcgccaccatcctgtacgagatcctgctgggcaaggccaccctgtacgccgtgctggtgtctgccctggtgctgatggctatggtcaagcggaaggacagccggggacgcgccaagagaagcggatctggcgtgaagcagaccctgaatttcgacctgctgaagctggctggcgacgtggaatccaacccaggcccttctagaggccatatgaccgagtacaagcccacggtgcgcctcgccacccgcgacgacgtccccagggccgtacgcaccctcgccgccgcgttcgccgactaccccgccacgcgccacaccgtcgatccggaccgccacatcgagcgggtcaccgagctgcaagaactcttcctcacgcgcgtcgggctcgacatcggcaaggtgtgggtcgcggacgacggcgccgcggtggcggtctggaccacgccggagagcgtcgaagcgggggcggtgttcgccgagatcggcccgcgcatggccgagttgagcggttcccggctggccgcgcagcaacagatggaaggcctcctggcgccgcaccggcccaaggagcccgcgtggttcctggccaccgtcggcgtctcgcccgaccaccagggcaagggtctgggcagcgccgtcgtgctccccggagtggaggcggccgagcgcgccggggtgcccgccttcctggagacctccgcgccccgcaacctccccttctacgagcggctcggcttcaccgtcaccgccgacgtcgaggtgcccgaaggaccgcgcacctggtgcatgacccgcaagcccggtgcctga

SEQ ID NO: 39751 - DNA, 3195 bp, synthetic construct
  source 1..3195: mol_type = other DNA
atggccttaccagtgaccgccttgctcctgccgctggccttgctgctccacgccgccaggccggcatgcatggaccccgacctggaaatcagagccgccttcctgcggcagagaaacacagccctgagaacagaggtggccgagctggaacaagaggtgcagcggctggaaaacgaggtgtcccagtacgagacaagatacggccctctcggaggcggaaaaggtaccggcggaggcggatctggcggcggaggtagcggtggcggaggatctgaattcgagatcgtgctgacacagtctcccgccacactgtcactgtctccaggcgaaagagccacactgagctgtagagccagccagagcgtgtcctcttacctggcctggtatcagcagaagcctggacaggctccccggctgctgatctacgatgccagcaatagagccacaggcatccccgccagattttctggctctggcagcggcaccgatttcaccctgaccataagcagcctggaacctgaggacttcgccgtgtactactgccagcagagaagcgactggcccctgacatttggcggcggaacaaaggtggaaatcaaactcgaggacctgaagaacgtgttcccacctgaggtggccgtgttcgagcctagcgaggccgagatcagccacacccagaaagccaccctcgtgtgcctggctaccggcttctaccccgaccatgtggaactgtcttggtgggtcaacggcaaagaggtgcacagcggcgtgtgtaccgacccccagccactgaaagaacagcccgccctgaacgacagccggtactgcctgagcagcagactgagagtgtccgccaccttctggcagaacccccggaaccacttcagatgccaggtgcagttctacggcctgagcgagaacgacgagtggacccaggacagagccaagcccgtgacccagatcgtgtctgccgaagcctggggcagagccgattgcgacgtgaagctggtggaaaagagcttcgagacagacaccaacctgaacttccagaacctgagcgtgatcggcttcagaatcctgctgctgaaagtggccggctttaacctgctgatgaccctgcggctgtggtccagcagggccaagcgatctggatctggagcaacaaacttctcactactcaaacaagcaggtgacgtggaggagaatcccgggcctactagtgccaccatggactggatttggcgcatccttttccttgtcggcgctgctaccggcgcccattccgggcccgaagtgcagctggttgaatctggcggaggactggttcaggctggcggatctctgagactgtcttgtgccgccagcggcagaacctttagcatgggctggtttagacaggcccctggcaaagagagagagttcgtcgccgccatcacatactctggcggcagcccttactacgccgactctgtgaagggcagattcaccatcagccgggacaacgccaagaacaccgtgtacctccagatgaacagcctgaagcctgaggacaccgccgtgtactactgcgccgccaatccaacatacggcagcgactggaacgccgagaattggggccagggaacccaagtgacagtgtctagcggatccggcggcggaggatctggcggaggcggatctgggggcggaggctctttcgaacaagttcagctggttcagagcggagccgaagtgaagaaacctggcagcagcgtgaaggtgtcctgcaaagcaagcggcggcacctttagctcctacgccatccactgggttcgacaggcaccaggacaaggactggaatggatgggcagaatcatccccatcgagggcagagcctactacgcccagaaattccagggcagagtgaccatcaccgccgacgagtctacaagcaccgcctacatggaactgagcagcctgagaagcgaggataccgctgtgtactattgcgccagaggccggtacagctacagatattggttcgactactggggccagggcaccctggttacagtctcttctacgcgtatccagaaccctgatcctgccgtgtaccagctgcgggatagcaagagcagcgacaagagcgtgtgtctgttcaccgacttcgacagccagaccaacgtgtcccagagcaaggactccgacgtgtacatcaccgataagtgcgtgctggacatgcggagcatggacttcaagagcaactccgccgtggcctggtccaacaagtccgatttcgcctgcgccaacgccttcaacaacagcattatccccgaggacacattcttcccaagccccgagagcagctgcggctttaccagcgagagctaccagcagggcgtgctgagcgccaccatcctgtacgagatcctgctgggcaaggccaccctgtacgccgtgctggtgtctgccctggtgctgatggctatggtcaagcggaaggacagccggggacgcgccaagagaagcggatctggcgtgaagcagaccctgaatttcgacctgctgaagctggctggcgacgtggaatccaacccaggcccttctagaggccatatgaccgagtacaagcccacggtgcgcctcgccacccgcgacgacgtccccagggccgtacgcaccctcgccgccgcgttcgccgactaccccgccacgcgccacaccgtcgatccggaccgccacatcgagcgggtcaccgagctgcaagaactcttcctcacgcgcgtcgggctcgacatcggcaaggtgtgggtcgcggacgacggcgccgcggtggcggtctggaccacgccggagagcgtcgaagcgggggcggtgttcgccgagatcggcccgcgcatggccgagttgagcggttcccggctggccgcgcagcaacagatggaaggcctcctggcgccgcaccggcccaaggagcccgcgtggttcctggccaccgtcggcgtctcgcccgaccaccagggcaagggtctgggcagcgccgtcgtgctccccggagtggaggcggccgagcgcgccggggtgcccgccttcctggagacctccgcgccccgcaacctccccttctacgagcggctcggcttcaccgtcaccgccgacgtcgaggtgcccgaaggaccgcgcacctggtgcatgacccgcaagcccggtgcctga

SEQ ID NO: 39752 - DNA, 2844 bp, synthetic construct
  source 1..2844: mol_type = other DNA
atggccttaccagtgaccgccttgctcctgccgctggccttgctgctccacgccgccaggccggagatcgtgctgacacagtctcccgccacactgtcactgtctccaggcgaaagagccacactgagctgtagagccagccagagcgtgtcctcttacctggcctggtatcagcagaagcctggacaggctccccggctgctgatctacgatgccagcaatagagccacaggcatccccgccagattttctggctctggcagcggcaccgatttcaccctgaccataagcagcctggaacctgaggacttcgccgtgtactactgccagcagagaagcgactggcccctgacatttggcggcggaacaaaggtggaaatcaaactcgaggacctgaagaacgtgttcccacctgaggtggccgtgttcgagcctagcgaggccgagatcagccacacccagaaagccaccctcgtgtgcctggctaccggcttctaccccgaccatgtggaactgtcttggtgggtcaacggcaaagaggtgcacagcggcgtgtgtaccgacccccagccactgaaagaacagcccgccctgaacgacagccggtactgcctgagcagcagactgagagtgtccgccaccttctggcagaacccccggaaccacttcagatgccaggtgcagttctacggcctgagcgagaacgacgagtggacccaggacagagccaagcccgtgacccagatcgtgtctgccgaagcctggggcagagccgattgcgacgtgaagctggtggaaaagagcttcgagacagacaccaacctgaacttccagaacctgagcgtgatcggcttcagaatcctgctgctgaaagtggccggctttaacctgctgatgaccctgcggctgtggtccagcagggccaagcgatctggatctggagcaacaaacttctcactactcaaacaagcaggtgacgtggaggagaatcccgggcctactagtgccaccatggactggatttggcgcatccttttccttgtcggcgctgctaccggcgcccattccgggcccatgggatcttggagcgagttttacgatcggctgcacgccattcaccaccggctgtatgctctcggaggaagcgaagctgagctggccgcttttgaaaaagaaattgccgctttcgagtccgagcttcaggcttacaaaggcaaagggaatcctgaggtcgaggccctgagagataccgccgccttcatcagaacccggttgcaggcataccggcacaacggatccggcggcggaggatctggcggaggcggatctgggggcggaggctctttcgaacaagttcagctggttcagagcggagccgaagtgaagaaacctggcagcagcgtgaaggtgtcctgcaaagcaagcggcggcacctttagctcctacgccatccactgggttcgacaggcaccaggacaaggactggaatggatgggcagaatcatccccatcgagggcagagcctactacgcccagaaattccagggcagagtgaccatcaccgccgacgagtctacaagcaccgcctacatggaactgagcagcctgagaagcgaggataccgctgtgtactattgcgccagaggccggtacagctacagatattggttcgactactggggccagggcaccctggttacagtctcttctacgcgtatccagaaccctgatcctgccgtgtaccagctgcgggatagcaagagcagcgacaagagcgtgtgtctgttcaccgacttcgacagccagaccaacgtgtcccagagcaaggactccgacgtgtacatcaccgataagtgcgtgctggacatgcggagcatggacttcaagagcaactccgccgtggcctggtccaacaagtccgatttcgcctgcgccaacgccttcaacaacagcattatccccgaggacacattcttcccaagccccgagagcagctgcggctttaccagcgagagctaccagcagggcgtgctgagcgccaccatcctgtacgagatcctgctgggcaaggccaccctgtacgccgtgctggtgtctgccctggtgctgatggctatggtcaagcggaaggacagccggggacgcgccaagagaagcggatctggcgtgaagcagaccctgaatttcgacctgctgaagctggctggcgacgtggaatccaacccaggcccttctagaggccatatgaccgagtacaagcccacggtgcgcctcgccacccgcgacgacgtccccagggccgtacgcaccctcgccgccgcgttcgccgactaccccgccacgcgccacaccgtcgatccggaccgccacatcgagcgggtcaccgagctgcaagaactcttcctcacgcgcgtcgggctcgacatcggcaaggtgtgggtcgcggacgacggcgccgcggtggcggtctggaccacgccggagagcgtcgaagcgggggcggtgttcgccgagatcggcccgcgcatggccgagttgagcggttcccggctggccgcgcagcaacagatggaaggcctcctggcgccgcaccggcccaaggagcccgcgtggttcctggccaccgtcggcgtctcgcccgaccaccagggcaagggtctgggcagcgccgtcgtgctccccggagtggaggcggccgagcgcgccggggtgcccgccttcctggagacctccgcgccccgcaacctccccttctacgagcggctcggcttcaccgtcaccgccgacgtcgaggtgcccgaaggaccgcgcacctggtgcatgacccgcaagcccggtgcctga

SEQ ID NO: 39753 - DNA, 3474 bp, synthetic construct
  source 1..3474: mol_type = other DNA
atggccttaccagtgaccgccttgctcctgccgctggccttgctgctccacgccgccaggccggagatcgtgctgacacagtctcccgccacactgtcactgtctccaggcgaaagagccacactgagctgtagagccagccagagcgtgtcctcttacctggcctggtatcagcagaagcctggacaggctccccggctgctgatctacgatgccagcaatagagccacaggcatccccgccagattttctggctctggcagcggcaccgatttcaccctgaccataagcagcctggaacctgaggacttcgccgtgtactactgccagcagagaagcgactggcccctgacatttggcggcggaacaaaggtggaaatcaaactcgaggacctgaagaacgtgttcccacctgaggtggccgtgttcgagcctagcgaggccgagatcagccacacccagaaagccaccctcgtgtgcctggctaccggcttctaccccgaccatgtggaactgtcttggtgggtcaacggcaaagaggtgcacagcggcgtgtgtaccgacccccagccactgaaagaacagcccgccctgaacgacagccggtactgcctgagcagcagactgagagtgtccgccaccttctggcagaacccccggaaccacttcagatgccaggtgcagttctacggcctgagcgagaacgacgagtggacccaggacagagccaagcccgtgacccagatcgtgtctgccgaagcctggggcagagccgattgcgacgtgaagctggtggaaaagagcttcgagacagacaccaacctgaacttccagaacctgagcgtgatcggcttcagaatcctgctgctgaaagtggccggctttaacctgctgatgaccctgcggctgtggtccagcagggccaagcgatctggatctggagcaacaaacttctcactactcaaacaagcaggtgacgtggaggagaatcccgggcctactagtaccatggactggatttggcgcatccttttccttgtcggcgctgctaccggcgcccattccctgttcaatcaagaggtgcagatccctctgaccgagagctactgtggcccctgtcctaagaactggatctgctacaagaacaactgctaccagttcttcgacgagagcaagaattggtacgagagccaggccagctgcatgagccagaatgccagcctgctgaaggtgtacagcaaagaggaccaggacctgctgaaactggtcaagagcgcccactggatgggccttgtgcacatccccaccaatggctcttggcagtgggaggacggcagcattctgagccctaacctgctgaccatcatcgagatgcagaagggcgactgcgccctgtacgccagcagctttaagggctacatcgagaattgcagcaccccgaacacctacatctgtatgcagagaaccgtttctggcggaggcggctctggaggaggcggaagtggcggcggaggcgacctctttaatcaagaagtccagattccactcaccgaatcctactgcggaccttgtccaaaaaattggatttgttataagaacaactgttatcaattctttgatgagtctaaaaattggtatgagtcccaggcttcctgcatgtctcagaacgcttctctgctgaaagtctactctaaagaagatcaggatctcctgaagctcgtcaagtctgcccattggatggggctcgtccacattcctaccaacggaagctggcaatgggaagatggctccatcctgtctccaaatctgctcacgattattgaaatgcagaaaggggattgtgctctctacgccagctccttcaagggatatattgagaactgtagcacgcccaatacttatatctgtatgcaacggaccgtgggatccggcggcggaggatctggcggaggcggatctgggggcggaggctctttcgaacaagttcagctggttcagagcggagccgaagtgaagaaacctggcagcagcgtgaaggtgtcctgcaaagcaagcggcggcacctttagctcctacgccatccactgggttcgacaggcaccaggacaaggactggaatggatgggcagaatcatccccatcgagggcagagcctactacgcccagaaattccagggcagagtgaccatcaccgccgacgagtctacaagcaccgcctacatggaactgagcagcctgagaagcgaggataccgctgtgtactattgcgccagaggccggtacagctacagatattggttcgactactggggccagggcaccctggttacagtctcttctacgcgtatccagaaccctgatcctgccgtgtaccagctgcgggatagcaagagcagcgacaagagcgtgtgtctgttcaccgacttcgacagccagaccaacgtgtcccagagcaaggactccgacgtgtacatcaccgataagtgcgtgctggacatgcggagcatggacttcaagagcaactccgccgtggcctggtccaacaagtccgatttcgcctgcgccaacgccttcaacaacagcattatccccgaggacacattcttcccaagccccgagagcagctgcggctttaccagcgagagctaccagcagggcgtgctgagcgccaccatcctgtacgagatcctgctgggcaaggccaccctgtacgccgtgctggtgtctgccctggtgctgatggctatggtcaagcggaaggacagccggggacgcgccaagagaagcggatctggcgtgaagcagaccctgaatttcgacctgctgaagctggctggcgacgtggaatccaacccaggcccttctagaggccatatgaccgagtacaagcccacggtgcgcctcgccacccgcgacgacgtccccagggccgtacgcaccctcgccgccgcgttcgccgactaccccgccacgcgccacaccgtcgatccggaccgccacatcgagcgggtcaccgagctgcaagaactcttcctcacgcgcgtcgggctcgacatcggcaaggtgtgggtcgcggacgacggcgccgcggtggcggtctggaccacgccggagagcgtcgaagcgggggcggtgttcgccgagatcggcccgcgcatggccgagttgagcggttcccggctggccgcgcagcaacagatggaaggcctcctggcgccgcaccggcccaaggagcccgcgtggttcctggccaccgtcggcgtctcgcccgaccaccagggcaagggtctgggcagcgccgtcgtgctccccggagtggaggcggccgagcgcgccggggtgcccgccttcctggagacctccgcgccccgcaacctccccttctacgagcggctcggcttcaccgtcaccgccgacgtcgaggtgcccgaaggaccgcgcacctggtgcatgacccgcaagcccggtgcctga

SEQ ID NO: 39754 - DNA, 1860 bp, synthetic construct
  source 1..1860: mol_type = other DNA
atggccttaccagtgaccgccttgctcctgccgctggccttgctgctccacgccgccaggccggagatcgtgctgacacagtctcccgccacactgtcactgtctccaggcgaaagagccacactgagctgtagagccagccagagcgtgtcctcttacctggcctggtatcagcagaagcctggacaggctccccggctgctgatctacgatgccagcaatagagccacaggcatccccgccagattttctggctctggcagcggcaccgatttcaccctgaccataagcagcctggaacctgaggacttcgccgtgtactactgccagcagagaagcgactggcccctgacatttggcggcggaacaaaggtggaaatcaaactcgaggacctgaagaacgtgttcccacctgaggtggccgtgttcgagcctagcgaggccgagatcagccacacccagaaagccaccctcgtgtgcctggctaccggcttctaccccgaccatgtggaactgtcttggtgggtcaacggcaaagaggtgcacagcggcgtgtgtaccgacccccagccactgaaagaacagcccgccctgaacgacagccggtactgcctgagcagcagactgagagtgtccgccaccttctggcagaacccccggaaccacttcagatgccaggtgcagttctacggcctgagcgagaacgacgagtggacccaggacagagccaagcccgtgacccagatcgtgtctgccgaagcctggggcagagccgattgcggctttaccagcgagagctaccagcagggcgtgctgagcgccaccaacctgagcgtgatcggcttcagaatcctgctgctgaaagtggccggctttaacctgctgatgaccctgcggctgtggtccagcagggccaagcgatctggatctggagcaacaaacttctcactactcaaacaagcaggtgacgtggaggagaatcccgggcctactagtatggactggatttggcgcatccttttccttgtcggcgctgctaccggcgcgcattccttcgaacaagttcagctggttcagagcggagccgaagtgaagaaacctggcagcagcgtgaaggtgtcctgcaaagcaagcggcggcacctttagctcctacgccatccactgggttcgacaggcaccaggacaaggactggaatggatgggcagaatcatccccatcgagggcagagcctactacgcccagaaattccagggcagagtgaccatcaccgccgacgagtctacaagcaccgcctacatggaactgagcagcctgagaagcgaggataccgctgtgtactattgcgccagaggccggtacagctacagatattggttcgactactggggccagggcaccctggttacagtctcttctacgcgtatccagaaccctgatcctgccgtgtaccagctgcgggatagcaagagcagcgacaagagcgtgtgtctgttcaccgacttcgacagccagaccaacgtgtcccagagcaaggactccgacgtgtacatcaccgataagtgcgtgctggacatgcggagcatggacttcaagagcaactccgccgtggcctggtccaacaagtccgatttcgcctgcgccaacgccttcaacaacagcattatccccgaggacacattcttcccaagccccgagagcagctgcgacgtgaagctggtggaaaagagcttcgagacagacaccaacctgaacttccagatcctgtacgagatcctgctgggcaaggccaccctgtacgccgtgctggtgtctgccctggtgctgatggctatggtcaagcggaaggacagccgggga

SEQ ID NO: 39755 - DNA, 1872 bp, synthetic construct
  source 1..1872: mol_type = other DNA
atggccttaccagtgaccgccttgctcctgccgctggccttgctgctccacgccgccaggccggagatcgtgctgacacagtctcccgccacactgtcactgtctccaggcgaaagagccacactgagctgtagagccagccagagcgtgtcctcttacctggcctggtatcagcagaagcctggacaggctccccggctgctgatctacgatgccagcaatagagccacaggcatccccgccagattttctggctctggcagcggcaccgatttcaccctgaccataagcagcctggaacctgaggacttcgccgtgtactactgccagcagagaagcgactggcccctgacatttggcggcggaacaaaggtggaaatcaaactcgagatccagaaccctgatcctgccgtgtaccagctgcgggatagcaagagcagcgacaagagcgtgtgtctgttcaccgacttcgacagccagaccaacgtgtcccagagcaaggactccgacgtgtacatcaccgataagtgcgtgctggacatgcggagcatggacttcaagagcaactccgccgtggcctggtccaacaagtccgatttcgcctgcgccaacgccttcaacaacagcattatccccgaggacacattcttcccaagccccgagagcagctgcgacgtgaagctggtggaaaagagcttcgagacagacaccaacctgaacttccagatcctgtacgagatcctgctgggcaaggccaccctgtacgccgtgctggtgtctgccctggtgctgatggctatggtcaagcggaaggacagccggggacgcgccaagagaagcggatctggcgtgaagcagaccctgaatttcgacctgctgaagctggctggcgacgtggaatccaacccaggccctactagtatggactggatttggcgcatccttttccttgtcggcgctgctaccggcgcgcattccttcgaacaagttcagctggttcagagcggagccgaagtgaagaaacctggcagcagcgtgaaggtgtcctgcaaagcaagcggcggcacctttagctcctacgccatccactgggttcgacaggcaccaggacaaggactggaatggatgggcagaatcatccccatcgagggcagagcctactacgcccagaaattccagggcagagtgaccatcaccgccgacgagtctacaagcaccgcctacatggaactgagcagcctgagaagcgaggataccgctgtgtactattgcgccagaggccggtacagctacagatattggttcgactactggggccagggcaccctggttacagtctcttctacgcgtgaggacctgaagaacgtgttcccacctgaggtggccgtgttcgagcctagcgaggccgagatcagccacacccagaaagccaccctcgtgtgcctggctaccggcttctaccccgaccatgtggaactgtcttggtgggtcaacggcaaagaggtgcacagcggcgtgtgtaccgacccccagccactgaaagaacagcccgccctgaacgacagccggtactgcctgagcagcagactgagagtgtccgccaccttctggcagaacccccggaaccacttcagatgccaggtgcagttctacggcctgagcgagaacgacgagtggacccaggacagagccaagcccgtgacccagatcgtgtctgccgaagcctggggcagagccgattgcggctttaccagcgagagctaccagcagggcgtgctgagcgccaccaacctgagcgtgatcggcttcagaatcctgctgctgaaagtggccggctttaacctgctgatgaccctgcggctgtggtccagc

SEQ ID NO: 39756 - DNA, 2265 bp, synthetic construct
  source 1..2265: mol_type = other DNA
atggccttaccagtgaccgccttgctcctgccgctggccttgctgctccacgccgccaggccggaagtgcagctggttgaatctggcggaggactggttcagcctggcggatctctgagactgtcttgtgccgccagcggcttcagcttcagcgacttttggatgagctgggtccgacaggcccctggcaaaggacttgaatgggtcgccacaatcagccaggccggcagcgagaaggactacgtggactctgtgaagggcagattcaccatcagccgggacaacgccaagaagtccctgtacctccagatgaacagcctgagagccgaggacaccgccgtgtactattgtgcctctggcgtgtacagcttcgactacagaggccagggcaccctggtcacagtctcttctggtaccggcggaggcggatctggcggcggaggtagcggtggcggaggatctgaattcgagatcgtgctgacacagtctcccgccacactgtcactgtctccaggcgaaagagccacactgagctgtagagccagccagagcgtgtcctcttacctggcctggtatcagcagaagcctggacaggctccccggctgctgatctacgatgccagcaatagagccacaggcatccccgccagattttctggctctggcagcggcaccgatttcaccctgaccataagcagcctggaacctgaggacttcgccgtgtactactgccagcagagaagcgactggcccctgacatttggcggcggaacaaaggtggaaatcaaactcgaggacctgaagaacgtgttcccacctgaggtggccgtgttcgagcctagcgaggccgagatcagccacacccagaaagccaccctcgtgtgcctggctaccggcttctaccccgaccatgtggaactgtcttggtgggtcaacggcaaagaggtgcacagcggcgtgtgtaccgacccccagccactgaaagaacagcccgccctgaacgacagccggtactgcctgagcagcagactgagagtgtccgccaccttctggcagaacccccggaaccacttcagatgccaggtgcagttctacggcctgagcgagaacgacgagtggacccaggacagagccaagcccgtgacccagatcgtgtctgccgaagcctggggcagagccgattgcggctttaccagcgagagctaccagcagggcgtgctgagcgccaccaacctgagcgtgatcggcttcagaatcctgctgctgaaagtggccggctttaacctgctgatgaccctgcggctgtggtccagcagggccaagcgatctggatctggagcaacaaacttctcactactcaaacaagcaggtgacgtggaggagaatcccgggcctactagtatggactggatttggcgcatccttttccttgtcggcgctgctaccggcgcgcattccttcgaacaagttcagctggttcagagcggagccgaagtgaagaaacctggcagcagcgtgaaggtgtcctgcaaagcaagcggcggcacctttagctcctacgccatccactgggttcgacaggcaccaggacaaggactggaatggatgggcagaatcatccccatcgagggcagagcctactacgcccagaaattccagggcagagtgaccatcaccgccgacgagtctacaagcaccgcctacatggaactgagcagcctgagaagcgaggataccgctgtgtactattgcgccagaggccggtacagctacagatattggttcgactactggggccagggcaccctggttacagtctcttctacgcgtatccagaaccctgatcctgccgtgtaccagctgcgggatagcaagagcagcgacaagagcgtgtgtctgttcaccgacttcgacagccagaccaacgtgtcccagagcaaggactccgacgtgtacatcaccgataagtgcgtgctggacatgcggagcatggacttcaagagcaactccgccgtggcctggtccaacaagtccgatttcgcctgcgccaacgccttcaacaacagcattatccccgaggacacattcttcccaagccccgagagcagctgcgacgtgaagctggtggaaaagagcttcgagacagacaccaacctgaacttccagatcctgtacgagatcctgctgggcaaggccaccctgtacgccgtgctggtgtctgccctggtgctgatggctatggtcaagcggaaggacagccgggga

SEQ ID NO: 39757 - DNA, 2277 bp, synthetic construct
  source 1..2277: mol_type = other DNA
atggccttaccagtgaccgccttgctcctgccgctggccttgctgctccacgccgccaggccggaagtgcagctggttgaatctggcggaggactggttcagcctggcggatctctgagactgtcttgtgccgccagcggcttcagcttcagcgacttttggatgagctgggtccgacaggcccctggcaaaggacttgaatgggtcgccacaatcagccaggccggcagcgagaaggactacgtggactctgtgaagggcagattcaccatcagccgggacaacgccaagaagtccctgtacctccagatgaacagcctgagagccgaggacaccgccgtgtactattgtgcctctggcgtgtacagcttcgactacagaggccagggcaccctggtcacagtctcttctggtaccggcggaggcggatctggcggcggaggtagcggtggcggaggatctgaattcgagatcgtgctgacacagtctcccgccacactgtcactgtctccaggcgaaagagccacactgagctgtagagccagccagagcgtgtcctcttacctggcctggtatcagcagaagcctggacaggctccccggctgctgatctacgatgccagcaatagagccacaggcatccccgccagattttctggctctggcagcggcaccgatttcaccctgaccataagcagcctggaacctgaggacttcgccgtgtactactgccagcagagaagcgactggcccctgacatttggcggcggaacaaaggtggaaatcaaactcgagatccagaaccctgatcctgccgtgtaccagctgcgggatagcaagagcagcgacaagagcgtgtgtctgttcaccgacttcgacagccagaccaacgtgtcccagagcaaggactccgacgtgtacatcaccgataagtgcgtgctggacatgcggagcatggacttcaagagcaactccgccgtggcctggtccaacaagtccgatttcgcctgcgccaacgccttcaacaacagcattatccccgaggacacattcttcccaagccccgagagcagctgcgacgtgaagctggtggaaaagagcttcgagacagacaccaacctgaacttccagatcctgtacgagatcctgctgggcaaggccaccctgtacgccgtgctggtgtctgccctggtgctgatggctatggtcaagcggaaggacagccggggacgcgccaagagaagcggatctggcgtgaagcagaccctgaatttcgacctgctgaagctggctggcgacgtggaatccaacccaggccctactagtatggactggatttggcgcatccttttccttgtcggcgctgctaccggcgcgcattccttcgaacaagttcagctggttcagagcggagccgaagtgaagaaacctggcagcagcgtgaaggtgtcctgcaaagcaagcggcggcacctttagctcctacgccatccactgggttcgacaggcaccaggacaaggactggaatggatgggcagaatcatccccatcgagggcagagcctactacgcccagaaattccagggcagagtgaccatcaccgccgacgagtctacaagcaccgcctacatggaactgagcagcctgagaagcgaggataccgctgtgtactattgcgccagaggccggtacagctacagatattggttcgactactggggccagggcaccctggttacagtctcttctacgcgtgaggacctgaagaacgtgttcccacctgaggtggccgtgttcgagcctagcgaggccgagatcagccacacccagaaagccaccctcgtgtgcctggctaccggcttctaccccgaccatgtggaactgtcttggtgggtcaacggcaaagaggtgcacagcggcgtgtgtaccgacccccagccactgaaagaacagcccgccctgaacgacagccggtactgcctgagcagcagactgagagtgtccgccaccttctggcagaacccccggaaccacttcagatgccaggtgcagttctacggcctgagcgagaacgacgagtggacccaggacagagccaagcccgtgacccagatcgtgtctgccgaagcctggggcagagccgattgcggctttaccagcgagagctaccagcagggcgtgctgagcgccaccaacctgagcgtgatcggcttcagaatcctgctgctgaaagtggccggctttaacctgctgatgaccctgcggctgtggtccagc

SEQ ID NO: 39758 - DNA, 2676 bp, synthetic construct
  source 1..2676: mol_type = other DNA
atggccttaccagtgaccgccttgctcctgccgctggccttgctgctccacgccgccaggccggaagtgcagctggttgaatctggcggaggactggttcagcctggcggatctctgagactgtcttgtgccgccagcggcttcagcttcagcgacttttggatgagctgggtccgacaggcccctggcaaaggacttgaatgggtcgccacaatcagccaggccggcagcgagaaggactacgtggactctgtgaagggcagattcaccatcagccgggacaacgccaagaagtccctgtacctccagatgaacagcctgagagccgaggacaccgccgtgtactattgtgcctctggcgtgtacagcttcgactacagaggccagggcaccctggtcacagtctcttctggtaccggcggaggcggatctggcggcggaggtagcggtggcggaggatctgaattcgagatcgtgctgacacagtctcccgccacactgtcactgtctccaggcgaaagagccacactgagctgtagagccagccagagcgtgtcctcttacctggcctggtatcagcagaagcctggacaggctccccggctgctgatctacgatgccagcaatagagccacaggcatccccgccagattttctggctctggcagcggcaccgatttcaccctgaccataagcagcctggaacctgaggacttcgccgtgtactactgccagcagagaagcgactggcccctgacatttggcggcggaacaaaggtggaaatcaaactcgaggacctgaagaacgtgttcccacctgaggtggccgtgttcgagcctagcgaggccgagatcagccacacccagaaagccaccctcgtgtgcctggctaccggcttctaccccgaccatgtggaactgtcttggtgggtcaacggcaaagaggtgcacagcggcgtgtgtaccgacccccagccactgaaagaacagcccgccctgaacgacagccggtactgcctgagcagcagactgagagtgtccgccaccttctggcagaacccccggaaccacttcagatgccaggtgcagttctacggcctgagcgagaacgacgagtggacccaggacagagccaagcccgtgacccagatcgtgtctgccgaagcctggggcagagccgattgcggctttaccagcgagagctaccagcagggcgtgctgagcgccaccaacctgagcgtgatcggcttcagaatcctgctgctgaaagtggccggctttaacctgctgatgaccctgcggctgtggtccagcagggccaagcgatctggatctggagcaacaaacttctcactactcaaacaagcaggtgacgtggaggagaatcccgggcctactagtatggactggatttggcgcatccttttccttgtcggcgctgctaccggcgcgcattccgggccccagctccagctgcaagagtctggacctggcctggtcaagcctagcgagacactgagcctgacctgtaccgtgtccggcgatagcatcagcagcggcgattactactggggctggatcagacagcctcctggcaaaggactggaatggatcggccacatctactacagcggcgtgacctactacaaccccagcctgaagtccagagtgaccatcagcgtggacaccagccggaaccagttctccctgaagctgtctagcgtgacagccgccgataccgccgtgtactactgcaccagagaggacagcagcaactggcggagtagaggccagggaacactggtcacagttagctctggatccggcggaggcggaagtggaggcggaggatctggcggcggaggctctttcgaacaagttcagctggttcagagcggagccgaagtgaagaaacctggcagcagcgtgaaggtgtcctgcaaagcaagcggcggcacctttagctcctacgccatccactgggttcgacaggcaccaggacaaggactggaatggatgggcagaatcatccccatcgagggcagagcctactacgcccagaaattccagggcagagtgaccatcaccgccgacgagtctacaagcaccgcctacatggaactgagcagcctgagaagcgaggataccgctgtgtactattgcgccagaggccggtacagctacagatattggttcgactactggggccagggcaccctggttacagtctcttctacgcgtatccagaaccctgatcctgccgtgtaccagctgcgggatagcaagagcagcgacaagagcgtgtgtctgttcaccgacttcgacagccagaccaacgtgtcccagagcaaggactccgacgtgtacatcaccgataagtgcgtgctggacatgcggagcatggacttcaagagcaactccgccgtggcctggtccaacaagtccgatttcgcctgcgccaacgccttcaacaacagcattatccccgaggacacattcttcccaagccccgagagcagctgcgacgtgaagctggtggaaaagagcttcgagacagacaccaacctgaacttccagatcctgtacgagatcctgctgggcaaggccaccctgtacgccgtgctggtgtctgccctggtgctgatggctatggtcaagcggaaggacagccgggga

SEQ ID NO: 39759 - DNA, 2688 bp, synthetic construct
  source 1..2688: mol_type = other DNA
atggccttaccagtgaccgccttgctcctgccgctggccttgctgctccacgccgccaggccggaagtgcagctggttgaatctggcggaggactggttcagcctggcggatctctgagactgtcttgtgccgccagcggcttcagcttcagcgacttttggatgagctgggtccgacaggcccctggcaaaggacttgaatgggtcgccacaatcagccaggccggcagcgagaaggactacgtggactctgtgaagggcagattcaccatcagccgggacaacgccaagaagtccctgtacctccagatgaacagcctgagagccgaggacaccgccgtgtactattgtgcctctggcgtgtacagcttcgactacagaggccagggcaccctggtcacagtctcttctggtaccggcggaggcggatctggcggcggaggtagcggtggcggaggatctgaattcgagatcgtgctgacacagtctcccgccacactgtcactgtctccaggcgaaagagccacactgagctgtagagccagccagagcgtgtcctcttacctggcctggtatcagcagaagcctggacaggctccccggctgctgatctacgatgccagcaatagagccacaggcatccccgccagattttctggctctggcagcggcaccgatttcaccctgaccataagcagcctggaacctgaggacttcgccgtgtactactgccagcagagaagcgactggcccctgacatttggcggcggaacaaaggtggaaatcaaactcgagatccagaaccctgatcctgccgtgtaccagctgcgggatagcaagagcagcgacaagagcgtgtgtctgttcaccgacttcgacagccagaccaacgtgtcccagagcaaggactccgacgtgtacatcaccgataagtgcgtgctggacatgcggagcatggacttcaagagcaactccgccgtggcctggtccaacaagtccgatttcgcctgcgccaacgccttcaacaacagcattatccccgaggacacattcttcccaagccccgagagcagctgcgacgtgaagctggtggaaaagagcttcgagacagacaccaacctgaacttccagatcctgtacgagatcctgctgggcaaggccaccctgtacgccgtgctggtgtctgccctggtgctgatggctatggtcaagcggaaggacagccggggacgcgccaagagaagcggatctggcgtgaagcagaccctgaatttcgacctgctgaagctggctggcgacgtggaatccaacccaggccctactagtatggactggatttggcgcatccttttccttgtcggcgctgctaccggcgcgcattccgggccccagctccagctgcaagagtctggacctggcctggtcaagcctagcgagacactgagcctgacctgtaccgtgtccggcgatagcatcagcagcggcgattactactggggctggatcagacagcctcctggcaaaggactggaatggatcggccacatctactacagcggcgtgacctactacaaccccagcctgaagtccagagtgaccatcagcgtggacaccagccggaaccagttctccctgaagctgtctagcgtgacagccgccgataccgccgtgtactactgcaccagagaggacagcagcaactggcggagtagaggccagggaacactggtcacagttagctctggatccggcggaggcggaagtggaggcggaggatctggcggcggaggctctttcgaacaagttcagctggttcagagcggagccgaagtgaagaaacctggcagcagcgtgaaggtgtcctgcaaagcaagcggcggcacctttagctcctacgccatccactgggttcgacaggcaccaggacaaggactggaatggatgggcagaatcatccccatcgagggcagagcctactacgcccagaaattccagggcagagtgaccatcaccgccgacgagtctacaagcaccgcctacatggaactgagcagcctgagaagcgaggataccgctgtgtactattgcgccagaggccggtacagctacagatattggttcgactactggggccagggcaccctggttacagtctcttctacgcgtgaggacctgaagaacgtgttcccacctgaggtggccgtgttcgagcctagcgaggccgagatcagccacacccagaaagccaccctcgtgtgcctggctaccggcttctaccccgaccatgtggaactgtcttggtgggtcaacggcaaagaggtgcacagcggcgtgtgtaccgacccccagccactgaaagaacagcccgccctgaacgacagccggtactgcctgagcagcagactgagagtgtccgccaccttctggcagaacccccggaaccacttcagatgccaggtgcagttctacggcctgagcgagaacgacgagtggacccaggacagagccaagcccgtgacccagatcgtgtctgccgaagcctggggcagagccgattgcggctttaccagcgagagctaccagcagggcgtgctgagcgccaccaacctgagcgtgatcggcttcagaatcctgctgctgaaagtggccggctttaacctgctgatgaccctgcggctgtggtccagc

SEQ ID NO: 39760 - DNA, 2172 bp, synthetic construct
  source 1..2172: mol_type = other DNA
atggccttaccagtgaccgccttgctcctgccgctggccttgctgctccacgccgccaggccggagatcgtgctgacacagtctcccgccacactgtcactgtctccaggcgaaagagccacactgagctgtagagccagccagagcgtgtcctcttacctggcctggtatcagcagaagcctggacaggctccccggctgctgatctacgatgccagcaatagagccacaggcatccccgccagattttctggctctggcagcggcaccgatttcaccctgaccataagcagcctggaacctgaggacttcgccgtgtactactgccagcagagaagcgactggcccctgacatttggcggcggaacaaaggtggaaatcaaactcgaggacctgaagaacgtgttcccacctgaggtggccgtgttcgagcctagcgaggccgagatcagccacacccagaaagccaccctcgtgtgcctggctaccggcttctaccccgaccatgtggaactgtcttggtgggtcaacggcaaagaggtgcacagcggcgtgtgtaccgacccccagccactgaaagaacagcccgccctgaacgacagccggtactgcctgagcagcagactgagagtgtccgccaccttctggcagaacccccggaaccacttcagatgccaggtgcagttctacggcctgagcgagaacgacgagtggacccaggacagagccaagcccgtgacccagatcgtgtctgccgaagcctggggcagagccgatgatgtgattaagatccactggcaggaaaagaagtccaacaccatcctgggcagccaggaaggcaacaccatgaagaccaacgacacctacatgaagttcagctggctgaccgtgcccgagaagtccctggacaaagaacacagatgcatcgtgcggcacgaaaacaacaagaacggcgtggaccaggaaatcatcttcccacccatcaagaccgatgtgattacaatggaccccaaggacaactgctccaaggacgccaacgataccctgctgctccagctgaccaacaccagcgcctactacatgtacttgttgctgctgctgaagtccgtggtgtacttcgccatcatcacatgctgcctgctgatggctatggtcaagcggaaggacagccggggaagggccaagcgatctggatctggagcaacaaacttctcactactcaaacaagcaggtgacgtggaggagaatcccgggcctactagtatggactggatttggcgcatccttttccttgtcggcgctgctaccggcgcgcattccttcgaacaagttcagctggttcagagcggagccgaagtgaagaaacctggcagcagcgtgaaggtgtcctgcaaagcaagcggcggcacctttagctcctacgccatccactgggttcgacaggcaccaggacaaggactggaatggatgggcagaatcatccccatcgagggcagagcctactacgcccagaaattccagggcagagtgaccatcaccgccgacgagtctacaagcaccgcctacatggaactgagcagcctgagaagcgaggataccgctgtgtactattgcgccagaggccggtacagctacagatattggttcgactactggggccagggcaccctggttacagtctcttctacgcgtatccagaaccctgatcctgccgtgtaccagctgcgggatagcaagagcagcgacaagagcgtgtgtctgttcaccgacttcgacagccagaccaacgtgtcccagagcaaggactccgacgtgtacatcaccgataagtgcgtgctggacatgcggagcatggacttcaagagcaactccgccgtggcctggtccaacaagtccgatttcgcctgcgccaacgccttcaacaacagcattatccccgaggacacattcttcccaagccccgagagcagcgactccaccgaccacgtgaagcccaaagagacagagaacaccaagcagcccagcaagagctgccacaagcccaaggccatcgtgcacaccgagaaagtgaacatgatgagcctgaccgtgctgggcctgcggatgctgttcgccaaaaccgtggccgtgaacttcctgctgaccgccaagctgttcttcctcctcaccgcc

SEQ ID NO: 39761 - DNA, 2184 bp, synthetic construct
  source 1..2184: mol_type = other DNA
atggccttaccagtgaccgccttgctcctgccgctggccttgctgctccacgccgccaggccggagatcgtgctgacacagtctcccgccacactgtcactgtctccaggcgaaagagccacactgagctgtagagccagccagagcgtgtcctcttacctggcctggtatcagcagaagcctggacaggctccccggctgctgatctacgatgccagcaatagagccacaggcatccccgccagattttctggctctggcagcggcaccgatttcaccctgaccataagcagcctggaacctgaggacttcgccgtgtactactgccagcagagaagcgactggcccctgacatttggcggcggaacaaaggtggaaatcaaactcgagatccagaaccctgatcctgccgtgtaccagctgcgggatagcaagagcagcgacaagagcgtgtgtctgttcaccgacttcgacagccagaccaacgtgtcccagagcaaggactccgacgtgtacatcaccgataagtgcgtgctggacatgcggagcatggacttcaagagcaactccgccgtggcctggtccaacaagtccgatttcgcctgcgccaacgccttcaacaacagcattatccccgaggacacattcttcccaagccccgagagcagcgactccaccgaccacgtgaagcccaaagagacagagaacaccaagcagcccagcaagagctgccacaagcccaaggccatcgtgcacaccgagaaagtgaacatgatgagcctgaccgtgctgggcctgcggatgctgttcgccaaaaccgtggccgtgaacttcctgctgaccgccaagctgttcttcctcctcaccgcccgcgccaagagaagcggatctggcgtgaagcagaccctgaatttcgacctgctgaagctggctggcgacgtggaatccaacccaggccctactagtatggactggatttggcgcatccttttccttgtcggcgctgctaccggcgcgcattccttcgaacaagttcagctggttcagagcggagccgaagtgaagaaacctggcagcagcgtgaaggtgtcctgcaaagcaagcggcggcacctttagctcctacgccatccactgggttcgacaggcaccaggacaaggactggaatggatgggcagaatcatccccatcgagggcagagcctactacgcccagaaattccagggcagagtgaccatcaccgccgacgagtctacaagcaccgcctacatggaactgagcagcctgagaagcgaggataccgctgtgtactattgcgccagaggccggtacagctacagatattggttcgactactggggccagggcaccctggttacagtctcttctacgcgtgaggacctgaagaacgtgttcccacctgaggtggccgtgttcgagcctagcgaggccgagatcagccacacccagaaagccaccctcgtgtgcctggctaccggcttctaccccgaccatgtggaactgtcttggtgggtcaacggcaaagaggtgcacagcggcgtgtgtaccgacccccagccactgaaagaacagcccgccctgaacgacagccggtactgcctgagcagcagactgagagtgtccgccaccttctggcagaacccccggaaccacttcagatgccaggtgcagttctacggcctgagcgagaacgacgagtggacccaggacagagccaagcccgtgacccagatcgtgtctgccgaagcctggggcagagccgatgatgtgattaagatccactggcaggaaaagaagtccaacaccatcctgggcagccaggaaggcaacaccatgaagaccaacgacacctacatgaagttcagctggctgaccgtgcccgagaagtccctggacaaagaacacagatgcatcgtgcggcacgaaaacaacaagaacggcgtggaccaggaaatcatcttcccacccatcaagaccgatgtgattacaatggaccccaaggacaactgctccaaggacgccaacgataccctgctgctccagctgaccaacaccagcgcctactacatgtacttgttgctgctgctgaagtccgtggtgtacttcgccatcatcacatgctgcctgctgatggctatggtcaagcggaaggacagccgggga

SEQ ID NO: 39762 - DNA, 2577 bp, synthetic construct
  source 1..2577: mol_type = other DNA
atggccttaccagtgaccgccttgctcctgccgctggccttgctgctccacgccgccaggccggaagtgcagctggttgaatctggcggaggactggttcagcctggcggatctctgagactgtcttgtgccgccagcggcttcagcttcagcgacttttggatgagctgggtccgacaggcccctggcaaaggacttgaatgggtcgccacaatcagccaggccggcagcgagaaggactacgtggactctgtgaagggcagattcaccatcagccgggacaacgccaagaagtccctgtacctccagatgaacagcctgagagccgaggacaccgccgtgtactattgtgcctctggcgtgtacagcttcgactacagaggccagggcaccctggtcacagtctcttctggtaccggcggaggcggatctggcggcggaggtagcggtggcggaggatctgaattcgagatcgtgctgacacagtctcccgccacactgtcactgtctccaggcgaaagagccacactgagctgtagagccagccagagcgtgtcctcttacctggcctggtatcagcagaagcctggacaggctccccggctgctgatctacgatgccagcaatagagccacaggcatccccgccagattttctggctctggcagcggcaccgatttcaccctgaccataagcagcctggaacctgaggacttcgccgtgtactactgccagcagagaagcgactggcccctgacatttggcggcggaacaaaggtggaaatcaaactcgaggacctgaagaacgtgttcccacctgaggtggccgtgttcgagcctagcgaggccgagatcagccacacccagaaagccaccctcgtgtgcctggctaccggcttctaccccgaccatgtggaactgtcttggtgggtcaacggcaaagaggtgcacagcggcgtgtgtaccgacccccagccactgaaagaacagcccgccctgaacgacagccggtactgcctgagcagcagactgagagtgtccgccaccttctggcagaacccccggaaccacttcagatgccaggtgcagttctacggcctgagcgagaacgacgagtggacccaggacagagccaagcccgtgacccagatcgtgtctgccgaagcctggggcagagccgatgatgtgattaagatccactggcaggaaaagaagtccaacaccatcctgggcagccaggaaggcaacaccatgaagaccaacgacacctacatgaagttcagctggctgaccgtgcccgagaagtccctggacaaagaacacagatgcatcgtgcggcacgaaaacaacaagaacggcgtggaccaggaaatcatcttcccacccatcaagaccgatgtgattacaatggaccccaaggacaactgctccaaggacgccaacgataccctgctgctccagctgaccaacaccagcgcctactacatgtacttgttgctgctgctgaagtccgtggtgtacttcgccatcatcacatgctgcctgctgatggctatggtcaagcggaaggacagccggggaagggccaagcgatctggatctggagcaacaaacttctcactactcaaacaagcaggtgacgtggaggagaatcccgggcctactagtatggactggatttggcgcatccttttccttgtcggcgctgctaccggcgcgcattccttcgaacaagttcagctggttcagagcggagccgaagtgaagaaacctggcagcagcgtgaaggtgtcctgcaaagcaagcggcggcacctttagctcctacgccatccactgggttcgacaggcaccaggacaaggactggaatggatgggcagaatcatccccatcgagggcagagcctactacgcccagaaattccagggcagagtgaccatcaccgccgacgagtctacaagcaccgcctacatggaactgagcagcctgagaagcgaggataccgctgtgtactattgcgccagaggccggtacagctacagatattggttcgactactggggccagggcaccctggttacagtctcttctacgcgtatccagaaccctgatcctgccgtgtaccagctgcgggatagcaagagcagcgacaagagcgtgtgtctgttcaccgacttcgacagccagaccaacgtgtcccagagcaaggactccgacgtgtacatcaccgataagtgcgtgctggacatgcggagcatggacttcaagagcaactccgccgtggcctggtccaacaagtccgatttcgcctgcgccaacgccttcaacaacagcattatccccgaggacacattcttcccaagccccgagagcagcgactccaccgaccacgtgaagcccaaagagacagagaacaccaagcagcccagcaagagctgccacaagcccaaggccatcgtgcacaccgagaaagtgaacatgatgagcctgaccgtgctgggcctgcggatgctgttcgccaaaaccgtggccgtgaacttcctgctgaccgccaagctgttcttcctcctcaccgcc

SEQ ID NO: 39763 - DNA, 2589 bp, synthetic construct
  source 1..2589: mol_type = other DNA
atggccttaccagtgaccgccttgctcctgccgctggccttgctgctccacgccgccaggccggaagtgcagctggttgaatctggcggaggactggttcagcctggcggatctctgagactgtcttgtgccgccagcggcttcagcttcagcgacttttggatgagctgggtccgacaggcccctggcaaaggacttgaatgggtcgccacaatcagccaggccggcagcgagaaggactacgtggactctgtgaagggcagattcaccatcagccgggacaacgccaagaagtccctgtacctccagatgaacagcctgagagccgaggacaccgccgtgtactattgtgcctctggcgtgtacagcttcgactacagaggccagggcaccctggtcacagtctcttctggtaccggcggaggcggatctggcggcggaggtagcggtggcggaggatctgaattcgagatcgtgctgacacagtctcccgccacactgtcactgtctccaggcgaaagagccacactgagctgtagagccagccagagcgtgtcctcttacctggcctggtatcagcagaagcctggacaggctccccggctgctgatctacgatgccagcaatagagccacaggcatccccgccagattttctggctctggcagcggcaccgatttcaccctgaccataagcagcctggaacctgaggacttcgccgtgtactactgccagcagagaagcgactggcccctgacatttggcggcggaacaaaggtggaaatcaaactcgagatccagaaccctgatcctgccgtgtaccagctgcgggatagcaagagcagcgacaagagcgtgtgtctgttcaccgacttcgacagccagaccaacgtgtcccagagcaaggactccgacgtgtacatcaccgataagtgcgtgctggacatgcggagcatggacttcaagagcaactccgccgtggcctggtccaacaagtccgatttcgcctgcgccaacgccttcaacaacagcattatccccgaggacacattcttcccaagccccgagagcagcgactccaccgaccacgtgaagcccaaagagacagagaacaccaagcagcccagcaagagctgccacaagcccaaggccatcgtgcacaccgagaaagtgaacatgatgagcctgaccgtgctgggcctgcggatgctgttcgccaaaaccgtggccgtgaacttcctgctgaccgccaagctgttcttcctcctcaccgcccgcgccaagagaagcggatctggcgtgaagcagaccctgaatttcgacctgctgaagctggctggcgacgtggaatccaacccaggccctactagtatggactggatttggcgcatccttttccttgtcggcgctgctaccggcgcgcattccttcgaacaagttcagctggttcagagcggagccgaagtgaagaaacctggcagcagcgtgaaggtgtcctgcaaagcaagcggcggcacctttagctcctacgccatccactgggttcgacaggcaccaggacaaggactggaatggatgggcagaatcatccccatcgagggcagagcctactacgcccagaaattccagggcagagtgaccatcaccgccgacgagtctacaagcaccgcctacatggaactgagcagcctgagaagcgaggataccgctgtgtactattgcgccagaggccggtacagctacagatattggttcgactactggggccagggcaccctggttacagtctcttctacgcgtgaggacctgaagaacgtgttcccacctgaggtggccgtgttcgagcctagcgaggccgagatcagccacacccagaaagccaccctcgtgtgcctggctaccggcttctaccccgaccatgtggaactgtcttggtgggtcaacggcaaagaggtgcacagcggcgtgtgtaccgacccccagccactgaaagaacagcccgccctgaacgacagccggtactgcctgagcagcagactgagagtgtccgccaccttctggcagaacccccggaaccacttcagatgccaggtgcagttctacggcctgagcgagaacgacgagtggacccaggacagagccaagcccgtgacccagatcgtgtctgccgaagcctggggcagagccgatgatgtgattaagatccactggcaggaaaagaagtccaacaccatcctgggcagccaggaaggcaacaccatgaagaccaacgacacctacatgaagttcagctggctgaccgtgcccgagaagtccctggacaaagaacacagatgcatcgtgcggcacgaaaacaacaagaacggcgtggaccaggaaatcatcttcccacccatcaagaccgatgtgattacaatggaccccaaggacaactgctccaaggacgccaacgataccctgctgctccagctgaccaacaccagcgcctactacatgtacttgttgctgctgctgaagtccgtggtgtacttcgccatcatcacatgctgcctgctgatggctatggtcaagcggaaggacagccgggga

SEQ ID NO: 39764 - DNA, 2988 bp, synthetic construct
  source 1..2988: mol_type = other DNA
atggccttaccagtgaccgccttgctcctgccgctggccttgctgctccacgccgccaggccggaagtgcagctggttgaatctggcggaggactggttcagcctggcggatctctgagactgtcttgtgccgccagcggcttcagcttcagcgacttttggatgagctgggtccgacaggcccctggcaaaggacttgaatgggtcgccacaatcagccaggccggcagcgagaaggactacgtggactctgtgaagggcagattcaccatcagccgggacaacgccaagaagtccctgtacctccagatgaacagcctgagagccgaggacaccgccgtgtactattgtgcctctggcgtgtacagcttcgactacagaggccagggcaccctggtcacagtctcttctggtaccggcggaggcggatctggcggcggaggtagcggtggcggaggatctgaattcgagatcgtgctgacacagtctcccgccacactgtcactgtctccaggcgaaagagccacactgagctgtagagccagccagagcgtgtcctcttacctggcctggtatcagcagaagcctggacaggctccccggctgctgatctacgatgccagcaatagagccacaggcatccccgccagattttctggctctggcagcggcaccgatttcaccctgaccataagcagcctggaacctgaggacttcgccgtgtactactgccagcagagaagcgactggcccctgacatttggcggcggaacaaaggtggaaatcaaactcgaggacctgaagaacgtgttcccacctgaggtggccgtgttcgagcctagcgaggccgagatcagccacacccagaaagccaccctcgtgtgcctggctaccggcttctaccccgaccatgtggaactgtcttggtgggtcaacggcaaagaggtgcacagcggcgtgtgtaccgacccccagccactgaaagaacagcccgccctgaacgacagccggtactgcctgagcagcagactgagagtgtccgccaccttctggcagaacccccggaaccacttcagatgccaggtgcagttctacggcctgagcgagaacgacgagtggacccaggacagagccaagcccgtgacccagatcgtgtctgccgaagcctggggcagagccgatgatgtgattaagatccactggcaggaaaagaagtccaacaccatcctgggcagccaggaaggcaacaccatgaagaccaacgacacctacatgaagttcagctggctgaccgtgcccgagaagtccctggacaaagaacacagatgcatcgtgcggcacgaaaacaacaagaacggcgtggaccaggaaatcatcttcccacccatcaagaccgatgtgattacaatggaccccaaggacaactgctccaaggacgccaacgataccctgctgctccagctgaccaacaccagcgcctactacatgtacttgttgctgctgctgaagtccgtggtgtacttcgccatcatcacatgctgcctgctgatggctatggtcaagcggaaggacagccggggaagggccaagcgatctggatctggagcaacaaacttctcactactcaaacaagcaggtgacgtggaggagaatcccgggcctactagtatggactggatttggcgcatccttttccttgtcggcgctgctaccggcgcgcattccgggccccagctccagctgcaagagtctggacctggcctggtcaagcctagcgagacactgagcctgacctgtaccgtgtccggcgatagcatcagcagcggcgattactactggggctggatcagacagcctcctggcaaaggactggaatggatcggccacatctactacagcggcgtgacctactacaaccccagcctgaagtccagagtgaccatcagcgtggacaccagccggaaccagttctccctgaagctgtctagcgtgacagccgccgataccgccgtgtactactgcaccagagaggacagcagcaactggcggagtagaggccagggaacactggtcacagttagctctggatccggcggaggcggaagtggaggcggaggatctggcggcggaggctctttcgaacaagttcagctggttcagagcggagccgaagtgaagaaacctggcagcagcgtgaaggtgtcctgcaaagcaagcggcggcacctttagctcctacgccatccactgggttcgacaggcaccaggacaaggactggaatggatgggcagaatcatccccatcgagggcagagcctactacgcccagaaattccagggcagagtgaccatcaccgccgacgagtctacaagcaccgcctacatggaactgagcagcctgagaagcgaggataccgctgtgtactattgcgccagaggccggtacagctacagatattggttcgactactggggccagggcaccctggttacagtctcttctacgcgtatccagaaccctgatcctgccgtgtaccagctgcgggatagcaagagcagcgacaagagcgtgtgtctgttcaccgacttcgacagccagaccaacgtgtcccagagcaaggactccgacgtgtacatcaccgataagtgcgtgctggacatgcggagcatggacttcaagagcaactccgccgtggcctggtccaacaagtccgatttcgcctgcgccaacgccttcaacaacagcattatccccgaggacacattcttcccaagccccgagagcagcgactccaccgaccacgtgaagcccaaagagacagagaacaccaagcagcccagcaagagctgccacaagcccaaggccatcgtgcacaccgagaaagtgaacatgatgagcctgaccgtgctgggcctgcggatgctgttcgccaaaaccgtggccgtgaacttcctgctgaccgccaagctgttcttcctcctcaccgcc

SEQ ID NO: 39765 - DNA, 3000 bp, synthetic construct
  source 1..3000: mol_type = other DNA
atggccttaccagtgaccgccttgctcctgccgctggccttgctgctccacgccgccaggccggaagtgcagctggttgaatctggcggaggactggttcagcctggcggatctctgagactgtcttgtgccgccagcggcttcagcttcagcgacttttggatgagctgggtccgacaggcccctggcaaaggacttgaatgggtcgccacaatcagccaggccggcagcgagaaggactacgtggactctgtgaagggcagattcaccatcagccgggacaacgccaagaagtccctgtacctccagatgaacagcctgagagccgaggacaccgccgtgtactattgtgcctctggcgtgtacagcttcgactacagaggccagggcaccctggtcacagtctcttctggtaccggcggaggcggatctggcggcggaggtagcggtggcggaggatctgaattcgagatcgtgctgacacagtctcccgccacactgtcactgtctccaggcgaaagagccacactgagctgtagagccagccagagcgtgtcctcttacctggcctggtatcagcagaagcctggacaggctccccggctgctgatctacgatgccagcaatagagccacaggcatccccgccagattttctggctctggcagcggcaccgatttcaccctgaccataagcagcctggaacctgaggacttcgccgtgtactactgccagcagagaagcgactggcccctgacatttggcggcggaacaaaggtggaaatcaaactcgagatccagaaccctgatcctgccgtgtaccagctgcgggatagcaagagcagcgacaagagcgtgtgtctgttcaccgacttcgacagccagaccaacgtgtcccagagcaaggactccgacgtgtacatcaccgataagtgcgtgctggacatgcggagcatggacttcaagagcaactccgccgtggcctggtccaacaagtccgatttcgcctgcgccaacgccttcaacaacagcattatccccgaggacacattcttcccaagccccgagagcagcgactccaccgaccacgtgaagcccaaagagacagagaacaccaagcagcccagcaagagctgccacaagcccaaggccatcgtgcacaccgagaaagtgaacatgatgagcctgaccgtgctgggcctgcggatgctgttcgccaaaaccgtggccgtgaacttcctgctgaccgccaagctgttcttcctcctcaccgcccgcgccaagagaagcggatctggcgtgaagcagaccctgaatttcgacctgctgaagctggctggcgacgtggaatccaacccaggccctactagtatggactggatttggcgcatccttttccttgtcggcgctgctaccggcgcgcattccgggccccagctccagctgcaagagtctggacctggcctggtcaagcctagcgagacactgagcctgacctgtaccgtgtccggcgatagcatcagcagcggcgattactactggggctggatcagacagcctcctggcaaaggactggaatggatcggccacatctactacagcggcgtgacctactacaaccccagcctgaagtccagagtgaccatcagcgtggacaccagccggaaccagttctccctgaagctgtctagcgtgacagccgccgataccgccgtgtactactgcaccagagaggacagcagcaactggcggagtagaggccagggaacactggtcacagttagctctggatccggcggaggcggaagtggaggcggaggatctggcggcggaggctctttcgaacaagttcagctggttcagagcggagccgaagtgaagaaacctggcagcagcgtgaaggtgtcctgcaaagcaagcggcggcacctttagctcctacgccatccactgggttcgacaggcaccaggacaaggactggaatggatgggcagaatcatccccatcgagggcagagcctactacgcccagaaattccagggcagagtgaccatcaccgccgacgagtctacaagcaccgcctacatggaactgagcagcctgagaagcgaggataccgctgtgtactattgcgccagaggccggtacagctacagatattggttcgactactggggccagggcaccctggttacagtctcttctacgcgtgaggacctgaagaacgtgttcccacctgaggtggccgtgttcgagcctagcgaggccgagatcagccacacccagaaagccaccctcgtgtgcctggctaccggcttctaccccgaccatgtggaactgtcttggtgggtcaacggcaaagaggtgcacagcggcgtgtgtaccgacccccagccactgaaagaacagcccgccctgaacgacagccggtactgcctgagcagcagactgagagtgtccgccaccttctggcagaacccccggaaccacttcagatgccaggtgcagttctacggcctgagcgagaacgacgagtggacccaggacagagccaagcccgtgacccagatcgtgtctgccgaagcctggggcagagccgatgatgtgattaagatccactggcaggaaaagaagtccaacaccatcctgggcagccaggaaggcaacaccatgaagaccaacgacacctacatgaagttcagctggctgaccgtgcccgagaagtccctggacaaagaacacagatgcatcgtgcggcacgaaaacaacaagaacggcgtggaccaggaaatcatcttcccacccatcaagaccgatgtgattacaatggaccccaaggacaactgctccaaggacgccaacgataccctgctgctccagctgaccaacaccagcgcctactacatgtacttgttgctgctgctgaagtccgtggtgtacttcgccatcatcacatgctgcctgctgatggctatggtcaagcggaaggacagccgggga

SEQ ID NO: 39766 - DNA, 2166 bp, synthetic construct
  source 1..2166: mol_type = other DNA
atggccttaccagtgaccgccttgctcctgccgctggccttgctgctccacgccgccaggccggagatcgtgctgacacagtctcccgccacactgtcactgtctccaggcgaaagagccacactgagctgtagagccagccagagcgtgtcctcttacctggcctggtatcagcagaagcctggacaggctccccggctgctgatctacgatgccagcaatagagccacaggcatccccgccagattttctggctctggcagcggcaccgatttcaccctgaccataagcagcctggaacctgaggacttcgccgtgtactactgccagcagagaagcgactggcccctgacatttggcggcggaacaaaggtggaaatcaaactcgaggacctgaagaacgtgttcccacctgaggtggccgtgttcgagcctagcgaggccgagatcagccacacccagaaagccaccctcgtgtgcctggctaccggcttctaccccgaccatgtggaactgtcttggtgggtcaacggcaaagaggtgcacagcggcgtgtgtaccgacccccagccactgaaagaacagcccgccctgaacgacagccggtactgcctgagcagcagactgagagtgtccgccaccttctggcagaacccccggaaccacttcagatgccaggtgcagttctacggcctgagcgagaacgacgagtggacccaggacagagccaagcccgtgacccagatcgtgtctgccgaagcctggggcagagccgatgatgtgattaagatccactggcaggaaaagaagtccaacaccatcctgggcagccaggaaggcaacaccatgaagaccaacgacacctacatgaagttcagctggctgaccgtgcccgagaagtccctggacaaagaacacagatgcatcgtgcggcacgaaaacaacaagaacggcgtggaccaggaaatcatcttcccacccatcaagaccgatgtgattacaatggaccccaaggacaactgctccaaggacgccaacgataccctgctgctccagctgaccaacaccagcgcctactacatgtacttgttgctgctgctgaagtccgtggtgtacttcgccatcatcacatgctgcctgctgcggagaaccgccttctgctgcaacggcgagaagtctagggccaagcgatctggatctggagcaacaaacttctcactactcaaacaagcaggtgacgtggaggagaatcccgggcctactagtatggactggatttggcgcatccttttccttgtcggcgctgctaccggcgcgcattccttcgaacaagttcagctggttcagagcggagccgaagtgaagaaacctggcagcagcgtgaaggtgtcctgcaaagcaagcggcggcacctttagctcctacgccatccactgggttcgacaggcaccaggacaaggactggaatggatgggcagaatcatccccatcgagggcagagcctactacgcccagaaattccagggcagagtgaccatcaccgccgacgagtctacaagcaccgcctacatggaactgagcagcctgagaagcgaggataccgctgtgtactattgcgccagaggccggtacagctacagatattggttcgactactggggccagggcaccctggttacagtctcttctacgcgtatccagaaccctgatcctgccgtgtaccagctgcgggatagcaagagcagcgacaagagcgtgtgtctgttcaccgacttcgacagccagaccaacgtgtcccagagcaaggactccgacgtgtacatcaccgataagtgcgtgctggacatgcggagcatggacttcaagagcaactccgccgtggcctggtccaacaagtccgatttcgcctgcgccaacgccttcaacaacagcattatccccgaggacacattcttcccaagccccgagagcagcgactccaccgaccacgtgaagcccaaagagacagagaacaccaagcagcccagcaagagctgccacaagcccaaggccatcgtgcacaccgagaaagtgaacatgatgagcctgaccgtgctgggcctgcggatgctgttcgccaaaaccgtggccgtgaacttcctgctgaccgccaagctgttcttcctc

SEQ ID NO: 39767 - DNA, 2178 bp, synthetic construct
  source 1..2178: mol_type = other DNA
atggccttaccagtgaccgccttgctcctgccgctggccttgctgctccacgccgccaggccggagatcgtgctgacacagtctcccgccacactgtcactgtctccaggcgaaagagccacactgagctgtagagccagccagagcgtgtcctcttacctggcctggtatcagcagaagcctggacaggctccccggctgctgatctacgatgccagcaatagagccacaggcatccccgccagattttctggctctggcagcggcaccgatttcaccctgaccataagcagcctggaacctgaggacttcgccgtgtactactgccagcagagaagcgactggcccctgacatttggcggcggaacaaaggtggaaatcaaactcgagatccagaaccctgatcctgccgtgtaccagctgcgggatagcaagagcagcgacaagagcgtgtgtctgttcaccgacttcgacagccagaccaacgtgtcccagagcaaggactccgacgtgtacatcaccgataagtgcgtgctggacatgcggagcatggacttcaagagcaactccgccgtggcctggtccaacaagtccgatttcgcctgcgccaacgccttcaacaacagcattatccccgaggacacattcttcccaagccccgagagcagcgactccaccgaccacgtgaagcccaaagagacagagaacaccaagcagcccagcaagagctgccacaagcccaaggccatcgtgcacaccgagaaagtgaacatgatgagcctgaccgtgctgggcctgcggatgctgttcgccaaaaccgtggccgtgaacttcctgctgaccgccaagctgttcttcctccgcgccaagagaagcggatctggcgtgaagcagaccctgaatttcgacctgctgaagctggctggcgacgtggaatccaacccaggccctactagtatggactggatttggcgcatccttttccttgtcggcgctgctaccggcgcgcattccttcgaacaagttcagctggttcagagcggagccgaagtgaagaaacctggcagcagcgtgaaggtgtcctgcaaagcaagcggcggcacctttagctcctacgccatccactgggttcgacaggcaccaggacaaggactggaatggatgggcagaatcatccccatcgagggcagagcctactacgcccagaaattccagggcagagtgaccatcaccgccgacgagtctacaagcaccgcctacatggaactgagcagcctgagaagcgaggataccgctgtgtactattgcgccagaggccggtacagctacagatattggttcgactactggggccagggcaccctggttacagtctcttctacgcgtgaggacctgaagaacgtgttcccacctgaggtggccgtgttcgagcctagcgaggccgagatcagccacacccagaaagccaccctcgtgtgcctggctaccggcttctaccccgaccatgtggaactgtcttggtgggtcaacggcaaagaggtgcacagcggcgtgtgtaccgacccccagccactgaaagaacagcccgccctgaacgacagccggtactgcctgagcagcagactgagagtgtccgccaccttctggcagaacccccggaaccacttcagatgccaggtgcagttctacggcctgagcgagaacgacgagtggacccaggacagagccaagcccgtgacccagatcgtgtctgccgaagcctggggcagagccgatgatgtgattaagatccactggcaggaaaagaagtccaacaccatcctgggcagccaggaaggcaacaccatgaagaccaacgacacctacatgaagttcagctggctgaccgtgcccgagaagtccctggacaaagaacacagatgcatcgtgcggcacgaaaacaacaagaacggcgtggaccaggaaatcatcttcccacccatcaagaccgatgtgattacaatggaccccaaggacaactgctccaaggacgccaacgataccctgctgctccagctgaccaacaccagcgcctactacatgtacttgttgctgctgctgaagtccgtggtgtacttcgccatcatcacatgctgcctgctgcggagaaccgccttctgctgcaacggcgagaagtct

SEQ ID NO: 39768 - DNA, 2571 bp, synthetic construct
  source 1..2571: mol_type = other DNA
atggccttaccagtgaccgccttgctcctgccgctggccttgctgctccacgccgccaggccggaagtgcagctggttgaatctggcggaggactggttcagcctggcggatctctgagactgtcttgtgccgccagcggcttcagcttcagcgacttttggatgagctgggtccgacaggcccctggcaaaggacttgaatgggtcgccacaatcagccaggccggcagcgagaaggactacgtggactctgtgaagggcagattcaccatcagccgggacaacgccaagaagtccctgtacctccagatgaacagcctgagagccgaggacaccgccgtgtactattgtgcctctggcgtgtacagcttcgactacagaggccagggcaccctggtcacagtctcttctggtaccggcggaggcggatctggcggcggaggtagcggtggcggaggatctgaattcgagatcgtgctgacacagtctcccgccacactgtcactgtctccaggcgaaagagccacactgagctgtagagccagccagagcgtgtcctcttacctggcctggtatcagcagaagcctggacaggctccccggctgctgatctacgatgccagcaatagagccacaggcatccccgccagattttctggctctggcagcggcaccgatttcaccctgaccataagcagcctggaacctgaggacttcgccgtgtactactgccagcagagaagcgactggcccctgacatttggcggcggaacaaaggtggaaatcaaactcgaggacctgaagaacgtgttcccacctgaggtggccgtgttcgagcctagcgaggccgagatcagccacacccagaaagccaccctcgtgtgcctggctaccggcttctaccccgaccatgtggaactgtcttggtgggtcaacggcaaagaggtgcacagcggcgtgtgtaccgacccccagccactgaaagaacagcccgccctgaacgacagccggtactgcctgagcagcagactgagagtgtccgccaccttctggcagaacccccggaaccacttcagatgccaggtgcagttctacggcctgagcgagaacgacgagtggacccaggacagagccaagcccgtgacccagatcgtgtctgccgaagcctggggcagagccgatgatgtgattaagatccactggcaggaaaagaagtccaacaccatcctgggcagccaggaaggcaacaccatgaagaccaacgacacctacatgaagttcagctggctgaccgtgcccgagaagtccctggacaaagaacacagatgcatcgtgcggcacgaaaacaacaagaacggcgtggaccaggaaatcatcttcccacccatcaagaccgatgtgattacaatggaccccaaggacaactgctccaaggacgccaacgataccctgctgctccagctgaccaacaccagcgcctactacatgtacttgttgctgctgctgaagtccgtggtgtacttcgccatcatcacatgctgcctgctgcggagaaccgccttctgctgcaacggcgagaagtctagggccaagcgatctggatctggagcaacaaacttctcactactcaaacaagcaggtgacgtggaggagaatcccgggcctactagtatggactggatttggcgcatccttttccttgtcggcgctgctaccggcgcgcattccttcgaacaagttcagctggttcagagcggagccgaagtgaagaaacctggcagcagcgtgaaggtgtcctgcaaagcaagcggcggcacctttagctcctacgccatccactgggttcgacaggcaccaggacaaggactggaatggatgggcagaatcatccccatcgagggcagagcctactacgcccagaaattccagggcagagtgaccatcaccgccgacgagtctacaagcaccgcctacatggaactgagcagcctgagaagcgaggataccgctgtgtactattgcgccagaggccggtacagctacagatattggttcgactactggggccagggcaccctggttacagtctcttctacgcgtatccagaaccctgatcctgccgtgtaccagctgcgggatagcaagagcagcgacaagagcgtgtgtctgttcaccgacttcgacagccagaccaacgtgtcccagagcaaggactccgacgtgtacatcaccgataagtgcgtgctggacatgcggagcatggacttcaagagcaactccgccgtggcctggtccaacaagtccgatttcgcctgcgccaacgccttcaacaacagcattatccccgaggacacattcttcccaagccccgagagcagcgactccaccgaccacgtgaagcccaaagagacagagaacaccaagcagcccagcaagagctgccacaagcccaaggccatcgtgcacaccgagaaagtgaacatgatgagcctgaccgtgctgggcctgcggatgctgttcgccaaaaccgtggccgtgaacttcctgctgaccgccaagctgttcttcctc

SEQ ID NO: 39769 - DNA, 2982 bp, synthetic construct
  source 1..2982: mol_type = other DNA
atggccttaccagtgaccgccttgctcctgccgctggccttgctgctccacgccgccaggccggaagtgcagctggttgaatctggcggaggactggttcagcctggcggatctctgagactgtcttgtgccgccagcggcttcagcttcagcgacttttggatgagctgggtccgacaggcccctggcaaaggacttgaatgggtcgccacaatcagccaggccggcagcgagaaggactacgtggactctgtgaagggcagattcaccatcagccgggacaacgccaagaagtccctgtacctccagatgaacagcctgagagccgaggacaccgccgtgtactattgtgcctctggcgtgtacagcttcgactacagaggccagggcaccctggtcacagtctcttctggtaccggcggaggcggatctggcggcggaggtagcggtggcggaggatctgaattcgagatcgtgctgacacagtctcccgccacactgtcactgtctccaggcgaaagagccacactgagctgtagagccagccagagcgtgtcctcttacctggcctggtatcagcagaagcctggacaggctccccggctgctgatctacgatgccagcaatagagccacaggcatccccgccagattttctggctctggcagcggcaccgatttcaccctgaccataagcagcctggaacctgaggacttcgccgtgtactactgccagcagagaagcgactggcccctgacatttggcggcggaacaaaggtggaaatcaaactcgaggacctgaagaacgtgttcccacctgaggtggccgtgttcgagcctagcgaggccgagatcagccacacccagaaagccaccctcgtgtgcctggctaccggcttctaccccgaccatgtggaactgtcttggtgggtcaacggcaaagaggtgcacagcggcgtgtgtaccgacccccagccactgaaagaacagcccgccctgaacgacagccggtactgcctgagcagcagactgagagtgtccgccaccttctggcagaacccccggaaccacttcagatgccaggtgcagttctacggcctgagcgagaacgacgagtggacccaggacagagccaagcccgtgacccagatcgtgtctgccgaagcctggggcagagccgatgatgtgattaagatccactggcaggaaaagaagtccaacaccatcctgggcagccaggaaggcaacaccatgaagaccaacgacacctacatgaagttcagctggctgaccgtgcccgagaagtccctggacaaagaacacagatgcatcgtgcggcacgaaaacaacaagaacggcgtggaccaggaaatcatcttcccacccatcaagaccgatgtgattacaatggaccccaaggacaactgctccaaggacgccaacgataccctgctgctccagctgaccaacaccagcgcctactacatgtacttgttgctgctgctgaagtccgtggtgtacttcgccatcatcacatgctgcctgctgcggagaaccgccttctgctgcaacggcgagaagtctagggccaagcgatctggatctggagcaacaaacttctcactactcaaacaagcaggtgacgtggaggagaatcccgggcctactagtatggactggatttggcgcatccttttccttgtcggcgctgctaccggcgcgcattccgggccccagctccagctgcaagagtctggacctggcctggtcaagcctagcgagacactgagcctgacctgtaccgtgtccggcgatagcatcagcagcggcgattactactggggctggatcagacagcctcctggcaaaggactggaatggatcggccacatctactacagcggcgtgacctactacaaccccagcctgaagtccagagtgaccatcagcgtggacaccagccggaaccagttctccctgaagctgtctagcgtgacagccgccgataccgccgtgtactactgcaccagagaggacagcagcaactggcggagtagaggccagggaacactggtcacagttagctctggatccggcggaggcggaagtggaggcggaggatctggcggcggaggctctttcgaacaagttcagctggttcagagcggagccgaagtgaagaaacctggcagcagcgtgaaggtgtcctgcaaagcaagcggcggcacctttagctcctacgccatccactgggttcgacaggcaccaggacaaggactggaatggatgggcagaatcatccccatcgagggcagagcctactacgcccagaaattccagggcagagtgaccatcaccgccgacgagtctacaagcaccgcctacatggaactgagcagcctgagaagcgaggataccgctgtgtactattgcgccagaggccggtacagctacagatattggttcgactactggggccagggcaccctggttacagtctcttctacgcgtatccagaaccctgatcctgccgtgtaccagctgcgggatagcaagagcagcgacaagagcgtgtgtctgttcaccgacttcgacagccagaccaacgtgtcccagagcaaggactccgacgtgtacatcaccgataagtgcgtgctggacatgcggagcatggacttcaagagcaactccgccgtggcctggtccaacaagtccgatttcgcctgcgccaacgccttcaacaacagcattatccccgaggacacattcttcccaagccccgagagcagcgactccaccgaccacgtgaagcccaaagagacagagaacaccaagcagcccagcaagagctgccacaagcccaaggccatcgtgcacaccgagaaagtgaacatgatgagcctgaccgtgctgggcctgcggatgctgttcgccaaaaccgtggccgtgaacttcctgctgaccgccaagctgttcttcctc

SEQ ID NO: 39770 - DNA, 1860 bp, synthetic construct
  source 1..1860: mol_type = other DNA
atggccttaccagtgaccgccttgctcctgccgctggccttgctgctccacgccgccaggccggagatcgtgctgacacagtctcccgccacactgtcactgtctccaggcgaaagagccacactgagctgtagagccagccagagcgtgtcctcttacctggcctggtatcagcagaagcctggacaggctccccggctgctgatctacgatgccagcaatagagccacaggcatccccgccagattttctggctctggcagcggcaccgatttcaccctgaccataagcagcctggaacctgaggacttcgccgtgtactactgccagcagagaagcgactggcccctgacatttggcggcggaacaaaggtggaaatcaaactcgaggacctgaagaacgtgttcccacctgaggtggccgtgttcgagcctagcgaggccgagatcagccacacccagaaagccaccctcgtgtgcctggctaccggcttctaccccgaccatgtggaactgtcttggtgggtcaacggcaaagaggtgcacagcggcgtgtctaccgacccccagccactgaaagaacagcccgccctgaacgacagccggtactgcctgagcagcagactgagagtgtccgccaccttctggcagaacccccggaaccacttcagatgccaggtgcagttctacggcctgagcgagaacgacgagtggacccaggacagagccaagcccgtgacccagatcgtgtctgccgaagcctggggcagagccgattgcgacgtgaagctggtggaaaagagcttcgagacagacaccaacctgaacttccagaacctgagcgtgatcggcttcagaatcctgctgctgaaagtggccggctttaacctgctgatgaccctgcggctgtggtccagcagggccaagcgatctggatctggagcaacaaacttctcactactcaaacaagcaggtgacgtggaggagaatcccgggcctactagtatggactggatttggcgcatccttttccttgtcggcgctgctaccggcgcgcattccttcgaacaagttcagctggttcagagcggagccgaagtgaagaaacctggcagcagcgtgaaggtgtcctgcaaagcaagcggcggcacctttagctcctacgccatccactgggttcgacaggcaccaggacaaggactggaatggatgggcagaatcatccccatcgagggcagagcctactacgcccagaaattccagggcagagtgaccatcaccgccgacgagtctacaagcaccgcctacatggaactgagcagcctgagaagcgaggataccgctgtgtactattgcgccagaggccggtacagctacagatattggttcgactactggggccagggcaccctggttacagtctcttctacgcgtatccagaaccctgatcctgccgtgtaccagctgcgggatagcaagagcagcgacaagagcgtgtgtctgttcaccgacttcgacagccagaccaacgtgtcccagagcaaggactccgacgtgtacatcaccgataagaccgtgctggacatgcggagcatggacttcaagagcaactccgccgtggcctggtccaacaagtccgatttcgcctgcgccaacgccttcaacaacagcattatccccgaggacacattcttcccaagccccgagagcagctgcggctttaccagcgagagctaccagcagggcgtgctgagcgccaccatcctgtacgagatcctgctgggcaaggccaccctgtacgccgtgctggtgtctgccctggtgctgatggctatggtcaagcggaaggacagccgggga

SEQ ID NO: 39771 - DNA, 1860 bp, synthetic construct
  source 1..1860: mol_type = other DNA
atggccttaccagtgaccgccttgctcctgccgctggccttgctgctccacgccgccaggccggagatcgtgctgacacagtctcccgccacactgtcactgtctccaggcgaaagagccacactgagctgtagagccagccagagcgtgtcctcttacctggcctggtatcagcagaagcctggacaggctccccggctgctgatctacgatgccagcaatagagccacaggcatccccgccagattttctggctctggcagcggcaccgatttcaccctgaccataagcagcctggaacctgaggacttcgccgtgtactactgccagcagagaagcgactggcccctgacatttggcggcggaacaaaggtggaaatcaaactcgaggacctgaagaacgtgttcccacctgaggtggccgtgttcgagcctagcgaggccgagatcagccacacccagaaagccaccctcgtgtgcctggctaccggcttctaccccgaccatgtggaactgtcttggtgggtcaacggcaaagaggtgcacagcggcgtgtctaccgacccccagccactgaaagaacagcccgccctgaacgacagccggtactgcctgagcagcagactgagagtgtccgccaccttctggcagaacccccggaaccacttcagatgccaggtgcagttctacggcctgagcgagaacgacgagtggacccaggacagagccaagcccgtgacccagatcgtgtctgccgaagcctggggcagagccgattgcggctttaccagcgagagctaccagcagggcgtgctgagcgccaccaacctgagcgtgatcggcttcagaatcctgctgctgaaagtggccggctttaacctgctgatgaccctgcggctgtggtccagcagggccaagcgatctggatctggagcaacaaacttctcactactcaaacaagcaggtgacgtggaggagaatcccgggcctactagtatggactggatttggcgcatccttttccttgtcggcgctgctaccggcgcgcattccttcgaacaagttcagctggttcagagcggagccgaagtgaagaaacctggcagcagcgtgaaggtgtcctgcaaagcaagcggcggcacctttagctcctacgccatccactgggttcgacaggcaccaggacaaggactggaatggatgggcagaatcatccccatcgagggcagagcctactacgcccagaaattccagggcagagtgaccatcaccgccgacgagtctacaagcaccgcctacatggaactgagcagcctgagaagcgaggataccgctgtgtactattgcgccagaggccggtacagctacagatattggttcgactactggggccagggcaccctggttacagtctcttctacgcgtatccagaaccctgatcctgccgtgtaccagctgcgggatagcaagagcagcgacaagagcgtgtgtctgttcaccgacttcgacagccagaccaacgtgtcccagagcaaggactccgacgtgtacatcaccgataagaccgtgctggacatgcggagcatggacttcaagagcaactccgccgtggcctggtccaacaagtccgatttcgcctgcgccaacgccttcaacaacagcattatccccgaggacacattcttcccaagccccgagagcagctgcgacgtgaagctggtggaaaagagcttcgagacagacaccaacctgaacttccagatcctgtacgagatcctgctgggcaaggccaccctgtacgccgtgctggtgtctgccctggtgctgatggctatggtcaagcggaaggacagccgggga

SEQ ID NO: 39772 - DNA, 2172 bp, synthetic construct
  source 1..2172: mol_type = other DNA
atggccttaccagtgaccgccttgctcctgccgctggccttgctgctccacgccgccaggccggagatcgtgctgacacagtctcccgccacactgtcactgtctccaggcgaaagagccacactgagctgtagagccagccagagcgtgtcctcttacctggcctggtatcagcagaagcctggacaggctccccggctgctgatctacgatgccagcaatagagccacaggcatccccgccagattttctggctctggcagcggcaccgatttcaccctgaccataagcagcctggaacctgaggacttcgccgtgtactactgccagcagagaagcgactggcccctgacatttggcggcggaacaaaggtggaaatcaaactcgaggacctgaagaacgtgttcccacctgaggtggccgtgttcgagcctagcgaggccgagatcagccacacccagaaagccaccctcgtgtgcctggctaccggcttctaccccgaccatgtggaactgtcttggtgggtcaacggcaaagaggtgcacagcggcgtgtctaccgacccccagccactgaaagaacagcccgccctgaacgacagccggtactgcctgagcagcagactgagagtgtccgccaccttctggcagaacccccggaaccacttcagatgccaggtgcagttctacggcctgagcgagaacgacgagtggacccaggacagagccaagcccgtgacccagatcgtgtctgccgaagcctggggcagagccgatgatgtgattaagatccactggcaggaaaagaagtccaacaccatcctgggcagccaggaaggcaacaccatgaagaccaacgacacctacatgaagttcagctggctgaccgtgcccgagaagtccctggacaaagaacacagatgcatcgtgcggcacgaaaacaacaagaacggcgtggaccaggaaatcatcttcccacccatcaagaccgatgtgattacaatggaccccaaggacaactgctccaaggacgccaacgataccctgctgctccagctgaccaacaccagcgcctactacatgtacttgttgctgctgctgaagtccgtggtgtacttcgccatcatcacatgctgcctgctgatggctatggtcaagcggaaggacagccggggaagggccaagcgatctggatctggagcaacaaacttctcactactcaaacaagcaggtgacgtggaggagaatcccgggcctactagtatggactggatttggcgcatccttttccttgtcggcgctgctaccggcgcgcattccttcgaacaagttcagctggttcagagcggagccgaagtgaagaaacctggcagcagcgtgaaggtgtcctgcaaagcaagcggcggcacctttagctcctacgccatccactgggttcgacaggcaccaggacaaggactggaatggatgggcagaatcatccccatcgagggcagagcctactacgcccagaaattccagggcagagtgaccatcaccgccgacgagtctacaagcaccgcctacatggaactgagcagcctgagaagcgaggataccgctgtgtactattgcgccagaggccggtacagctacagatattggttcgactactggggccagggcaccctggttacagtctcttctacgcgtatccagaaccctgatcctgccgtgtaccagctgcgggatagcaagagcagcgacaagagcgtgtgtctgttcaccgacttcgacagccagaccaacgtgtcccagagcaaggactccgacgtgtacatcaccgataagaccgtgctggacatgcggagcatggacttcaagagcaactccgccgtggcctggtccaacaagtccgatttcgcctgcgccaacgccttcaacaacagcattatccccgaggacacattcttcccaagccccgagagcagcgactccaccgaccacgtgaagcccaaagagacagagaacaccaagcagcccagcaagagctgccacaagcccaaggccatcgtgcacaccgagaaagtgaacatgatgagcctgaccgtgctgggcctgcggatgctgttcgccaaaaccgtggccgtgaacttcctgctgaccgccaagctgttcttcctcctcaccgcc

SEQ ID NO: 39773 - DNA, 2166 bp, synthetic construct
  source 1..2166: mol_type = other DNA
atggccttaccagtgaccgccttgctcctgccgctggccttgctgctccacgccgccaggccggagatcgtgctgacacagtctcccgccacactgtcactgtctccaggcgaaagagccacactgagctgtagagccagccagagcgtgtcctcttacctggcctggtatcagcagaagcctggacaggctccccggctgctgatctacgatgccagcaatagagccacaggcatccccgccagattttctggctctggcagcggcaccgatttcaccctgaccataagcagcctggaacctgaggacttcgccgtgtactactgccagcagagaagcgactggcccctgacatttggcggcggaacaaaggtggaaatcaaactcgaggacctgaagaacgtgttcccacctgaggtggccgtgttcgagcctagcgaggccgagatcagccacacccagaaagccaccctcgtgtgcctggctaccggcttctaccccgaccatgtggaactgtcttggtgggtcaacggcaaagaggtgcacagcggcgtgtctaccgacccccagccactgaaagaacagcccgccctgaacgacagccggtactgcctgagcagcagactgagagtgtccgccaccttctggcagaacccccggaaccacttcagatgccaggtgcagttctacggcctgagcgagaacgacgagtggacccaggacagagccaagcccgtgacccagatcgtgtctgccgaagcctggggcagagccgatgatgtgattaagatccactggcaggaaaagaagtccaacaccatcctgggcagccaggaaggcaacaccatgaagaccaacgacacctacatgaagttcagctggctgaccgtgcccgagaagtccctggacaaagaacacagatgcatcgtgcggcacgaaaacaacaagaacggcgtggaccaggaaatcatcttcccacccatcaagaccgatgtgattacaatggaccccaaggacaactgctccaaggacgccaacgataccctgctgctccagctgaccaacaccagcgcctactacatgtacttgttgctgctgctgaagtccgtggtgtacttcgccatcatcacatgctgcctgctgcggagaaccgccttctgctgcaacggcgagaagtctagggccaagcgatctggatctggagcaacaaacttctcactactcaaacaagcaggtgacgtggaggagaatcccgggcctactagtatggactggatttggcgcatccttttccttgtcggcgctgctaccggcgcgcattccttcgaacaagttcagctggttcagagcggagccgaagtgaagaaacctggcagcagcgtgaaggtgtcctgcaaagcaagcggcggcacctttagctcctacgccatccactgggttcgacaggcaccaggacaaggactggaatggatgggcagaatcatccccatcgagggcagagcctactacgcccagaaattccagggcagagtgaccatcaccgccgacgagtctacaagcaccgcctacatggaactgagcagcctgagaagcgaggataccgctgtgtactattgcgccagaggccggtacagctacagatattggttcgactactggggccagggcaccctggttacagtctcttctacgcgtatccagaaccctgatcctgccgtgtaccagctgcgggatagcaagagcagcgacaagagcgtgtgtctgttcaccgacttcgacagccagaccaacgtgtcccagagcaaggactccgacgtgtacatcaccgataagaccgtgctggacatgcggagcatggacttcaagagcaactccgccgtggcctggtccaacaagtccgatttcgcctgcgccaacgccttcaacaacagcattatccccgaggacacattcttcccaagccccgagagcagcgactccaccgaccacgtgaagcccaaagagacagagaacaccaagcagcccagcaagagctgccacaagcccaaggccatcgtgcacaccgagaaagtgaacatgatgagcctgaccgtgctgggcctgcggatgctgttcgccaaaaccgtggccgtgaacttcctgctgaccgccaagctgttcttcctc

SEQ ID NO: 39774 - DNA, 2598 bp, synthetic construct
  source 1..2598: mol_type = other DNA
atggccttaccagtgaccgccttgctcctgccgctggccttgctgctccacgccgccaggccgctcgaggaggacctgaagaacgtgttcccacctgaggtggccgtgttcgagcctagcgaggccgagatcagccacacccagaaagccaccctcgtgtgcctggctaccggcttctaccccgaccatgtggaactgtcttggtgggtcaacggcaaagaggtgcacagcggcgtgtgtaccgacccccagccactgaaagaacagcccgccctgaacgacagccggtactgcctgagcagcagactgagagtgtccgccaccttctggcagaacccccggaaccacttcagatgccaggtgcagttctacggcctgagcgagaacgacgagtggacccaggacagagccaagcccgtgacccagatcgtgtctgccgaagcctggggcagagccgattgcggctttaccagcgagagctaccagcagggcgtgctgagcgccaccaacctgagcgtgatcggcttcagaatcctgctgctgaaagtggccggctttaacctgctgatgaccctgcggctgtggtccagcagggccaagcgatctggatctggagcaacaaacttctcactactcaaacaagcaggtgacgtggaggagaatcccgggcctactagcatggccttaccagtgaccgccttgctcctgccgctggccttgctgctccacgccgccaggccggagatcgtgctgacacagtctcccgccacactgtcactgtctccaggcgaaagagccacactgagctgtagagccagccagagcgtgtcctcttacctggcctggtatcagcagaagcctggacaggctccccggctgctgatctacgatgccagcaatagagccacaggcatccccgccagattttctggctctggcagcggcaccgatttcaccctgaccataagcagcctggaacctgaggacttcgccgtgtactactgccagcagagaagcgactggcccctgacatttggcggcggaacaaaggtggaaatcaaaggcggaggcggaagtggaggcggaggatctggcggcggaggctctcaagttcagctggttcagagcggagccgaagtgaagaaacctggcagcagcgtgaaggtgtcctgcaaagcaagcggcggcacctttagctcctacgccatccactgggttcgacaggcaccaggacaaggactggaatggatgggcagaatcatccccatcgagggcagagcctactacgcccagaaattccagggcagagtgaccatcaccgccgacgagtctacaagcaccgcctacatggaactgagcagcctgagaagcgaggataccgctgtgtactattgcgccagaggccggtacagctacagatattggttcgactactggggccagggcaccctggttacagtctcttctacgcgtatccagaaccctgatcctgccgtgtaccagctgcgggatagcaagagcagcgacaagagcgtgtgtctgttcaccgacttcgacagccagaccaacgtgtcccagagcaaggactccgacgtgtacatcaccgataagtgcgtgctggacatgcggagcatggacttcaagagcaactccgccgtggcctggtccaacaagtccgatttcgcctgcgccaacgccttcaacaacagcattatccccgaggacacattcttcccaagccccgagagcagctgcgacgtgaagctggtggaaaagagcttcgagacagacaccaacctgaacttccagatcctgtacgaggtgatcggcttcagaatcctgctgctgaaagtggccggctttaacctgctgatgaccctgcggctgtggtccagccgcgccaagagaagcggatctggcgtgaagcagaccctgaatttcgacctgctgaagctggctggcgacgtggaatccaacccaggcccttctagaggccatatgaccgagtacaagcccacggtgcgcctcgccacccgcgacgacgtccccagggccgtacgcaccctcgccgccgcgttcgccgactaccccgccacgcgccacaccgtcgatccggaccgccacatcgagcgggtcaccgagctgcaagaactcttcctcacgcgcgtcgggctcgacatcggcaaggtgtgggtcgcggacgacggcgccgcggtggcggtctggaccacgccggagagcgtcgaagcgggggcggtgttcgccgagatcggcccgcgcatggccgagttgagcggttcccggctggccgcgcagcaacagatggaaggcctcctggcgccgcaccggcccaaggagcccgcgtggttcctggccaccgtcggcgtctcgcccgaccaccagggcaagggtctgggcagcgccgtcgtgctccccggagtggaggcggccgagcgcgccggggtgcccgccttcctggagacctccgcgccccgcaacctccccttctacgagcggctcggcttcaccgtcaccgccgacgtcgaggtgcccgaaggaccgcgcacctggtgcatgacccgcaagcccggtgcctga

SEQ ID NO: 39775 - DNA, 2598 bp, synthetic construct
  source 1..2598: mol_type = other DNA
atggccttaccagtgaccgccttgctcctgccgctggccttgctgctccacgccgccaggccgctcgagatccagaaccctgatcctgccgtgtaccagctgcgggatagcaagagcagcgacaagagcgtgtgtctgttcaccgacttcgacagccagaccaacgtgtcccagagcaaggactccgacgtgtacatcaccgataagtgcgtgctggacatgcggagcatggacttcaagagcaactccgccgtggcctggtccaacaagtccgatttcgcctgcgccaacgccttcaacaacagcattatccccgaggacacattcttcccaagccccgagagcagctgcgacgtgaagctggtggaaaagagcttcgagacagacaccaacctgaacttccagatcctgtacgaggtgatcggcttcagaatcctgctgctgaaagtggccggctttaacctgctgatgaccctgcggctgtggtccagcagggccaagcgatctggatctggagcaacaaacttctcactactcaaacaagcaggtgacgtggaggagaatcccgggcctactagcatggccttaccagtgaccgccttgctcctgccgctggccttgctgctccacgccgccaggccggagatcgtgctgacacagtctcccgccacactgtcactgtctccaggcgaaagagccacactgagctgtagagccagccagagcgtgtcctcttacctggcctggtatcagcagaagcctggacaggctccccggctgctgatctacgatgccagcaatagagccacaggcatccccgccagattttctggctctggcagcggcaccgatttcaccctgaccataagcagcctggaacctgaggacttcgccgtgtactactgccagcagagaagcgactggcccctgacatttggcggcggaacaaaggtggaaatcaaaggcggaggcggaagtggaggcggaggatctggcggcggaggctctcaagttcagctggttcagagcggagccgaagtgaagaaacctggcagcagcgtgaaggtgtcctgcaaagcaagcggcggcacctttagctcctacgccatccactgggttcgacaggcaccaggacaaggactggaatggatgggcagaatcatccccatcgagggcagagcctactacgcccagaaattccagggcagagtgaccatcaccgccgacgagtctacaagcaccgcctacatggaactgagcagcctgagaagcgaggataccgctgtgtactattgcgccagaggccggtacagctacagatattggttcgactactggggccagggcaccctggttacagtctcttctacgcgtgaggacctgaagaacgtgttcccacctgaggtggccgtgttcgagcctagcgaggccgagatcagccacacccagaaagccaccctcgtgtgcctggctaccggcttctaccccgaccatgtggaactgtcttggtgggtcaacggcaaagaggtgcacagcggcgtgtgtaccgacccccagccactgaaagaacagcccgccctgaacgacagccggtactgcctgagcagcagactgagagtgtccgccaccttctggcagaacccccggaaccacttcagatgccaggtgcagttctacggcctgagcgagaacgacgagtggacccaggacagagccaagcccgtgacccagatcgtgtctgccgaagcctggggcagagccgattgcggctttaccagcgagagctaccagcagggcgtgctgagcgccaccaacctgagcgtgatcggcttcagaatcctgctgctgaaagtggccggctttaacctgctgatgaccctgcggctgtggtccagccgcgccaagagaagcggatctggcgtgaagcagaccctgaatttcgacctgctgaagctggctggcgacgtggaatccaacccaggcccttctagaggccatatgaccgagtacaagcccacggtgcgcctcgccacccgcgacgacgtccccagggccgtacgcaccctcgccgccgcgttcgccgactaccccgccacgcgccacaccgtcgatccggaccgccacatcgagcgggtcaccgagctgcaagaactcttcctcacgcgcgtcgggctcgacatcggcaaggtgtgggtcgcggacgacggcgccgcggtggcggtctggaccacgccggagagcgtcgaagcgggggcggtgttcgccgagatcggcccgcgcatggccgagttgagcggttcccggctggccgcgcagcaacagatggaaggcctcctggcgccgcaccggcccaaggagcccgcgtggttcctggccaccgtcggcgtctcgcccgaccaccagggcaagggtctgggcagcgccgtcgtgctccccggagtggaggcggccgagcgcgccggggtgcccgccttcctggagacctccgcgccccgcaacctccccttctacgagcggctcggcttcaccgtcaccgccgacgtcgaggtgcccgaaggaccgcgcacctggtgcatgacccgcaagcccggtgcctga

SEQ ID NO: 39776 - DNA, 2598 bp, synthetic construct; identical to SEQ ID NO: 39774
  source 1..2598: mol_type = other DNA

SEQ ID NO: 39777 - DNA, 2922 bp, synthetic construct
  source 1..2922: mol_type = other DNA
atggccttaccagtgaccgccttgctcctgccgctggccttgctgctccacgccgccaggccgctcgaggaggacctgaagaacgtgttcccacctgaggtggccgtgttcgagcctagcgaggccgagatcagccacacccagaaagccaccctcgtgtgcctggctaccggcttctaccccgaccatgtggaactgtcttggtgggtcaacggcaaagaggtgcacagcggcgtgtctaccgacccccagccactgaaagaacagcccgccctgaacgacagccggtactgcctgagcagcagactgagagtgtccgccaccttctggcagaacccccggaaccacttcagatgccaggtgcagttctacggcctgagcgagaacgacgagtggacccaggacagagccaagcccgtgacccagatcgtgtctgccgaagcctggggcagagccgatgatgtgattaagatccactggcaggaaaagaagtccaacaccatcctgggcagccaggaaggcaacaccatgaagaccaacgacacctacatgaagttcagctggctgaccgtgcccgagaagtccctggacaaagaacacagatgcatcgtgcggcacgaaaacaacaagaacggcgtggaccaggaaatcatcttcccacccatcaagaccgatgtgattacaatggaccccaaggacaactgctccaaggacgccaacgataccctgctgctccagctgaccaacaccagcgcctactacatgtacttgttgctgctgctgaagtccgtggtgtacttcgccatcatcacatgctgcctgctgatggctatggtcaagcggaaggacagccggggaagggccaagcgatctggatctggagcaacaaacttctcactactcaaacaagcaggtgacgtggaggagaatcccgggcctactagcatggccttaccagtgaccgccttgctcctgccgctggccttgctgctccacgccgccaggccggagatcgtgctgacacagtctcccgccacactgtcactgtctccaggcgaaagagccacactgagctgtagagccagccagagcgtgtcctcttacctggcctggtatcagcagaagcctggacaggctccccggctgctgatctacgatgccagcaatagagccacaggcatccccgccagattttctggctctggcagcggcaccgatttcaccctgaccataagcagcctggaacctgaggacttcgccgtgtactactgccagcagagaagcgactggcccctgacatttggcggcggaacaaaggtggaaatcaaaggcggaggcggaagtggaggcggaggatctggcggcggaggctctcaagttcagctggttcagagcggagccgaagtgaagaaacctggcagcagcgtgaaggtgtcctgcaaagcaagcggcggcacctttagctcctacgccatccactgggttcgacaggcaccaggacaaggactggaatggatgggcagaatcatccccatcgagggcagagcctactacgcccagaaattccagggcagagtgaccatcaccgccgacgagtctacaagcaccgcctacatggaactgagcagcctgagaagcgaggataccgctgtgtactattgcgccagaggccggtacagctacagatattggttcgactactggggccagggcaccctggttacagtctcttctacgcgtatccagaaccctgatcctgccgtgtaccagctgcgggatagcaagagcagcgacaagagcgtgtgtctgttcaccgacttcgacagccagaccaacgtgtcccagagcaaggactccgacgtgtacatcaccgataagaccgtgctggacatgcggagcatggacttcaagagcaactccgccgtggcctggtccaacaagtccgatttcgcctgcgccaacgccttcaacaacagcattatccccgaggacacattcttcccaagccccgagagcagcgactccaccgaccacgtgaagcccaaagagacagagaacaccaagcagcccagcaagagctgccacaagcccaaggccatcgtgcacaccgagaaagtgaacatgatgagcctgaccgtgctgggcctgcggatgctgttcgccaaaaccgtggccgtgaacttcctgctgaccgccaagctgttcttcctcctcaccgcccgcgccaagagaagcggatctggcgtgaagcagaccctgaatttcgacctgctgaagctggctggcgacgtggaatccaacccaggcccttctagaggccatatgaccgagtacaagcccacggtgcgcctcgccacccgcgacgacgtccccagggccgtacgcaccctcgccgccgcgttcgccgactaccccgccacgcgccacaccgtcgatccggaccgccacatcgagcgggtcaccgagctgcaagaactcttcctcacgcgcgtcgggctcgacatcggcaaggtgtgggtcgcggacgacggcgccgcggtggcggtctggaccacgccggagagcgtcgaagcgggggcggtgttcgccgagatcggcccgcgcatggccgagttgagcggttcccggctggccgcgcagcaacagatggaaggcctcctggcgccgcaccggcccaaggagcccgcgtggttcctggccaccgtcggcgtctcgcccgaccaccagggcaagggtctgggcagcgccgtcgtgctccccggagtggaggcggccgagcgcgccggggtgcccgccttcctggagacctccgcgccccgcaacctccccttctacgagcggctcggcttcaccgtcaccgccgacgtcgaggtgcccgaaggaccgcgcacctggtgcatgacccgcaagcccggtgcctga

SEQ ID NO: 39778 - DNA, 2922 bp, synthetic construct
  source 1..2922: mol_type = other DNA
atggccttaccagtgaccgccttgctcctgccgctggccttgctgctccacgccgccaggccgctcgagatccagaaccctgatcctgccgtgtaccagctgcgggatagcaagagcagcgacaagagcgtgtgtctgttcaccgacttcgacagccagaccaacgtgtcccagagcaaggactccgacgtgtacatcaccgataagaccgtgctggacatgcggagcatggacttcaagagcaactccgccgtggcctggtccaacaagtccgatttcgcctgcgccaacgccttcaacaacagcattatccccgaggacacattcttcccaagccccgagagcagcgactccaccgaccacgtgaagcccaaagagacagagaacaccaagcagcccagcaagagctgccacaagcccaaggccatcgtgcacaccgagaaagtgaacatgatgagcctgaccgtgctgggcctgcggatgctgttcgccaaaaccgtggccgtgaacttcctgctgaccgccaagctgttcttcctcctcaccgccagggccaagcgatctggatctggagcaacaaacttctcactactcaaacaagcaggtgacgtggaggagaatcccgggcctactagcatggccttaccagtgaccgccttgctcctgccgctggccttgctgctccacgccgccaggccggagatcgtgctgacacagtctcccgccacactgtcactgtctccaggcgaaagagccacactgagctgtagagccagccagagcgtgtcctcttacctggcctggtatcagcagaagcctggacaggctccccggctgctgatctacgatgccagcaatagagccacaggcatccccgccagattttctggctctggcagcggcaccgatttcaccctgaccataagcagcctggaacctgaggacttcgccgtgtactactgccagcagagaagcgactggcccctgacatttggcggcggaacaaaggtggaaatcaaaggcggaggcggaagtggaggcggaggatctggcggcggaggctctcaagttcagctggttcagagcggagccgaagtgaagaaacctggcagcagcgtgaaggtgtcctgcaaagcaagcggcggcacctttagctcctacgccatccactgggttcgacaggcaccaggacaaggactggaatggatgggcagaatcatccccatcgagggcagagcctactacgcccagaaattccagggcagagtgaccatcaccgccgacgagtctacaagcaccgcctacatggaactgagcagcctgagaagcgaggataccgctgtgtactattgcgccagaggccggtacagctacagatattggttcgactactggggccagggcaccctggttacagtctcttctacgcgtgaggacctgaagaacgtgttcccacctgaggtggccgtgttcgagcctagcgaggccgagatcagccacacccagaaagccaccctcgtgtgcctggctaccggcttctaccccgaccatgtggaactgtcttggtgggtcaacggcaaagaggtgcacagcggcgtgtctaccgacccccagccactgaaagaacagcccgccctgaacgacagccggtactgcctgagcagcagactgagagtgtccgccaccttctggcagaacccccggaaccacttcagatgccaggtgcagttctacggcctgagcgagaacgacgagtggacccaggacagagccaagcccgtgacccagatcgtgtctgccgaagcctggggcagagccgatgatgtgattaagatccactggcaggaaaagaagtccaacaccatcctgggcagccaggaaggcaacaccatgaagaccaacgacacctacatgaagttcagctggctgaccgtgcccgagaagtccctggacaaagaacacagatgcatcgtgcggcacgaaaacaacaagaacggcgtggaccaggaaatcatcttcccacccatcaagaccgatgtgattacaatggaccccaaggacaactgctccaaggacgccaacgataccctgctgctccagctgaccaacaccagcgcctactacatgtacttgttgctgctgctgaagtccgtggtgtacttcgccatcatcacatgctgcctgctgatggctatggtcaagcggaaggacagccggggacgcgccaagagaagcggatctggcgtgaagcagaccctgaatttcgacctgctgaagctggctggcgacgtggaatccaacccaggcccttctagaggccatatgaccgagtacaagcccacggtgcgcctcgccacccgcgacgacgtccccagggccgtacgcaccctcgccgccgcgttcgccgactaccccgccacgcgccacaccgtcgatccggaccgccacatcgagcgggtcaccgagctgcaagaactcttcctcacgcgcgtcgggctcgacatcggcaaggtgtgggtcgcggacgacggcgccgcggtggcggtctggaccacgccggagagcgtcgaagcgggggcggtgttcgccgagatcggcccgcgcatggccgagttgagcggttcccggctggccgcgcagcaacagatggaaggcctcctggcgccgcaccggcccaaggagcccgcgtggttcctggccaccgtcggcgtctcgcccgaccaccagggcaagggtctgggcagcgccgtcgtgctccccggagtggaggcggccgagcgcgccggggtgcccgccttcctggagacctccgcgccccgcaacctccccttctacgagcggctcggcttcaccgtcaccgccgacgtcgaggtgcccgaaggaccgcgcacctggtgcatgacccgcaagcccggtgcctga

SEQ ID NO: 39779 - DNA, 2916 bp, synthetic construct
  source 1..2916: mol_type = other DNA
atggccttaccagtgaccgccttgctcctgccgctggccttgctgctccacgccgccaggccgctcgaggaggacctgaagaacgtgttcccacctgaggtggccgtgttcgagcctagcgaggccgagatcagccacacccagaaagccaccctcgtgtgcctggctaccggcttctaccccgaccatgtggaactgtcttggtgggtcaacggcaaagaggtgcacagcggcgtgtgtaccgacccccagccactgaaagaacagcccgccctgaacgacagccggtactgcctgagcagcagactgagagtgtccgccaccttctggcagaacccccggaaccacttcagatgccaggtgcagttctacggcctgagcgagaacgacgagtggacccaggacagagccaagcccgtgacccagatcgtgtctgccgaagcctggggcagagccgatgatgtgattaagatccactggcaggaaaagaagtccaacaccatcctgggcagccaggaaggcaacaccatgaagaccaacgacacctacatgaagttcagctggctgaccgtgcccgagaagtccctggacaaagaacacagatgcatcgtgcggcacgaaaacaacaagaacggcgtggaccaggaaatcatcttcccacccatcaagaccgatgtgattacaatggaccccaaggacaactgctccaaggacgccaacgataccctgctgctccagctgaccaacaccagcgcctactacatgtacttgttgctgctgctgaagtccgtggtgtacttcgccatcatcacatgctgcctgctgcggagaaccgccttctgctgcaacggcgagaagtctagggccaagcgatctggatctggagcaacaaacttctcactactcaaacaagcaggtgacgtggaggagaatcccgggcctactagcatggccttaccagtgaccgccttgctcctgccgctggccttgctgctccacgccgccaggccggagatcgtgctgacacagtctcccgccacactgtcactgtctccaggcgaaagagccacactgagctgtagagccagccagagcgtgtcctcttacctggcctggtatcagcagaagcctggacaggctccccggctgctgatctacgatgccagcaatagagccacaggcatccccgccagattttctggctctggcagcggcaccgatttcaccctgaccataagcagcctggaacctgaggacttcgccgtgtactactgccagcagagaagcgactggcccctgacatttggcggcggaacaaaggtggaaatcaaaggcggaggcggaagtggaggcggaggatctggcggcggaggctctcaagttcagctggttcagagcggagccgaagtgaagaaacctggcagcagcgtgaaggtgtcctgcaaagcaagcggcggcacctttagctcctacgccatccactgggttcgacaggcaccaggacaaggactggaatggatgggcagaatcatccccatcgagggcagagcctactacgcccagaaattccagggcagagtgaccatcaccgccgacgagtctacaagcaccgcctacatggaactgagcagcctgagaagcgaggataccgctgtgtactattgcgccagaggccggtacagctacagatattggttcgactactggggccagggcaccctggttacagtctcttctacgcgtatccagaaccctgatcctgccgtgtaccagctgcgggatagcaagagcagcgacaagagcgtgtgtctgttcaccgacttcgacagccagaccaacgtgtcccagagcaaggactccgacgtgtacatcaccgataagtgcgtgctggacatgcggagcatggacttcaagagcaactccgccgtggcctggtccaacaagtccgatttcgcctgcgccaacgccttcaacaacagcattatccccgaggacacattcttcccaagccccgagagcagcgactccaccgaccacgtgaagcccaaagagacagagaacaccaagcagcccagcaagagctgccacaagcccaaggccatcgtgcacaccgagaaagtgaacatgatgagcctgaccgtgctgggcctgcggatgctgttcgccaaaaccgtggccgtgaacttcctgctgaccgccaagctgttcttcctccgcgccaagagaagcggatctggcgtgaagcagaccctgaatttcgacctgctgaagctggctggcgacgtggaatccaacccaggcccttctagaggccatatgaccgagtacaagcccacggtgcgcctcgccacccgcgacgacgtccccagggccgtacgcaccctcgccgccgcgttcgccgactaccccgccacgcgccacaccgtcgatccggaccgccacatcgagcgggtcaccgagctgcaagaactcttcctcacgcgcgtcgggctcgacatcggcaaggtgtgggtcgcggacgacggcgccgcggtggcggtctggaccacgccggagagcgtcgaagcgggggcggtgttcgccgagatcggcccgcgcatggccgagttgagcggttcccggctggccgcgcagcaacagatggaaggcctcctggcgccgcaccggcccaaggagcccgcgtggttcctggccaccgtcggcgtctcgcccgaccaccagggcaagggtctgggcagcgccgtcgtgctccccggagtggaggcggccgagcgcgccggggtgcccgccttcctggagacctccgcgccccgcaacctccccttctacgagcggctcggcttcaccgtcaccgccgacgtcgaggtgcccgaaggaccgcgcacctggtgcatgacccgcaagcccggtgcctga

SEQ ID NO: 39780 - DNA, 2916 bp, synthetic construct
  source 1..2916: mol_type = other DNA
atggccttaccagtgaccgccttgctcctgccgctggccttgctgctccacgccgccaggccgctcgagatccagaaccctgatcctgccgtgtaccagctgcgggatagcaagagcagcgacaagagcgtgtgtctgttcaccgacttcgacagccagaccaacgtgtcccagagcaaggactccgacgtgtacatcaccgataagtgcgtgctggacatgcggagcatggacttcaagagcaactccgccgtggcctggtccaacaagtccgatttcgcctgcgccaacgccttcaacaacagcattatccccgaggacacattcttcccaagccccgagagcagcgactccaccgaccacgtgaagcccaaagagacagagaacaccaagcagcccagcaagagctgccacaagcccaaggccatcgtgcacaccgagaaagtgaacatgatgagcctgaccgtgctgggcctgcggatgctgttcgccaaaaccgtggccgtgaacttcctgctgaccgccaagctgttcttcctcagggccaagcgatctggatctggagcaacaaacttctcactactcaaacaagcaggtgacgtggaggagaatcccgggcctactagcatggccttaccagtgaccgccttgctcctgccgctggccttgctgctccacgccgccaggccggagatcgtgctgacacagtctcccgccacactgtcactgtctccaggcgaaagagccacactgagctgtagagccagccagagcgtgtcctcttacctggcctggtatcagcagaagcctggacaggctccccggctgctgatctacgatgccagcaatagagccacaggcatccccgccagattttctggctctggcagcggcaccgatttcaccctgaccataagcagcctggaacctgaggacttcgccgtgtactactgccagcagagaagcgactggcccctgacatttggcggcggaacaaaggtggaaatcaaaggcggaggcggaagtggaggcggaggatctggcggcggaggctctcaagttcagctggttcagagcggagccgaagtgaagaaacctggcagcagcgtgaaggtgtcctgcaaagcaagcggcggcacctttagctcctacgccatccactgggttcgacaggcaccaggacaaggactggaatggatgggcagaatcatccccatcgagggcagagcctactacgcccagaaattccagggcagagtgaccatcaccgccgacgagtctacaagcaccgcctacatggaactgagcagcctgagaagcgaggataccgctgtgtactattgcgccagaggccggtacagctacagatattggttcgactactggggccagggcaccctggttacagtctcttctacgcgtgaggacctgaagaacgtgttcccacctgaggtggccgtgttcgagcctagcgaggccgagatcagccacacccagaaagccaccctcgtgtgcctggctaccggcttctaccccgaccatgtggaactgtcttggtgggtcaacggcaaagaggtgcacagcggcgtgtgtaccgacccccagccactgaaagaacagcccgccctgaacgacagccggtactgcctgagcagcagactgagagtgtccgccaccttctggcagaacccccggaaccacttcagatgccaggtgcagttctacggcctgagcgagaacgacgagtggacccaggacagagccaagcccgtgacccagatcgtgtctgccgaagcctggggcagagccgatgatgtgattaagatccactggcaggaaaagaagtccaacaccatcctgggcagccaggaaggcaacaccatgaagaccaacgacacctacatgaagttcagctggctgaccgtgcccgagaagtccctggacaaagaacacagatgcatcgtgcggcacgaaaacaacaagaacggcgtggaccaggaaatcatcttcccacccatcaagaccgatgtgattacaatggaccccaaggacaactgctccaaggacgccaacgataccctgctgctccagctgaccaacaccagcgcctactacatgtacttgttgctgctgctgaagtccgtggtgtacttcgccatcatcacatgctgcctgctgcggagaaccgccttctgctgcaacggcgagaagtctcgcgccaagagaagcggatctggcgtgaagcagaccctgaatttcgacctgctgaagctggctggcgacgtggaatccaacccaggcccttctagaggccatatgaccgagtacaagcccacggtgcgcctcgccacccgcgacgacgtccccagggccgtacgcaccctcgccgccgcgttcgccgactaccccgccacgcgccacaccgtcgatccggaccgccacatcgagcgggtcaccgagctgcaagaactcttcctcacgcgcgtcgggctcgacatcggcaaggtgtgggtcgcggacgacggcgccgcggtggcggtctggaccacgccggagagcgtcgaagcgggggcggtgttcgccgagatcggcccgcgcatggccgagttgagcggttcccggctggccgcgcagcaacagatggaaggcctcctggcgccgcaccggcccaaggagcccgcgtggttcctggccaccgtcggcgtctcgcccgaccaccagggcaagggtctgggcagcgccgtcgtgctccccggagtggaggcggccgagcgcgccggggtgcccgccttcctggagacctccgcgccccgcaacctccccttctacgagcggctcggcttcaccgtcaccgccgacgtcgaggtgcccgaaggaccgcgcacctggtgcatgacccgcaagcccggtgcctga

SEQ ID NO: 39781 - DNA, 2916 bp, synthetic construct
  source 1..2916: mol_type = other DNA
atggccttaccagtgaccgccttgctcctgccgctggccttgctgctccacgccgccaggccgctcgaggaggacctgaagaacgtgttcccacctgaggtggccgtgttcgagcctagcgaggccgagatcagccacacccagaaagccaccctcgtgtgcctggctaccggcttctaccccgaccatgtggaactgtcttggtgggtcaacggcaaagaggtgcacagcggcgtgtctaccgacccccagccactgaaagaacagcccgccctgaacgacagccggtactgcctgagcagcagactgagagtgtccgccaccttctggcagaacccccggaaccacttcagatgccaggtgcagttctacggcctgagcgagaacgacgagtggacccaggacagagccaagcccgtgacccagatcgtgtctgccgaagcctggggcagagccgatgatgtgattaagatccactggcaggaaaagaagtccaacaccatcctgggcagccaggaaggcaacaccatgaagaccaacgacacctacatgaagttcagctggctgaccgtgcccgagaagtccctggacaaagaacacagatgcatcgtgcggcacgaaaacaacaagaacggcgtggaccaggaaatcatcttcccacccatcaagaccgatgtgattacaatggaccccaaggacaactgctccaaggacgccaacgataccctgctgctccagctgaccaacaccagcgcctactacatgtacttgttgctgctgctgaagtccgtggtgtacttcgccatcatcacatgctgcctgctgcggagaaccgccttctgctgcaacggcgagaagtctagggccaagcgatctggatctggagcaacaaacttctcactactcaaacaagcaggtgacgtggaggagaatcccgggcctactagcatggccttaccagtgaccgccttgctcctgccgctggccttgctgctccacgccgccaggccggagatcgtgctgacacagtctcccgccacactgtcactgtctccaggcgaaagagccacactgagctgtagagccagccagagcgtgtcctcttacctggcctggtatcagcagaagcctggacaggctccccggctgctgatctacgatgccagcaatagagccacaggcatccccgccagattttctggctctggcagcggcaccgatttcaccctgaccataagcagcctggaacctgaggacttcgccgtgtactactgccagcagagaagcgactggcccctgacatttggcggcggaacaaaggtggaaatcaaaggcggaggcggaagtggaggcggaggatctggcggcggaggctctcaagttcagctggttcagagcggagccgaagtgaagaaacctggcagcagcgtgaaggtgtcctgcaaagcaagcggcggcacctttagctcctacgccatccactgggttcgacaggcaccaggacaaggactggaatggatgggcagaatcatccccatcgagggcagagcctactacgcccagaaattccagggcagagtgaccatcaccgccgacgagtctacaagcaccgcctacatggaactgagcagcctgagaagcgaggataccgctgtgtactattgcgccagaggccggtacagctacagatattggttcgactactggggccagggcaccctggttacagtctcttctacgcgtatccagaaccctgatcctgccgtgtaccagctgcgggatagcaagagcagcgacaagagcgtgtgtctgttcaccgacttcgacagccagaccaacgtgtcccagagcaaggactccgacgtgtacatcaccgataagaccgtgctggacatgcggagcatggacttcaagagcaactccgccgtggcctggtccaacaagtccgatttcgcctgcgccaacgccttcaacaacagcattatccccgaggacacattcttcccaagccccgagagcagcgactccaccgaccacgtgaagcccaaagagacagagaacaccaagcagcccagcaagagctgccacaagcccaaggccatcgtgcacaccgagaaagtgaacatgatgagcctgaccgtgctgggcctgcggatgctgttcgccaaaaccgtggccgtgaacttcctgctgaccgccaagctgttcttcctccgcgccaagagaagcggatctggcgtgaagcagaccctgaatttcgacctgctgaagctggctggcgacgtggaatccaacccaggcccttctagaggccatatgaccgagtacaagcccacggtgcgcctcgccacccgcgacgacgtccccagggccgtacgcaccctcgccgccgcgttcgccgactaccccgccacgcgccacaccgtcgatccggaccgccacatcgagcgggtcaccgagctgcaagaactcttcctcacgcgcgtcgggctcgacatcggcaaggtgtgggtcgcggacgacggcgccgcggtggcggtctggaccacgccggagagcgtcgaagcgggggcggtgttcgccgagatcggcccgcgcatggccgagttgagcggttcccggctggccgcgcagcaacagatggaaggcctcctggcgccgcaccggcccaaggagcccgcgtggttcctggccaccgtcggcgtctcgcccgaccaccagggcaagggtctgggcagcgccgtcgtgctccccggagtggaggcggccgagcgcgccggggtgcccgccttcctggagacctccgcgccccgcaacctccccttctacgagcggctcggcttcaccgtcaccgccgacgtcgaggtgcccgaaggaccgcgcacctggtgcatgacccgcaagcccggtgcctga

SEQ ID NO: 39782 - DNA, 2916 bp, synthetic construct
  source 1..2916: mol_type = other DNA
atggccttaccagtgaccgccttgctcctgccgctggccttgctgctccacgccgccaggccgctcgagatccagaaccctgatcctgccgtgtaccagctgcgggatagcaagagcagcgacaagagcgtgtgtctgttcaccgacttcgacagccagaccaacgtgtcccagagcaaggactccgacgtgtacatcaccgataagaccgtgctggacatgcggagcatggacttcaagagcaactccgccgtggcctggtccaacaagtccgatttcgcctgcgccaacgccttcaacaacagcattatccccgaggacacattcttcccaagccccgagagcagcgactccaccgaccacgtgaagcccaaagagacagagaacaccaagcagcccagcaagagctgccacaagcccaaggccatcgtgcacaccgagaaagtgaacatgatgagcctgaccgtgctgggcctgcggatgctgttcgccaaaaccgtggccgtgaacttcctgctgaccgccaagctgttcttcctcagggccaagcgatctggatctggagcaacaaacttctcactactcaaacaagcaggtgacgtggaggagaatcccgggcctactagcatggccttaccagtgaccgccttgctcctgccgctggccttgctgctccacgccgccaggccggagatcgtgctgacacagtctcccgccacactgtcactgtctccaggcgaaagagccacactgagctgtagagccagccagagcgtgtcctcttacctggcctggtatcagcagaagcctggacaggctccccggctgctgatctacgatgccagcaatagagccacaggcatccccgccagattttctggctctggcagcggcaccgatttcaccctgaccataagcagcctggaacctgaggacttcgccgtgtactactgccagcagagaagcgactggcccctgacatttggcggcggaacaaaggtggaaatcaaaggcggaggcggaagtggaggcggaggatctggcggcggaggctctcaagttcagctggttcagagcggagccgaagtgaagaaacctggcagcagcgtgaaggtgtcctgcaaagcaagcggcggcacctttagctcctacgccatccactgggttcgacaggcaccaggacaaggactggaatggatgggcagaatcatccccatcgagggcagagcctactacgcccagaaattccagggcagagtgaccatcaccgccgacgagtctacaagcaccgcctacatggaactgagcagcctgagaagcgaggataccgctgtgtactattgcgccagaggccggtacagctacagatattggttcgactactggggccagggcaccctggttacagtctcttctacgcgtgaggacctgaagaacgtgttcccacctgaggtggccgtgttcgagcctagcgaggccgagatcagccacacccagaaagccaccctcgtgtgcctggctaccggcttctaccccgaccatgtggaactgtcttggtgggtcaacggcaaagaggtgcacagcggcgtgtctaccgacccccagccactgaaagaacagcccgccctgaacgacagccggtactgcctgagcagcagactgagagtgtccgccaccttctggcagaacccccggaaccacttcagatgccaggtgcagttctacggcctgagcgagaacgacgagtggacccaggacagagccaagcccgtgacccagatcgtgtctgccgaagcctggggcagagccgatgatgtgattaagatccactggcaggaaaagaagtccaacaccatcctgggcagccaggaaggcaacaccatgaagaccaacgacacctacatgaagttcagctggctgaccgtgcccgagaagtccctggacaaagaacacagatgcatcgtgcggcacgaaaacaacaagaacggcgtggaccaggaaatcatcttcccacccatcaagaccgatgtgattacaatggaccccaaggacaactgctccaaggacgccaacgataccctgctgctccagctgaccaacaccagcgcctactacatgtacttgttgctgctgctgaagtccgtggtgtacttcgccatcatcacatgctgcctgctgcggagaaccgccttctgctgcaacggcgagaagtctcgcgccaagagaagcggatctggcgtgaagcagaccctgaatttcgacctgctgaagctggctggcgacgtggaatccaacccaggcccttctagaggccatatgaccgagtacaagcccacggtgcgcctcgccacccgcgacgacgtccccagggccgtacgcaccctcgccgccgcgttcgccgactaccccgccacgcgccacaccgtcgatccggaccgccacatcgagcgggtcaccgagctgcaagaactcttcctcacgcgcgtcgggctcgacatcggcaaggtgtgggtcgcggacgacggcgccgcggtggcggtctggaccacgccggagagcgtcgaagcgggggcggtgttcgccgagatcggcccgcgcatggccgagttgagcggttcccggctggccgcgcagcaacagatggaaggcctcctggcgccgcaccggcccaaggagcccgcgtggttcctggccaccgtcggcgtctcgcccgaccaccagggcaagggtctgggcagcgccgtcgtgctccccggagtggaggcggccgagcgcgccggggtgcccgccttcctggagacctccgcgccccgcaacctccccttctacgagcggctcggcttcaccgtcaccgccgacgtcgaggtgcccgaaggaccgcgcacctggtgcatgacccgcaagcccggtgcctga

SEQ ID NO: 39783 - DNA, 2610 bp, synthetic construct
  source 1..2610: mol_type = other DNA
atggccttaccagtgaccgccttgctcctgccgctggccttgctgctccacgccgccaggccgctcgaggaggacctgaagaacgtgttcccacctgaggtggccgtgttcgagcctagcaaggccgagatcgcccacacccagaaagccaccctcgtgtgcctggctaccggcttctaccccgaccatgtggaactgtcttggtgggtcaacggcaaagaggtgcacagcggcgtgtgtaccgacccccagccactgaaagaacagcccgccctgaacgacagccggtactgcctgagcagcagactgagagtgtccgccaccttctggcagaacccccggaaccacttcagatgccaggtgcagttctacggcctgagcgagaacgacgagtggacccaggacagagccaagcccgtgacccagatcgtgtctgccgaagcctggggcagagccgattgcggcatcaccagcgccagctaccaccagggcgtgctgagcgccaccatcctgtacgagatcctgctgggcaaggccaccctgtacgccgtgctggtgtctgccctggtgctgatggctatggtcaagcggaaggacagccggggaagggccaagcgatctggatctggagcaacaaacttctcactactcaaacaagcaggtgacgtggaggagaatcccgggcctactagcatggccttaccagtgaccgccttgctcctgccgctggccttgctgctccacgccgccaggccggagatcgtgctgacacagtctcccgccacactgtcactgtctccaggcgaaagagccacactgagctgtagagccagccagagcgtgtcctcttacctggcctggtatcagcagaagcctggacaggctccccggctgctgatctacgatgccagcaatagagccacaggcatccccgccagattttctggctctggcagcggcaccgatttcaccctgaccataagcagcctggaacctgaggacttcgccgtgtactactgccagcagagaagcgactggcccctgacatttggcggcggaacaaaggtggaaatcaaaggcggaggcggaagtggaggcggaggatctggcggcggaggctctcaagttcagctggttcagagcggagccgaagtgaagaaacctggcagcagcgtgaaggtgtcctgcaaagcaagcggcggcacctttagctcctacgccatccactgggttcgacaggcaccaggacaaggactggaatggatgggcagaatcatccccatcgagggcagagcctactacgcccagaaattccagggcagagtgaccatcaccgccgacgagtctacaagcaccgcctacatggaactgagcagcctgagaagcgaggataccgctgtgtactattgcgccagaggccggtacagctacagatattggttcgactactggggccagggcaccctggttacagtctcttctacgcgtatccagaaccctgatcctgccgtgtaccagctgcgggatagcaagagcagcgacaagagcgtgtgtctgttcaccgacttcgacagccagaccaacgtgtcccagagcaaggactccgacgtgtacatcaccgataagtgcgtgctggacatgcggagcatggacttcaagagcaactccgccgtggcctggtccaacaagtccgatttcgcctgcgccaacgccttcaacaacagcattatccccgaggacacattcttcccaagcagcgacgtgccctgcgacgtgaagctggtggaaaagagcttcgagacagacaccaacctgaacttccagaacctgagcgtgatcggcttcagaatcctgctgctgaaagtggccggctttaacctgctgatgaccctgcggctgtggtccagccgcgccaagagaagcggatctggcgtgaagcagaccctgaatttcgacctgctgaagctggctggcgacgtggaatccaacccaggcccttctagaggccatatgaccgagtacaagcccacggtgcgcctcgccacccgcgacgacgtccccagggccgtacgcaccctcgccgccgcgttcgccgactaccccgccacgcgccacaccgtcgatccggaccgccacatcgagcgggtcaccgagctgcaagaactcttcctcacgcgcgtcgggctcgacatcggcaaggtgtgggtcgcggacgacggcgccgcggtggcggtctggaccacgccggagagcgtcgaagcgggggcggtgttcgccgagatcggcccgcgcatggccgagttgagcggttcccggctggccgcgcagcaacagatggaaggcctcctggcgccgcaccggcccaaggagcccgcgtggttcctggccaccgtcggcgtctcgcccgaccaccagggcaagggtctgggcagcgccgtcgtgctccccggagtggaggcggccgagcgcgccggggtgcccgccttcctggagacctccgcgccccgcaacctccccttctacgagcggctcggcttcaccgtcaccgccgacgtcgaggtgcccgaaggaccgcgcacctggtgcatgacccgcaagcccggtgcctga

SEQ ID NO: 39784 - DNA, 2610 bp, synthetic construct
  source 1..2610: mol_type = other DNA
atggccttaccagtgaccgccttgctcctgccgctggccttgctgctccacgccgccaggccgctcgagatccagaaccctgatcctgccgtgtaccagctgcgggatagcaagagcagcgacaagagcgtgtgtctgttcaccgacttcgacagccagaccaacgtgtcccagagcaaggactccgacgtgtacatcaccgataagtgcgtgctggacatgcggagcatggacttcaagagcaactccgccgtggcctggtccaacaagtccgatttcgcctgcgccaacgccttcaacaacagcattatccccgaggacacattcttcccaagcagcgacgtgccctgcgacgtgaagctggtggaaaagagcttcgagacagacaccaacctgaacttccagaacctgagcgtgatcggcttcagaatcctgctgctgaaagtggccggctttaacctgctgatgaccctgcggctgtggtccagcagggccaagcgatctggatctggagcaacaaacttctcactactcaaacaagcaggtgacgtggaggagaatcccgggcctactagcatggccttaccagtgaccgccttgctcctgccgctggccttgctgctccacgccgccaggccggagatcgtgctgacacagtctcccgccacactgtcactgtctccaggcgaaagagccacactgagctgtagagccagccagagcgtgtcctcttacctggcctggtatcagcagaagcctggacaggctccccggctgctgatctacgatgccagcaatagagccacaggcatccccgccagattttctggctctggcagcggcaccgatttcaccctgaccataagcagcctggaacctgaggacttcgccgtgtactactgccagcagagaagcgactggcccctgacatttggcggcggaacaaaggtggaaatcaaaggcggaggcggaagtggaggcggaggatctggcggcggaggctctcaagttcagctggttcagagcggagccgaagtgaagaaacctggcagcagcgtgaaggtgtcctgcaaagcaagcggcggcacctttagctcctacgccatccactgggttcgacaggcaccaggacaaggactggaatggatgggcagaatcatccccatcgagggcagagcctactacgcccagaaattccagggcagagtgaccatcaccgccgacgagtctacaagcaccgcctacatggaactgagcagcctgagaagcgaggataccgctgtgtactattgcgccagaggccggtacagctacagatattggttcgactactggggccagggcaccctggttacagtctcttctacgcgtgaggacctgaagaacgtgttcccacctgaggtggccgtgttcgagcctagcaaggccgagatcgcccacacccagaaagccaccctcgtgtgcctggctaccggcttctaccccgaccatgtggaactgtcttggtgggtcaacggcaaagaggtgcacagcggcgtgtgtaccgacccccagccactgaaagaacagcccgccctgaacgacagccggtactgcctgagcagcagactgagagtgtccgccaccttctggcagaacccccggaaccacttcagatgccaggtgcagttctacggcctgagcgagaacgacgagtggacccaggacagagccaagcccgtgacccagatcgtgtctgccgaagcctggggcagagccgattgcggcatcaccagcgccagctaccaccagggcgtgctgagcgccaccatcctgtacgagatcctgctgggcaaggccaccctgtacgccgtgctggtgtctgccctggtgctgatggctatggtcaagcggaaggacagccggggacgcgccaagagaagcggatctggcgtgaagcagaccctgaatttcgacctgctgaagctggctggcgacgtggaatccaacccaggcccttctagaggccatatgaccgagtacaagcccacggtgcgcctcgccacccgcgacgacgtccccagggccgtacgcaccctcgccgccgcgttcgccgactaccccgccacgcgccacaccgtcgatccggaccgccacatcgagcgggtcaccgagctgcaagaactcttcctcacgcgcgtcgggctcgacatcggcaaggtgtgggtcgcggacgacggcgccgcggtggcggtctggaccacgccggagagcgtcgaagcgggggcggtgttcgccgagatcggcccgcgcatggccgagttgagcggttcccggctggccgcgcagcaacagatggaaggcctcctggcgccgcaccggcccaaggagcccgcgtggttcctggccaccgtcggcgtctcgcccgaccaccagggcaagggtctgggcagcgccgtcgtgctccccggagtggaggcggccgagcgcgccggggtgcccgccttcctggagacctccgcgccccgcaacctccccttctacgagcggctcggcttcaccgtcaccgccgacgtcgaggtgcccgaaggaccgcgcacctggtgcatgacccgcaagcccggtgcctga

SEQ ID NO: 39785 - DNA, 2289 bp, synthetic construct
  source 1..2289: mol_type = other DNA
atggccttaccagtgaccgccttgctcctgccgctggccttgctgctccacgccgccaggccgctcgagcagagttttgggttgttggaccctaaattgtgctatctgttggacggaatcctgttcatttacggagtgatcctgaccgcattgttcctgcgggttaagttttccagatccgcagacgcacccgcttaccaacaagggcagaaccaactctacaatgaacttaatttggggcggagggaagagtacgacgttctggacaaaaggaggggacgagatcccgagatgggcggaaagcctcagcgaaggaagaatccgcaagaggggctttataacgaactccagaaagataaaatggcagaagcctatagtgagattgggatgaagggagaaaggaggaggggtaaaggtcacgatgggttgtaccaaggattgagcacagccactaaagatacctatgatgcgctccacatgcaggccctgccgccaagaagggccaagcgatctggatctggagcaacaaacttctcactactcaaacaagcaggtgacgtggaggagaatcccgggcctactagcatggccttaccagtgaccgccttgctcctgccgctggccttgctgctccacgccgccaggccggagatcgtgctgacacagtctcccgccacactgtcactgtctccaggcgaaagagccacactgagctgtagagccagccagagcgtgtcctcttacctggcctggtatcagcagaagcctggacaggctccccggctgctgatctacgatgccagcaatagagccacaggcatccccgccagattttctggctctggcagcggcaccgatttcaccctgaccataagcagcctggaacctgaggacttcgccgtgtactactgccagcagagaagcgactggcccctgacatttggcggcggaacaaaggtggaaatcaaaggcggaggcggaagtggaggcggaggatctggcggcggaggctctcaagttcagctggttcagagcggagccgaagtgaagaaacctggcagcagcgtgaaggtgtcctgcaaagcaagcggcggcacctttagctcctacgccatccactgggttcgacaggcaccaggacaaggactggaatggatgggcagaatcatccccatcgagggcagagcctactacgcccagaaattccagggcagagtgaccatcaccgccgacgagtctacaagcaccgcctacatggaactgagcagcctgagaagcgaggataccgctgtgtactattgcgccagaggccggtacagctacagatattggttcgactactggggccagggcaccctggttacagtctcttctacgcgtgagctgggagagcctcagctgtgctatatcctggacgccatcctgtttctgtacggcatcgtgctgaccctgctgtactgccggctgaagatccaagtgcggaaggccgccatcaccagctacgagaaatccgacggcgtgtacaccggcctgagcaccagaaatcaagagacatacgagacactgaagcacgaaaagcctccacaacgcgccaagagaagcggatctggcgtgaagcagaccctgaatttcgacctgctgaagctggctggcgacgtggaatccaacccaggcccttctagaggccatatgaccgagtacaagcccacggtgcgcctcgccacccgcgacgacgtccccagggccgtacgcaccctcgccgccgcgttcgccgactaccccgccacgcgccacaccgtcgatccggaccgccacatcgagcgggtcaccgagctgcaagaactcttcctcacgcgcgtcgggctcgacatcggcaaggtgtgggtcgcggacgacggcgccgcggtggcggtctggaccacgccggagagcgtcgaagcgggggcggtgttcgccgagatcggcccgcgcatggccgagttgagcggttcccggctggccgcgcagcaacagatggaaggcctcctggcgccgcaccggcccaaggagcccgcgtggttcctggccaccgtcggcgtctcgcccgaccaccagggcaagggtctgggcagcgccgtcgtgctccccggagtggaggcggccgagcgcgccggggtgcccgccttcctggagacctccgcgccccgcaacctccccttctacgagcggctcggcttcaccgtcaccgccgacgtcgaggtgcccgaaggaccgcgcacctggtgcatgacccgcaagcccggtgcctga

SEQ ID NO: 39786 - DNA, 2922 bp, synthetic construct; identical to SEQ ID NO: 39777
  source 1..2922: mol_type = other DNA

SEQ ID NO: 39787 - DNA, 2922 bp, synthetic construct; identical to SEQ ID NO: 39778
  source 1..2922: mol_type = other DNA

SEQ ID NO: 39788 - DNA, 2919 bp, synthetic construct
  source 1..2919: mol_type = other DNA
atggccttaccagtgaccgccttgctcctgccgctggccttgctgctccacgccgccaggccgctcgaggaggaggacctgaagaacgtgttcccacctgaggtggccgtgttcgagcctagcgaggccgagatcagccacacccagaaagccaccctcgtgtgcctggctaccggcttctaccccgaccatgtggaactgtcttggtgggtcaacggcaaagaggtgcacagcggcgtgtgtaccgacccccagccactgaaagaacagcccgccctgaacgacagccggtactgcctgagcagcagactgagagtgtccgccaccttctggcagaacccccggaaccacttcagatgccaggtgcagttctacggcctgagcgagaacgacgagtggacccaggacagagccaagcccgtgacccagatcgtgtctgccgaagcctggggcagagccgatgatgtgattaagatccactggcaggaaaagaagtccaacaccatcctgggcagccaggaaggcaacaccatgaagaccaacgacacctacatgaagttcagctggctgaccgtgcccgagaagtccctggacaaagaacacagatgcatcgtgcggcacgaaaacaacaagaacggcgtggaccaggaaatcatcttcccacccatcaagaccgatgtgattacaatggaccccaaggacaactgctccaaggacgccaacgataccctgctgctccagctgaccaacaccagcgcctactacatgtacttgttgctgctgctgaagtccgtggtgtacttcgccatcatcacatgctgcctgctgcggagaaccgccttctgctgcaacggcgagaagtctagggccaagcgatctggatctggagcaacaaacttctcactactcaaacaagcaggtgacgtggaggagaatcccgggcctactagcatggccttaccagtgaccgccttgctcctgccgctggccttgctgctccacgccgccaggccggagatcgtgctgacacagtctcccgccacactgtcactgtctccaggcgaaagagccacactgagctgtagagccagccagagcgtgtcctcttacctggcctggtatcagcagaagcctggacaggctccccggctgctgatctacgatgccagcaatagagccacaggcatccccgccagattttctggctctggcagcggcaccgatttcaccctgaccataagcagcctggaacctgaggacttcgccgtgtactactgccagcagagaagcgactggcccctgacatttggcggcggaacaaaggtggaaatcaaaggcggaggcggaagtggaggcggaggatctggcggcggaggctctcaagttcagctggttcagagcggagccgaagtgaagaaacctggcagcagcgtgaaggtgtcctgcaaagcaagcggcggcacctttagctcctacgccatccactgggttcgacaggcaccaggacaaggactggaatggatgggcagaatcatccccatcgagggcagagcctactacgcccagaaattccagggcagagtgaccatcaccgccgacgagtctacaagcaccgcctacatggaactgagcagcctgagaagcgaggataccgctgtgtactattgcgccagaggccggtacagctacagatattggttcgactactggggccagggcaccctggttacagtctcttctacgcgtatccagaaccctgatcctgccgtgtaccagctgcgggatagcaagagcagcgacaagagcgtgtgtctgttcaccgacttcgacagccagaccaacgtgtcccagagcaaggactccgacgtgtacatcaccgataagtgcgtgctggacatgcggagcatggacttcaagagcaactccgccgtggcctggtccaacaagtccgatttcgcctgcgccaacgccttcaacaacagcattatccccgaggacacattcttcccaagccccgagagcagcgactccaccgaccacgtgaagcccaaagagacagagaacaccaagcagcccagcaagagctgccacaagcccaaggccatcgtgcacaccgagaaagtgaacatgatgagcctgaccgtgctgggcctgcggatgctgttcgccaaaaccgtggccgtgaacttcctgctgaccgccaagctgttcttcctccgcgccaagagaagcggatctggcgtgaagcagaccctgaatttcgacctgctgaagctggctggcgacgtggaatccaacccaggcccttctagaggccatatgaccgagtacaagcccacggtgcgcctcgccacccgcgacgacgtccccagggccgtacgcaccctcgccgccgcgttcgccgactaccccgccacgcgccacaccgtcgatccggaccgccacatcgagcgggtcaccgagctgcaagaactcttcctcacgcgcgtcgggctcgacatcggcaaggtgtgggtcgcggacgacggcgccgcggtggcggtctggaccacgccggagagcgtcgaagcgggggcggtgttcgccgagatcggcccgcgcatggccgagttgagcggttcccggctggccgcgcagcaacagatggaaggcctcctggcgccgcaccggcccaaggagcccgcgtggttcctggccaccgtcggcgtctcgcccgaccaccagggcaagggtctgggcagcgccgtcgtgctccccggagtggaggcggccgagcgcgccggggtgcccgccttcctggagacctccgcgccccgcaacctccccttctacgagcggctcggcttcaccgtcaccgccgacgtcgaggtgcccgaaggaccgcgcacctggtgcatgacccgcaagcccggtgcctga

SEQ ID NO: 39789 - DNA, 2919 bp, synthetic construct
  source 1..2919: mol_type = other DNA
atggccttaccagtgaccgccttgctcctgccgctggccttgctgctccacgccgccaggccgctcgagatccagaaccctgatcctgccgtgtaccagctgcgggatagcaagagcagcgacaagagcgtgtgtctgttcaccgacttcgacagccagaccaacgtgtcccagagcaaggactccgacgtgtacatcaccgataagtgcgtgctggacatgcggagcatggacttcaagagcaactccgccgtggcctggtccaacaagtccgatttcgcctgcgccaacgccttcaacaacagcattatccccgaggacacattcttcccaagccccgagagcagcgactccaccgaccacgtgaagcccaaagagacagagaacaccaagcagcccagcaagagctgccacaagcccaaggccatcgtgcacaccgagaaagtgaacatgatgagcctgaccgtgctgggcctgcggatgctgttcgccaaaaccgtggccgtgaacttcctgctgaccgccaagctgttcttcctcagggccaagcgatctggatctggagcaacaaacttctcactactcaaacaagcaggtgacgtggaggagaatcccgggcctactagcatggccttaccagtgaccgccttgctcctgccgctggccttgctgctccacgccgccaggccggagatcgtgctgacacagtctcccgccacactgtcactgtctccaggcgaaagagccacactgagctgtagagccagccagagcgtgtcctcttacctggcctggtatcagcagaagcctggacaggctccccggctgctgatctacgatgccagcaatagagccacaggcatccccgccagattttctggctctggcagcggcaccgatttcaccctgaccataagcagcctggaacctgaggacttcgccgtgtactactgccagcagagaagcgactggcccctgacatttggcggcggaacaaaggtggaaatcaaaggcggaggcggaagtggaggcggaggatctggcggcggaggctctcaagttcagctggttcagagcggagccgaagtgaagaaacctggcagcagcgtgaaggtgtcctgcaaagcaagcggcggcacctttagctcctacgccatccactgggttcgacaggcaccaggacaaggactggaatggatgggcagaatcatccccatcgagggcagagcctactacgcccagaaattccagggcagagtgaccatcaccgccgacgagtctacaagcaccgcctacatggaactgagcagcctgagaagcgaggataccgctgtgtactattgcgccagaggccggtacagctacagatattggttcgactactggggccagggcaccctggttacagtctcttctacgcgtgaggaggacctgaagaacgtgttcccacctgaggtggccgtgttcgagcctagcgaggccgagatcagccacacccagaaagccaccctcgtgtgcctggctaccggcttctaccccgaccatgtggaactgtcttggtgggtcaacggcaaagaggtgcacagcggcgtgtgtaccgacccccagccactgaaagaacagcccgccctgaacgacagccggtactgcctgagcagcagactgagagtgtccgccaccttctggcagaacccccggaaccacttcagatgccaggtgcagttctacggcctgagcgagaacgacgagtggacccaggacagagccaagcccgtgacccagatcgtgtctgccgaagcctggggcagagccgatgatgtgattaagatccactggcaggaaaagaagtccaacaccatcctgggcagccaggaaggcaacaccatgaagaccaacgacacctacatgaagttcagctggctgaccgtgcccgagaagtccctggacaaagaacacagatgcatcgtgcggcacgaaaacaacaagaacggcgtggaccaggaaatcatcttcccacccatcaagaccgatgtgattacaatggaccccaaggacaactgctccaaggacgccaacgataccctgctgctccagctgaccaacaccagcgcctactacatgtacttgttgctgctgctgaagtccgtggtgtacttcgccatcatcacatgctgcctgctgcggagaaccgccttctgctgcaacggcgagaagtctcgcgccaagagaagcggatctggcgtgaagcagaccctgaatttcgacctgctgaagctggctggcgacgtggaatccaacccaggcccttctagaggccatatgaccgagtacaagcccacggtgcgcctcgccacccgcgacgacgtccccagggccgtacgcaccctcgccgccgcgttcgccgactaccccgccacgcgccacaccgtcgatccggaccgccacatcgagcgggtcaccgagctgcaagaactcttcctcacgcgcgtcgggctcgacatcggcaaggtgtgggtcgcggacgacggcgccgcggtggcggtctggaccacgccggagagcgtcgaagcgggggcggtgttcgccgagatcggcccgcgcatggccgagttgagcggttcccggctggccgcgcagcaacagatggaaggcctcctggcgccgcaccggcccaaggagcccgcgtggttcctggccaccgtcggcgtctcgcccgaccaccagggcaagggtctgggcagcgccgtcgtgctccccggagtggaggcggccgagcgcgccggggtgcccgccttcctggagacctccgcgccccgcaacctccccttctacgagcggctcggcttcaccgtcaccgccgacgtcgaggtgcccgaaggaccgcgcacctggtgcatgacccgcaagcccggtgcctga

SEQ ID NO: 39790 - DNA, 2610 bp, synthetic construct
  source 1..2610: mol_type = other DNA
atggccttaccagtgaccgccttgctcctgccgctggccttgctgctccacgccgccaggccgctcgaggaggacctgaagaacgtgttcccacctgaggtggccgtgttcgagcctagcgaggccgagatcagccacacccagaaagccaccctcgtgtgcctggctaccggcttctaccccgaccatgtggaactgtcttggtgggtcaacggcaaagaggtgcacagcggcgtgtctaccgacccccagccactgaaagaacagcccgccctgaacgacagccggtactgcctgagcagcagactgagagtgtccgccaccttctggcagaacccccggaaccacttcagatgccaggtgcagttctacggcctgagcgagaacgacgagtggacccaggacagagccaagcccgtgacccagatcgtgtctgccgaagcctggggcagagccgattgcggctttaccagcgagagctaccagcagggcgtgctgagcgccaccaacctgagcgtgatcggcttcagaatcctgctgctgaaagtggccggctttaacctgctgatgaccctgcggctgtggtccagcagggccaagcgatctggatctggagcaacaaacttctcactactcaaacaagcaggtgacgtggaggagaatcccgggcctactagcatggccttaccagtgaccgccttgctcctgccgctggccttgctgctccacgccgccaggccggagatcgtgctgacacagtctcccgccacactgtcactgtctccaggcgaaagagccacactgagctgtagagccagccagagcgtgtcctcttacctggcctggtatcagcagaagcctggacaggctccccggctgctgatctacgatgccagcaatagagccacaggcatccccgccagattttctggctctggcagcggcaccgatttcaccctgaccataagcagcctggaacctgaggacttcgccgtgtactactgccagcagagaagcgactggcccctgacatttggcggcggaacaaaggtggaaatcaaaggcggaggcggaagtggaggcggaggatctggcggcggaggctctcaagttcagctggttcagagcggagccgaagtgaagaaacctggcagcagcgtgaaggtgtcctgcaaagcaagcggcggcacctttagctcctacgccatccactgggttcgacaggcaccaggacaaggactggaatggatgggcagaatcatccccatcgagggcagagcctactacgcccagaaattccagggcagagtgaccatcaccgccgacgagtctacaagcaccgcctacatggaactgagcagcctgagaagcgaggataccgctgtgtactattgcgccagaggccggtacagctacagatattggttcgactactggggccagggcaccctggttacagtctcttctacgcgtatccagaaccctgatcctgccgtgtaccagctgcgggatagcaagagcagcgacaagagcgtgtgtctgttcaccgacttcgacagccagaccaacgtgtcccagagcaaggactccgacgtgtacatcaccgataagaccgtgctggacatgcggagcatggacttcaagagcaactccgccgtggcctggtccaacaagtccgatttcgcctgcgccaacgccttcaacaacagcattatccccgaggacacattcttcccaagccccgagagcagctgcgacgtgaagctggtggaaaagagcttcgagacagacaccaacctgaacttccagatcctgtacgagatcctgctgggcaaggccaccctgtacgccgtgctggtgtctgccctggtgctgatggctatggtcaagcggaaggacagccggggacgcgccaagagaagcggatctggcgtgaagcagaccctgaatttcgacctgctgaagctggctggcgacgtggaatccaacccaggcccttctagaggccatatgaccgagtacaagcccacggtgcgcctcgccacccgcgacgacgtccccagggccgtacgcaccctcgccgccgcgttcgccgactaccccgccacgcgccacaccgtcgatccggaccgccacatcgagcgggtcaccgagctgcaagaactcttcctcacgcgcgtcgggctcgacatcggcaaggtgtgggtcgcggacgacggcgccgcggtggcggtctggaccacgccggagagcgtcgaagcgggggcggtgttcgccgagatcggcccgcgcatggccgagttgagcggttcccggctggccgcgcagcaacagatggaaggcctcctggcgccgcaccggcccaaggagcccgcgtggttcctggccaccgtcggcgtctcgcccgaccaccagggcaagggtctgggcagcgccgtcgtgctccccggagtggaggcggccgagcgcgccggggtgcccgccttcctggagacctccgcgccccgcaacctccccttctacgagcggctcggcttcaccgtcaccgccgacgtcgaggtgcccgaaggaccgcgcacctggtgcatgacccgcaagcccggtgcctga

SEQ ID NO: 39791 - DNA, 2610 bp, synthetic construct
  source 1..2610: mol_type = other DNA
atggccttaccagtgaccgccttgctcctgccgctggccttgctgctccacgccgccaggccgctcgagatccagaaccctgatcctgccgtgtaccagctgcgggatagcaagagcagcgacaagagcgtgtgtctgttcaccgacttcgacagccagaccaacgtgtcccagagcaaggactccgacgtgtacatcaccgataagaccgtgctggacatgcggagcatggacttcaagagcaactccgccgtggcctggtccaacaagtccgatttcgcctgcgccaacgccttcaacaacagcattatccccgaggacacattcttcccaagccccgagagcagctgcgacgtgaagctggtggaaaagagcttcgagacagacaccaacctgaacttccagatcctgtacgagatcctgctgggcaaggccaccctgtacgccgtgctggtgtctgccctggtgctgatggctatggtcaagcggaaggacagccggggaagggccaagcgatctggatctggagcaacaaacttctcactactcaaacaagcaggtgacgtggaggagaatcccgggcctactagcatggccttaccagtgaccgccttgctcctgccgctggccttgctgctccacgccgccaggccggagatcgtgctgacacagtctcccgccacactgtcactgtctccaggcgaaagagccacactgagctgtagagccagccagagcgtgtcctcttacctggcctggtatcagcagaagcctggacaggctccccggctgctgatctacgatgccagcaatagagccacaggcatccccgccagattttctggctctggcagcggcaccgatttcaccctgaccataagcagcctggaacctgaggacttcgccgtgtactactgccagcagagaagcgactggcccctgacatttggcggcggaacaaaggtggaaatcaaaggcggaggcggaagtggaggcggaggatctggcggcggaggctctcaagttcagctggttcagagcggagccgaagtgaagaaacctggcagcagcgtgaaggtgtcctgcaaagcaagcggcggcacctttagctcctacgccatccactgggttcgacaggcaccaggacaaggactggaatggatgggcagaatcatccccatcgagggcagagcctactacgcccagaaattccagggcagagtgaccatcaccgccgacgagtctacaagcaccgcctacatggaactgagcagcctgagaagcgaggataccgctgtgtactattgcgccagaggccggtacagctacagatattggttcgactactggggccagggcaccctggttacagtctcttctacgcgtgaggacctgaagaacgtgttcccacctgaggtggccgtgttcgagcctagcgaggccgagatcagccacacccagaaagccaccctcgtgtgcctggctaccggcttctaccccgaccatgtggaactgtcttggtgggtcaacggcaaagaggtgcacagcggcgtgtctaccgacccccagccactgaaagaacagcccgccctgaacgacagccggtactgcctgagcagcagactgagagtgtccgccaccttctggcagaacccccggaaccacttcagatgccaggtgcagttctacggcctgagcgagaacgacgagtggacccaggacagagccaagcccgtgacccagatcgtgtctgccgaagcctggggcagagccgattgcggctttaccagcgagagctaccagcagggcgtgctgagcgccaccaacctgagcgtgatcggcttcagaatcctgctgctgaaagtggccggctttaacctgctgatgaccctgcggctgtggtccagccgcgccaagagaagcggatctggcgtgaagcagaccctgaatttcgacctgctgaagctggctggcgacgtggaatccaacccaggcccttctagaggccatatgaccgagtacaagcccacggtgcgcctcgccacccgcgacgacgtccccagggccgtacgcaccctcgccgccgcgttcgccgactaccccgccacgcgccacaccgtcgatccggaccgccacatcgagcgggtcaccgagctgcaagaactcttcctcacgcgcgtcgggctcgacatcggcaaggtgtgggtcgcggacgacggcgccgcggtggcggtctggaccacgccggagagcgtcgaagcgggggcggtgttcgccgagatcggcccgcgcatggccgagttgagcggttcccggctggccgcgcagcaacagatggaaggcctcctggcgccgcaccggcccaaggagcccgcgtggttcctggccaccgtcggcgtctcgcccgaccaccagggcaagggtctgggcagcgccgtcgtgctccccggagtggaggcggccgagcgcgccggggtgcccgccttcctggagacctccgcgccccgcaacctccccttctacgagcggctcggcttcaccgtcaccgccgacgtcgaggtgcccgaaggaccgcgcacctggtgcatgacccgcaagcccggtgcctga

SEQ ID NO: 39792 - DNA, 2610 bp, synthetic construct
  source 1..2610: mol_type = other DNA
atggccttaccagtgaccgccttgctcctgccgctggccttgctgctccacgccgccaggccgctcgaggaggacctgaagaacgtgttcccacctgaggtggccgtgttcgagcctagcgaggccgagatcagccacacccagaaagccaccctcgtgtgcctggctaccggcttctaccccgaccatgtggaactgtcttggtgggtcaacggcaaagaggtgcacagcggcgtgtgtaccgacccccagccactgaaagaacagcccgccctgaacgacagccggtactgcctgagcagcagactgagagtgtccgccaccttctggcagaacccccggaaccacttcagatgccaggtgcagttctacggcctgagcgagaacgacgagtggacccaggacagagccaagcccgtgacccagatcgtgtctgccgaagcctggggcagagccgattgcgacgtgaagctggtggaaaagagcttcgagacagacaccaacctgaacttccagaacctgagcgtgatcggcttcagaatcctgctgctgaaagtggccggctttaacctgctgatgaccctgcggctgtggtccagcagggccaagcgatctggatctggagcaacaaacttctcactactcaaacaagcaggtgacgtggaggagaatcccgggcctactagcatggccttaccagtgaccgccttgctcctgccgctggccttgctgctccacgccgccaggccggagatcgtgctgacacagtctcccgccacactgtcactgtctccaggcgaaagagccacactgagctgtagagccagccagagcgtgtcctcttacctggcctggtatcagcagaagcctggacaggctccccggctgctgatctacgatgccagcaatagagccacaggcatccccgccagattttctggctctggcagcggcaccgatttcaccctgaccataagcagcctggaacctgaggacttcgccgtgtactactgccagcagagaagcgactggcccctgacatttggcggcggaacaaaggtggaaatcaaaggcggaggcggaagtggaggcggaggatctggcggcggaggctctcaagttcagctggttcagagcggagccgaagtgaagaaacctggcagcagcgtgaaggtgtcctgcaaagcaagcggcggcacctttagctcctacgccatccactgggttcgacaggcaccaggacaaggactggaatggatgggcagaatcatccccatcgagggcagagcctactacgcccagaaattccagggcagagtgaccatcaccgccgacgagtctacaagcaccgcctacatggaactgagcagcctgagaagcgaggataccgctgtgtactattgcgccagaggccggtacagctacagatattggttcgactactggggccagggcaccctggttacagtctcttctacgcgtatccagaaccctgatcctgccgtgtaccagctgcgggatagcaagagcagcgacaagagcgtgtgtctgttcaccgacttcgacagccagaccaacgtgtcccagagcaaggactccgacgtgtacatcaccgataagtgcgtgctggacatgcggagcatggacttcaagagcaactccgccgtggcctggtccaacaagtccgatttcgcctgcgccaacgccttcaacaacagcattatccccgaggacacattcttcccaagccccgagagcagctgcggctttaccagcgagagctaccagcagggcgtgctgagcgccaccatcctgtacgagatcctgctgggcaaggccaccctgtacgccgtgctggtgtctgccctggtgctgatggctatggtcaagcggaaggacagccggggacgcgccaagagaagcggatctggcgtgaagcagaccctgaatttcgacctgctgaagctggctggcgacgtggaatccaacccaggcccttctagaggccatatgaccgagtacaagcccacggtgcgcctcgccacccgcgacgacgtccccagggccgtacgcaccctcgccgccgcgttcgccgactaccccgccacgcgccacaccgtcgatccggaccgccacatcgagcgggtcaccgagctgcaagaactcttcctcacgcgcgtcgggctcgacatcggcaaggtgtgggtcgcggacgacggcgccgcggtggcggtctggaccacgccggagagcgtcgaagcgggggcggtgttcgccgagatcggcccgcgcatggccgagttgagcggttcccggctggccgcgcagcaacagatggaaggcctcctggcgccgcaccggcccaaggagcccgcgtggttcctggccaccgtcggcgtctcgcccgaccaccagggcaagggtctgggcagcgccgtcgtgctccccggagtggaggcggccgagcgcgccggggtgcccgccttcctggagacctccgcgccccgcaacctccccttctacgagcggctcggcttcaccgtcaccgccgacgtcgaggtgcccgaaggaccgcgcacctggtgcatgacccgcaagcccggtgcctga

SEQ ID NO: 39793 - DNA, 2610 bp, synthetic construct
  source 1..2610: mol_type = other DNA
atggccttaccagtgaccgccttgctcctgccgctggccttgctgctccacgccgccaggccgctcgaggaggacctgaagaacgtgttcccacctgaggtggccgtgttcgagcctagcgaggccgagatcagccacacccagaaagccaccctcgtgtgcctggctaccggcttctaccccgaccatgtggaactgtcttggtgggtcaacggcaaagaggtgcacagcggcgtgtctaccgacccccagccactgaaagaacagcccgccctgaacgacagccggtactgcctgagcagcagactgagagtgtccgccaccttctggcagaacccccggaaccacttcagatgccaggtgcagttctacggcctgagcgagaacgacgagtggacccaggacagagccaagcccgtgacccagatcgtgtctgccgaagcctggggcagagccgattgcgacgtgaagctggtggaaaagagcttcgagacagacaccaacctgaacttccagaacctgagcgtgatcggcttcagaatcctgctgctgaaagtggccggctttaacctgctgatgaccctgcggctgtggtccagcagggccaagcgatctggatctggagcaacaaacttctcactactcaaacaagcaggtgacgtggaggagaatcccgggcctactagcatggccttaccagtgaccgccttgctcctgccgctggccttgctgctccacgccgccaggccggagatcgtgctgacacagtctcccgccacactgtcactgtctccaggcgaaagagccacactgagctgtagagccagccagagcgtgtcctcttacctggcctggtatcagcagaagcctggacaggctccccggctgctgatctacgatgccagcaatagagccacaggcatccccgccagattttctggctctggcagcggcaccgatttcaccctgaccataagcagcctggaacctgaggacttcgccgtgtactactgccagcagagaagcgactggcccctgacatttggcggcggaacaaaggtggaaatcaaaggcggaggcggaagtggaggcggaggatctggcggcggaggctctcaagttcagctggttcagagcggagccgaagtgaagaaacctggcagcagcgtgaaggtgtcctgcaaagcaagcggcggcacctttagctcctacgccatccactgggttcgacaggcaccaggacaaggactggaatggatgggcagaatcatccccatcgagggcagagcctactacgcccagaaattccagggcagagtgaccatcaccgccgacgagtctacaagcaccgcctacatggaactgagcagcctgagaagcgaggataccgctgtgtactattgcgccagaggccggtacagctacagatattggttcgactactggggccagggcaccctggttacagtctcttctacgcgtatccagaaccctgatcctgccgtgtaccagctgcgggatagcaagagcagcgacaagagcgtgtgtctgttcaccgacttcgacagccagaccaacgtgtcccagagcaaggactccgacgtgtacatcaccgataagaccgtgctggacatgcggagcatggacttcaagagcaactccgccgtggcctggtccaacaagtccgatttcgcctgcgccaacgccttcaacaacagcattatccccgaggacacattcttcccaagccccgagagcagctgcggctttaccagcgagagctaccagcagggcgtgctgagcgccaccatcctgtacgagatcctgctgggcaaggccaccctgtacgccgtgctggtgtctgccctggtgctgatggctatggtcaagcggaaggacagccggggacgcgccaagagaagcggatctggcgtgaagcagaccctgaatttcgacctgctgaagctggctggcgacgtggaatccaacccaggcccttctagaggccatatgaccgagtacaagcccacggtgcgcctcgccacccgcgacgacgtccccagggccgtacgcaccctcgccgccgcgttcgccgactaccccgccacgcgccacaccgtcgatccggaccgccacatcgagcgggtcaccgagctgcaagaactcttcctcacgcgcgtcgggctcgacatcggcaaggtgtgggtcgcggacgacggcgccgcggtggcggtctggaccacgccggagagcgtcgaagcgggggcggtgttcgccgagatcggcccgcgcatggccgagttgagcggttcccggctggccgcgcagcaacagatggaaggcctcctggcgccgcaccggcccaaggagcccgcgtggttcctggccaccgtcggcgtctcgcccgaccaccagggcaagggtctgggcagcgccgtcgtgctccccggagtggaggcggccgagcgcgccggggtgcccgccttcctggagacctccgcgccccgcaacctccccttctacgagcggctcggcttcaccgtcaccgccgacgtcgaggtgcccgaaggaccgcgcacctggtgcatgacccgcaagcccggtgcctga

SEQ ID NO: 39794 - DNA, 2919 bp, synthetic construct
  source 1..2919: mol_type = other DNA
atggccttaccagtgaccgccttgctcctgccgctggccttgctgctccacgccgccaggccgctcgaggaggaggacctgaagaacgtgttcccacctgaggtggccgtgttcgagcctagcgaggccgagatcagccacacccagaaagccaccctcgtgtgcctggctaccggcttctaccccgaccatgtggaactgtcttggtgggtcaacggcaaagaggtgcacagcggcgtgtctaccgacccccagccactgaaagaacagcccgccctgaacgacagccggtactgcctgagcagcagactgagagtgtccgccaccttctggcagaacccccggaaccacttcagatgccaggtgcagttctacggcctgagcgagaacgacgagtggacccaggacagagccaagcccgtgacccagatcgtgtctgccgaagcctggggcagagccgatgatgtgattaagatccactggcaggaaaagaagtccaacaccatcctgggcagccaggaaggcaacaccatgaagaccaacgacacctacatgaagttcagctggctgaccgtgcccgagaagtccctggacaaagaacacagatgcatcgtgcggcacgaaaacaacaagaacggcgtggaccaggaaatcatcttcccacccatcaagaccgatgtgattacaatggaccccaaggacaactgctccaaggacgccaacgataccctgctgctccagctgaccaacaccagcgcctactacatgtacttgttgctgctgctgaagtccgtggtgtacttcgccatcatcacatgctgcctgctgcggagaaccgccttctgctgcaacggcgagaagtctagggccaagcgatctggatctggagcaacaaacttctcactactcaaacaagcaggtgacgtggaggagaatcccgggcctactagcatggccttaccagtgaccgccttgctcctgccgctggccttgctgctccacgccgccaggccggagatcgtgctgacacagtctcccgccacactgtcactgtctccaggcgaaagagccacactgagctgtagagccagccagagcgtgtcctcttacctggcctggtatcagcagaagcctggacaggctccccggctgctgatctacgatgccagcaatagagccacaggcatccccgccagattttctggctctggcagcggcaccgatttcaccctgaccataagcagcctggaacctgaggacttcgccgtgtactactgccagcagagaagcgactggcccctgacatttggcggcggaacaaaggtggaaatcaaaggcggaggcggaagtggaggcggaggatctggcggcggaggctctcaagttcagctggttcagagcggagccgaagtgaagaaacctggcagcagcgtgaaggtgtcctgcaaagcaagcggcggcacctttagctcctacgccatccactgggttcgacaggcaccaggacaaggactggaatggatgggcagaatcatccccatcgagggcagagcctactacgcccagaaattccagggcagagtgaccatcaccgccgacgagtctacaagcaccgcctacatggaactgagcagcctgagaagcgaggataccgctgtgtactattgcgccagaggccggtacagctacagatattggttcgactactggggccagggcaccctggttacagtctcttctacgcgtatccagaaccctgatcctgccgtgtaccagctgcgggatagcaagagcagcgacaagagcgtgtgtctgttcaccgacttcgacagccagaccaacgtgtcccagagcaaggactccgacgtgtacatcaccgataagaccgtgctggacatgcggagcatggacttcaagagcaactccgccgtggcctggtccaacaagtccgatttcgcctgcgccaacgccttcaacaacagcattatccccgaggacacattcttcccaagccccgagagcagcgactccaccgaccacgtgaagcccaaagagacagagaacaccaagcagcccagcaagagctgccacaagcccaaggccatcgtgcacaccgagaaagtgaacatgatgagcctgaccgtgctgggcctgcggatgctgttcgccaaaaccgtggccgtgaacttcctgctgaccgccaagctgttcttcctccgcgccaagagaagcggatctggcgtgaagcagaccctgaatttcgacctgctgaagctggctggcgacgtggaatccaacccaggcccttctagaggccatatgaccgagtacaagcccacggtgcgcctcgccacccgcgacgacgtccccagggccgtacgcaccctcgccgccgcgttcgccgactaccccgccacgcgccacaccgtcgatccggaccgccacatcgagcgggtcaccgagctgcaagaactcttcctcacgcgcgtcgggctcgacatcggcaaggtgtgggtcgcggacgacggcgccgcggtggcggtctggaccacgccggagagcgtcgaagcgggggcggtgttcgccgagatcggcccgcgcatggccgagttgagcggttcccggctggccgcgcagcaacagatggaaggcctcctggcgccgcaccggcccaaggagcccgcgtggttcctggccaccgtcggcgtctcgcccgaccaccagggcaagggtctgggcagcgccgtcgtgctccccggagtggaggcggccgagcgcgccggggtgcccgccttcctggagacctccgcgccccgcaacctccccttctacgagcggctcggcttcaccgtcaccgccgacgtcgaggtgcccgaaggaccgcgcacctggtgcatgacccgcaagcccggtgcctga

SEQ ID NO: 39795 - DNA, 2610 bp, synthetic construct
  source 1..2610: mol_type = other DNA
atggccttaccagtgaccgccttgctcctgccgctggccttgctgctccacgccgccaggccgctcgaggaggacctgaagaacgtgttcccacctgaggtggccgtgttcgagcctagcgaggccgagatcagccacacccagaaagccaccctcgtgtgcctggctaccggcttctaccccgaccatgtggaactgtcttggtgggtcaacggcaaagaggtgcacagcggcgtgtgtaccgacccccagccactgaaagaacagcccgccctgaacgacagccggtactgcctgagcagcagactgagagtgtccgccaccttctggcagaacccccggaaccacttcagatgccaggtgcagttctacggcctgagcgagaacgacgagtggacccaggacagagccaagcccgtgacccagatcgtgtctgccgaagcctggggcagagccgattgcggctttaccagcgagagctaccagcagggcgtgctgagcgccaccaacctgagcgtgatcggcttcagaatcctgctgctgaaagtggccggctttaacctgctgatgaccctgcggctgtggtccagcagggccaagcgatctggatctggagcaacaaacttctcactactcaaacaagcaggtgacgtggaggagaatcccgggcctactagcatggccttaccagtgaccgccttgctcctgccgctggccttgctgctccacgccgccaggccggagatcgtgctgacacagtctcccgccacactgtcactgtctccaggcgaaagagccacactgagctgtagagccagccagagcgtgtcctcttacctggcctggtatcagcagaagcctggacaggctccccggctgctgatctacgatgccagcaatagagccacaggcatccccgccagattttctggctctggcagcggcaccgatttcaccctgaccataagcagcctggaacctgaggacttcgccgtgtactactgccagcagagaagcgactggcccctgacatttggcggcggaacaaaggtggaaatcaaaggcggaggcggaagtggaggcggaggatctggcggcggaggctctcaagttcagctggttcagagcggagccgaagtgaagaaacctggcagcagcgtgaaggtgtcctgcaaagcaagcggcggcacctttagctcctacgccatccactgggttcgacaggcaccaggacaaggactggaatggatgggcagaatcatccccatcgagggcagagcctactacgcccagaaattccagggcagagtgaccatcaccgccgacgagtctacaagcaccgcctacatggaactgagcagcctgagaagcgaggataccgctgtgtactattgcgccagaggccggtacagctacagatattggttcgactactggggccagggcaccctggttacagtctcttctacgcgtatccagaaccctgatcctgccgtgtaccagctgcgggatagcaagagcagcgacaagagcgtgtgtctgttcaccgacttcgacagccagaccaacgtgtcccagagcaaggactccgacgtgtacatcaccgataagtgcgtgctggacatgcggagcatggacttcaagagcaactccgccgtggcctggtccaacaagtccgatttcgcctgcgccaacgccttcaacaacagcattatccccgaggacacattcttcccaagccccgagagcagctgcgacgtgaagctggtggaaaagagcttcgagacagacaccaacctgaacttccagatcctgtacgagatcctgctgggcaaggccaccctgtacgccgtgctggtgtctgccctggtgctgatggctatggtcaagcggaaggacagccggggacgcgccaagagaagcggatctggcgtgaagcagaccctgaatttcgacctgctgaagctggctggcgacgtggaatccaacccaggcccttctagaggccatatgaccgagtacaagcccacggtgcgcctcgccacccgcgacgacgtccccagggccgtacgcaccctcgccgccgcgttcgccgactaccccgccacgcgccacaccgtcgatccggaccgccacatcgagcgggtcaccgagctgcaagaactcttcctcacgcgcgtcgggctcgacatcggcaaggtgtgggtcgcggacgacggcgccgcggtggcggtctggaccacgccggagagcgtcgaagcgggggcggtgttcgccgagatcggcccgcgcatggccgagttgagcggttcccggctggccgcgcagcaacagatggaaggcctcctggcgccgcaccggcccaaggagcccgcgtggttcctggccaccgtcggcgtctcgcccgaccaccagggcaagggtctgggcagcgccgtcgtgctccccggagtggaggcggccgagcgcgccggggtgcccgccttcctggagacctccgcgccccgcaacctccccttctacgagcggctcggcttcaccgtcaccgccgacgtcgaggtgcccgaaggaccgcgcacctggtgcatgacccgcaagcccggtgcctga

SEQ ID NO: 39796 - DNA, 2697 bp, synthetic construct
  source 1..2697: mol_type = other DNA
atggccttaccagtgaccgccttgctcctgccgctggccttgctgctccacgccgccaggccgctcgaggaggaggacctgaagaacgtgttcccacctgaggtggccgtgttcgagcctagcgaggccgagatcagccacacccagaaagccaccctcgtgtgcctggctaccggcttctaccccgaccatgtggaactgtcttggtgggtcaacggcaaagaggtgcacagcggcgtgtgtaccgacccccagccactgaaagaacagcccgccctgaacgacagccggtactgcctgagcagcagactgagagtgtccgccaccttctggcagaacccccggaaccacttcagatgccaggtgcagttctacggcctgagcgagaacgacgagtggacccaggacagagccaagcccgtgacccagatcgtgtctgccgaagcctggggcagagccgattgcggctttaccagcgagagctaccagcagggcgtgctgagcgccaccaacctgagcgtgatcggcttcagaatcctgctgctgaaagtggccggctttaacctgctgatgaccctgcggctgtggtccagcagggccaagcgatctggatctggagcaacaaacttctcactactcaaacaagcaggtgacgtggaggagaatcccgggcctactagcatggccttaccagtgaccgccttgctcctgccgctggccttgctgctccacgccgccaggccggagatcgtgctgacacagtctcccgccacactgtcactgtctccaggcgaaagagccacactgagctgtagagccagccagagcgtgtcctcttacctggcctggtatcagcagaagcctggacaggctccccggctgctgatctacgatgccagcaatagagccacaggcatccccgccagattttctggctctggcagcggcaccgatttcaccctgaccataagcagcctggaacctgaggacttcgccgtgtactactgccagcagagaagcgactggcccctgacatttggcggcggaacaaaggtggaaatcaaaggcggaggcggaagtggaggcggaggatctggcggcggaggctctcaagttcagctggttcagagcggagccgaagtgaagaaacctggcagcagcgtgaaggtgtcctgcaaagcaagcggcggcacctttagctcctacgccatccactgggttcgacaggcaccaggacaaggactggaatggatgggcagaatcatccccatcgagggcagagcctactacgcccagaaattccagggcagagtgaccatcaccgccgacgagtctacaagcaccgcctacatggaactgagcagcctgagaagcgaggataccgctgtgtactattgcgccagaggccggtacagctacagatattggttcgactactggggccagggcaccctggttacagtctcttctacgcgtggacagcctaaggccaatcctaccgtgacactgttccctccaagcagcgaagaactccaggccaacaaggccacacttgtgtgcctgatctccgacttctaccctggggctgtgacagtggcttggaaggccgatggatctcctgtgaaagccggcgtggaaaccaccaagccatccaagcagagcaacaacaaatacgccgccagctcctacctgagcctgacacctgagcagtggaagtcccacagatcctacagctgccaagtgacccacgaaggcagcaccgtggaaaagacagtggcccctacagagtgcagccccatcaagaccgatgtgattacaatggaccccaaggacaactgctccaaggacgccaacgataccctgctgctccagctgaccaacaccagcgcctactacatgtacttgttgctgctgctgaagtccgtggtgtacttcgccatcatcacatgctgcctgctgcggagaaccgccttctgctgcaacggcgagaagtctcgcgccaagagaagcggatctggcgtgaagcagaccctgaatttcgacctgctgaagctggctggcgacgtggaatccaacccaggcccttctagaggccatatgaccgagtacaagcccacggtgcgcctcgccacccgcgacgacgtccccagggccgtacgcaccctcgccgccgcgttcgccgactaccccgccacgcgccacaccgtcgatccggaccgccacatcgagcgggtcaccgagctgcaagaactcttcctcacgcgcgtcgggctcgacatcggcaaggtgtgggtcgcggacgacggcgccgcggtggcggtctggaccacgccggagagcgtcgaagcgggggcggtgttcgccgagatcggcccgcgcatggccgagttgagcggttcccggctggccgcgcagcaacagatggaaggcctcctggcgccgcaccggcccaaggagcccgcgtggttcctggccaccgtcggcgtctcgcccgaccaccagggcaagggtctgggcagcgccgtcgtgctccccggagtggaggcggccgagcgcgccggggtgcccgccttcctggagacctccgcgccccgcaacctccccttctacgagcggctcggcttcaccgtcaccgccgacgtcgaggtgcccgaaggaccgcgcacctggtgcatgacccgcaagcccggtgcctga

SEQ ID NO: 39797 - DNA, 2697 bp, synthetic construct
  source 1..2697: mol_type = other DNA
atggccttaccagtgaccgccttgctcctgccgctggccttgctgctccacgccgccaggccgctcgagggacagcctaaggccaatcctaccgtgacactgttccctccaagcagcgaagaactccaggccaacaaggccacacttgtgtgcctgatctccgacttctaccctggggctgtgacagtggcttggaaggccgatggatctcctgtgaaagccggcgtggaaaccaccaagccatccaagcagagcaacaacaaatacgccgccagctcctacctgagcctgacacctgagcagtggaagtcccacagatcctacagctgccaagtgacccacgaaggcagcaccgtggaaaagacagtggcccctacagagtgcagccccatcaagaccgatgtgattacaatggaccccaaggacaactgctccaaggacgccaacgataccctgctgctccagctgaccaacaccagcgcctactacatgtacttgttgctgctgctgaagtccgtggtgtacttcgccatcatcacatgctgcctgctgcggagaaccgccttctgctgcaacggcgagaagtctagggccaagcgatctggatctggagcaacaaacttctcactactcaaacaagcaggtgacgtggaggagaatcccgggcctactagcatggccttaccagtgaccgccttgctcctgccgctggccttgctgctccacgccgccaggccggagatcgtgctgacacagtctcccgccacactgtcactgtctccaggcgaaagagccacactgagctgtagagccagccagagcgtgtcctcttacctggcctggtatcagcagaagcctggacaggctccccggctgctgatctacgatgccagcaatagagccacaggcatccccgccagattttctggctctggcagcggcaccgatttcaccctgaccataagcagcctggaacctgaggacttcgccgtgtactactgccagcagagaagcgactggcccctgacatttggcggcggaacaaaggtggaaatcaaaggcggaggcggaagtggaggcggaggatctggcggcggaggctctcaagttcagctggttcagagcggagccgaagtgaagaaacctggcagcagcgtgaaggtgtcctgcaaagcaagcggcggcacctttagctcctacgccatccactgggttcgacaggcaccaggacaaggactggaatggatgggcagaatcatccccatcgagggcagagcctactacgcccagaaattccagggcagagtgaccatcaccgccgacgagtctacaagcaccgcctacatggaactgagcagcctgagaagcgaggataccgctgtgtactattgcgccagaggccggtacagctacagatattggttcgactactggggccagggcaccctggttacagtctcttctacgcgtgaggaggacctgaagaacgtgttcccacctgaggtggccgtgttcgagcctagcgaggccgagatcagccacacccagaaagccaccctcgtgtgcctggctaccggcttctaccccgaccatgtggaactgtcttggtgggtcaacggcaaagaggtgcacagcggcgtgtgtaccgacccccagccactgaaagaacagcccgccctgaacgacagccggtactgcctgagcagcagactgagagtgtccgccaccttctggcagaacccccggaaccacttcagatgccaggtgcagttctacggcctgagcgagaacgacgagtggacccaggacagagccaagcccgtgacccagatcgtgtctgccgaagcctggggcagagccgattgcggctttaccagcgagagctaccagcagggcgtgctgagcgccaccaacctgagcgtgatcggcttcagaatcctgctgctgaaagtggccggctttaacctgctgatgaccctgcggctgtggtccagccgcgccaagagaagcggatctggcgtgaagcagaccctgaatttcgacctgctgaagctggctggcgacgtggaatccaacccaggcccttctagaggccatatgaccgagtacaagcccacggtgcgcctcgccacccgcgacgacgtccccagggccgtacgcaccctcgccgccgcgttcgccgactaccccgccacgcgccacaccgtcgatccggaccgccacatcgagcgggtcaccgagctgcaagaactcttcctcacgcgcgtcgggctcgacatcggcaaggtgtgggtcgcggacgacggcgccgcggtggcggtctggaccacgccggagagcgtcgaagcgggggcggtgttcgccgagatcggcccgcgcatggccgagttgagcggttcccggctggccgcgcagcaacagatggaaggcctcctggcgccgcaccggcccaaggagcccgcgtggttcctggccaccgtcggcgtctcgcccgaccaccagggcaagggtctgggcagcgccgtcgtgctccccggagtggaggcggccgagcgcgccggggtgcccgccttcctggagacctccgcgccccgcaacctccccttctacgagcggctcggcttcaccgtcaccgccgacgtcgaggtgcccgaaggaccgcgcacctggtgcatgacccgcaagcccggtgcctga

SEQ ID NO: 39798 - DNA, 2688 bp, synthetic construct
  source 1..2688: mol_type = other DNA
atggccttaccagtgaccgccttgctcctgccgctggccttgctgctccacgccgccaggccgctcgaggaggcctctacaaagggaccctccgtgtttcctctggctcccagcagcaagtctacaagcggaggaacagccgctctgggctgcctggtcaaggattactttcccgagcctgtgaccgtgtcctggaatagcggagcactgacaagcggcgtgcacacctttccagccgtgctgcaaagcagcggcctgtactctctgagcagcgtggtcacagtgcctagctctagcctgggcacccagacctacatctgcaatgtgaaccacaagcctagcaacaccaaggtggacaagagagtggaacccaagagctgtcccatcaagaccgatgtgattacaatggaccccaaggacaactgctccaaggacgccaacgataccctgctgctccagctgaccaacaccagcgcctactacatgtacttgttgctgctgctgaagtccgtggtgtacttcgccatcatcacatgctgcctgctgcggagaaccgccttctgctgcaacggcgagaagtctagggccaagcgatctggatctggagcaacaaacttctcactactcaaacaagcaggtgacgtggaggagaatcccgggcctactagcatggccttaccagtgaccgccttgctcctgccgctggccttgctgctccacgccgccaggccggagatcgtgctgacacagtctcccgccacactgtcactgtctccaggcgaaagagccacactgagctgtagagccagccagagcgtgtcctcttacctggcctggtatcagcagaagcctggacaggctccccggctgctgatctacgatgccagcaatagagccacaggcatccccgccagattttctggctctggcagcggcaccgatttcaccctgaccataagcagcctggaacctgaggacttcgccgtgtactactgccagcagagaagcgactggcccctgacatttggcggcggaacaaaggtggaaatcaaaggcggaggcggaagtggaggcggaggatctggcggcggaggctctcaagttcagctggttcagagcggagccgaagtgaagaaacctggcagcagcgtgaaggtgtcctgcaaagcaagcggcggcacctttagctcctacgccatccactgggttcgacaggcaccaggacaaggactggaatggatgggcagaatcatccccatcgagggcagagcctactacgcccagaaattccagggcagagtgaccatcaccgccgacgagtctacaagcaccgcctacatggaactgagcagcctgagaagcgaggataccgctgtgtactattgcgccagaggccggtacagctacagatattggttcgactactggggccagggcaccctggttacagtctcttctacgcgtggacagcctaaggccaatcctaccgtgacactgttccctccaagcagcgaagaactccaggccaacaaggccacacttgtgtgcctgatctccgacttctaccctggggctgtgacagtggcttggaaggccgatggatctcctgtgaaagccggcgtggaaaccaccaagccatccaagcagagcaacaacaaatacgccgccagctcctacctgagcctgacacctgagcagtggaagtcccacagatcctacagctgccaagtgacccacgaaggcagcaccgtggaaaagacagtggcccctacagagtgcagcgaagtgaaaaccgactccaccgaccacgtgaagcccaaagagacagagaacaccaagcagcccagcaagagctgccacaagcccaaggccatcgtgcacaccgagaaagtgaacatgatgagcctgaccgtgctgggcctgcggatgctgttcgccaaaaccgtggccgtgaacttcctgctgaccgccaagctgttcttcctccgcgccaagagaagcggatctggcgtgaagcagaccctgaatttcgacctgctgaagctggctggcgacgtggaatccaacccaggcccttctagaggccatatgaccgagtacaagcccacggtgcgcctcgccacccgcgacgacgtccccagggccgtacgcaccctcgccgccgcgttcgccgactaccccgccacgcgccacaccgtcgatccggaccgccacatcgagcgggtcaccgagctgcaagaactcttcctcacgcgcgtcgggctcgacatcggcaaggtgtgggtcgcggacgacggcgccgcggtggcggtctggaccacgccggagagcgtcgaagcgggggcggtgttcgccgagatcggcccgcgcatggccgagttgagcggttcccggctggccgcgcagcaacagatggaaggcctcctggcgccgcaccggcccaaggagcccgcgtggttcctggccaccgtcggcgtctcgcccgaccaccagggcaagggtctgggcagcgccgtcgtgctccccggagtggaggcggccgagcgcgccggggtgcccgccttcctggagacctccgcgccccgcaacctccccttctacgagcggctcggcttcaccgtcaccgccgacgtcgaggtgcccgaaggaccgcgcacctggtgcatgacccgcaagcccggtgcctga

SEQ ID NO: 39799 - DNA, 2622 bp, synthetic construct
  source 1..2622: mol_type = other DNA
atggccttaccagtgaccgccttgctcctgccgctggccttgctgctccacgccgccaggccgctcgaggaggcctctacaaagggaccctccgtgtttcctctggctcccagcagcaagtctacaagcggaggaacagccgctctgggctgcctggtcaaggattactttcccgagcctgtgaccgtgtcctggaatagcggagcactgacaagcggcgtgcacacctttccagccgtgctgcaaagcagcggcctgtactctctgagcagcgtggtcacagtgcctagctctagcctgggcacccagacctacatctgcaatgtgaaccacaagcctagcaacaccaaggtggacaagagagtggaacccaagagctgtggcagagccgattgcggctttaccagcgagagctaccagcagggcgtgctgagcgccaccatcctgtacgagatcctgctgggcaaggccaccctgtacgccgtgctggtgtctgccctggtgctgatggctatggtcaagcggaaggacagccggggaagggccaagcgatctggatctggagcaacaaacttctcactactcaaacaagcaggtgacgtggaggagaatcccgggcctactagcatggccttaccagtgaccgccttgctcctgccgctggccttgctgctccacgccgccaggccggagatcgtgctgacacagtctcccgccacactgtcactgtctccaggcgaaagagccacactgagctgtagagccagccagagcgtgtcctcttacctggcctggtatcagcagaagcctggacaggctccccggctgctgatctacgatgccagcaatagagccacaggcatccccgccagattttctggctctggcagcggcaccgatttcaccctgaccataagcagcctggaacctgaggacttcgccgtgtactactgccagcagagaagcgactggcccctgacatttggcggcggaacaaaggtggaaatcaaaggcggaggcggaagtggaggcggaggatctggcggcggaggctctcaagttcagctggttcagagcggagccgaagtgaagaaacctggcagcagcgtgaaggtgtcctgcaaagcaagcggcggcacctttagctcctacgccatccactgggttcgacaggcaccaggacaaggactggaatggatgggcagaatcatccccatcgagggcagagcctactacgcccagaaattccagggcagagtgaccatcaccgccgacgagtctacaagcaccgcctacatggaactgagcagcctgagaagcgaggataccgctgtgtactattgcgccagaggccggtacagctacagatattggttcgactactggggccagggcaccctggttacagtctcttctacgcgtggacagcctaaggccaatcctaccgtgacactgttccctccaagcagcgaagaactccaggccaacaaggccacacttgtgtgcctgatctccgacttctaccctggggctgtgacagtggcttggaaggccgatggatctcctgtgaaagccggcgtggaaaccaccaagccatccaagcagagcaacaacaaatacgccgccagctcctacctgagcctgacacctgagcagtggaagtcccacagatcctacagctgccaagtgacccacgaaggcagcaccgtggaaaagacagtggcccctacagagtgcagcatccccgaggacacattcttcccaagccccgagagcagctgcgacgtgaagctggtggaaaagagcttcgagacagacaccaacctgaacttccagaacctgagcgtgatcggcttcagaatcctgctgctgaaagtggccggctttaacctgctgatgaccctgcggctgtggtccagccgcgccaagagaagcggatctggcgtgaagcagaccctgaatttcgacctgctgaagctggctggcgacgtggaatccaacccaggcccttctagaggccatatgaccgagtacaagcccacggtgcgcctcgccacccgcgacgacgtccccagggccgtacgcaccctcgccgccgcgttcgccgactaccccgccacgcgccacaccgtcgatccggaccgccacatcgagcgggtcaccgagctgcaagaactcttcctcacgcgcgtcgggctcgacatcggcaaggtgtgggtcgcggacgacggcgccgcggtggcggtctggaccacgccggagagcgtcgaagcgggggcggtgttcgccgagatcggcccgcgcatggccgagttgagcggttcccggctggccgcgcagcaacagatggaaggcctcctggcgccgcaccggcccaaggagcccgcgtggttcctggccaccgtcggcgtctcgcccgaccaccagggcaagggtctgggcagcgccgtcgtgctccccggagtggaggcggccgagcgcgccggggtgcccgccttcctggagacctccgcgccccgcaacctccccttctacgagcggctcggcttcaccgtcaccgccgacgtcgaggtgcccgaaggaccgcgcacctggtgcatgacccgcaagcccggtgcctga

SEQ ID NO: 39800 - DNA, 2622 bp, synthetic construct
  source 1..2622: mol_type = other DNA
atggccttaccagtgaccgccttgctcctgccgctggccttgctgctccacgccgccaggccgctcgaggaggcctctacaaagggaccctccgtgtttcctctggctcccagcagcaagtctacaagcggaggaacagccgctctgggctgcctggtcaaggattactttcccgagcctgtgaccgtgtcctggaatagcggagcactgacaagcggcgtgcacacctttccagccgtgctgcaaagcagcggcctgtactctctgagcagcgtggtcacagtgcctagctctagcctgggcacccagacctacatctgcaatgtgaaccacaagcctagcaacaccaaggtggacaagagagtggaacccaagagctgtatccccgaggacacattcttcccaagccccgagagcagctgcgacgtgaagctggtggaaaagagcttcgagacagacaccaacctgaacttccagaacctgagcgtgatcggcttcagaatcctgctgctgaaagtggccggctttaacctgctgatgaccctgcggctgtggtccagcagggccaagcgatctggatctggagcaacaaacttctcactactcaaacaagcaggtgacgtggaggagaatcccgggcctactagcatggccttaccagtgaccgccttgctcctgccgctggccttgctgctccacgccgccaggccggagatcgtgctgacacagtctcccgccacactgtcactgtctccaggcgaaagagccacactgagctgtagagccagccagagcgtgtcctcttacctggcctggtatcagcagaagcctggacaggctccccggctgctgatctacgatgccagcaatagagccacaggcatccccgccagattttctggctctggcagcggcaccgatttcaccctgaccataagcagcctggaacctgaggacttcgccgtgtactactgccagcagagaagcgactggcccctgacatttggcggcggaacaaaggtggaaatcaaaggcggaggcggaagtggaggcggaggatctggcggcggaggctctcaagttcagctggttcagagcggagccgaagtgaagaaacctggcagcagcgtgaaggtgtcctgcaaagcaagcggcggcacctttagctcctacgccatccactgggttcgacaggcaccaggacaaggactggaatggatgggcagaatcatccccatcgagggcagagcctactacgcccagaaattccagggcagagtgaccatcaccgccgacgagtctacaagcaccgcctacatggaactgagcagcctgagaagcgaggataccgctgtgtactattgcgccagaggccggtacagctacagatattggttcgactactggggccagggcaccctggttacagtctcttctacgcgtggacagcctaaggccaatcctaccgtgacactgttccctccaagcagcgaagaactccaggccaacaaggccacacttgtgtgcctgatctccgacttctaccctggggctgtgacagtggcttggaaggccgatggatctcctgtgaaagccggcgtggaaaccaccaagccatccaagcagagcaacaacaaatacgccgccagctcctacctgagcctgacacctgagcagtggaagtcccacagatcctacagctgccaagtgacccacgaaggcagcaccgtggaaaagacagtggcccctacagagtgcagcggcagagccgattgcggctttaccagcgagagctaccagcagggcgtgctgagcgccaccatcctgtacgagatcctgctgggcaaggccaccctgtacgccgtgctggtgtctgccctggtgctgatggctatggtcaagcggaaggacagccggggacgcgccaagagaagcggatctggcgtgaagcagaccctgaatttcgacctgctgaagctggctggcgacgtggaatccaacccaggcccttctagaggccatatgaccgagtacaagcccacggtgcgcctcgccacccgcgacgacgtccccagggccgtacgcaccctcgccgccgcgttcgccgactaccccgccacgcgccacaccgtcgatccggaccgccacatcgagcgggtcaccgagctgcaagaactcttcctcacgcgcgtcgggctcgacatcggcaaggtgtgggtcgcggacgacggcgccgcggtggcggtctggaccacgccggagagcgtcgaagcgggggcggtgttcgccgagatcggcccgcgcatggccgagttgagcggttcccggctggccgcgcagcaacagatggaaggcctcctggcgccgcaccggcccaaggagcccgcgtggttcctggccaccgtcggcgtctcgcccgaccaccagggcaagggtctgggcagcgccgtcgtgctccccggagtggaggcggccgagcgcgccggggtgcccgccttcctggagacctccgcgccccgcaacctccccttctacgagcggctcggcttcaccgtcaccgccgacgtcgaggtgcccgaaggaccgcgcacctggtgcatgacccgcaagcccggtgcctga

SEQ ID NO: 39801 - DNA, 1860 bp, synthetic construct
  source 1..1860: mol_type = other DNA
atggccttaccagtgaccgccttgctcctgccgctggccttgctgctccacgccgccaggccggagatcgtgctgacacagtctcccgccacactgtcactgtctccaggcgaaagagccacactgagctgtagagccagccagagcgtgtcctcttacctggcctggtatcagcagaagcctggacaggctccccggctgctgatctacgatgccagcaatagagccacaggcatccccgccagattttctggctctggcagcggcaccgatttcaccctgaccataagcagcctggaacctgaggacttcgccgtgtactactgccagcagagaagcgactggcccctgacatttggcggcggaacaaaggtggaaatcaaactcgaggacctgaagaacgtgttcccacctgaggtggccgtgttcgagcctagcgaggccgagatcagccacacccagaaagccaccctcgtgtgcctggctaccggcttctaccccgaccatgtggaactgtcttggtgggtcaacggcaaagaggtgcacagcggcgtgtgtaccgacccccagccactgaaagaacagcccgccctgaacgacagccggtactgcctgagcagcagactgagagtgtccgccaccttctggcagaacccccggaaccacttcagatgccaggtgcagttctacggcctgagcgagaacgacgagtggacccaggacagagccaagcccgtgacccagatcgtgtctgccgaagcctggggcagagccgatagcggctttaccagcgagagctaccagcagggcgtgctgagcgccaccatcctgtacgagatcctgctgggcaaggccaccctgtacgccgtgctggtgtctgccctggtgctgatggctatggtcaagcggaaggacagccggggaagggccaagcgatctggatctggagcaacaaacttctcactactcaaacaagcaggtgacgtggaggagaatcccgggcctactagtatggactggatttggcgcatccttttccttgtcggcgctgctaccggcgcgcattccttcgaacaagttcagctggttcagagcggagccgaagtgaagaaacctggcagcagcgtgaaggtgtcctgcaaagcaagcggcggcacctttagctcctacgccatccactgggttcgacaggcaccaggacaaggactggaatggatgggcagaatcatccccatcgagggcagagcctactacgcccagaaattccagggcagagtgaccatcaccgccgacgagtctacaagcaccgcctacatggaactgagcagcctgagaagcgaggataccgctgtgtactattgcgccagaggccggtacagctacagatattggttcgactactggggccagggcaccctggttacagtctcttctacgcgtatccagaaccctgatcctgccgtgtaccagctgcgggatagcaagagcagcgacaagagcgtgtgtctgttcaccgacttcgacagccagaccaacgtgtcccagagcaaggactccgacgtgtacatcaccgataagtgcgtgctggacatgcggagcatggacttcaagagcaactccgccgtggcctggtccaacaagtccgatttcgcctgcgccaacgccttcaacaacagcattatccccgaggacacattcttcccaagccccgagagcagcagcgacgtgaagctggtggaaaagagcttcgagacagacaccaacctgaacttccagaacctgagcgtgatcggcttcagaatcctgctgctgaaagtggccggctttaacctgctgatgaccctgcggctgtggtccagc

SEQ ID NO: 39802 - DNA, 2700 bp, synthetic construct
  source 1..2700: mol_type = other DNA
atggccttaccagtgaccgccttgctcctgccgctggccttgctgctccacgccgccaggccggaggttcagctgcttgagtctggcggaggactggttcaacctggcggaagcctgagactgtcttgtgccgcctctggcagaaccttcagcatgggctggtatagacaggcccctggcaagggcctcgaatttgtgtctgccatcacatacagcggcggcagcccttactacgccgattctgtgaagggcagattcaccatcagccgggacaacagcaagaacaccgtgtacctccagatgaacagcctgagagccgaggacaccgccgtgtactactgtgccgccaatccaacctacggcagcgactggaatgccgagaattggggccagggcacactggtcacagtgtctagtggtaccggcggaggcggatctggcggcggaggtagcggtggcggaggatctgaattcgagatcgtgctgacacagtctcccgccacactgtcactgtctccaggcgaaagagccacactgagctgtagagccagccagagcgtgtcctcttacctggcctggtatcagcagaagcctggacaggctccccggctgctgatctacgatgccagcaatagagccacaggcatccccgccagattttctggctctggcagcggcaccgatttcaccctgaccataagcagcctggaacctgaggacttcgccgtgtactactgccagcagagaagcgactggcccctgacatttggcggcggaacaaaggtggaaatcaaactcgagatccagaaccctgatcctgccgtgtaccagctgcgggatagcaagagcagcgacaagagcgtgtgtctgttcaccgacttcgacagccagaccaacgtgtcccagagcaaggactccgacgtgtacatcaccgataagtgcgtgctggacatgcggagcatggacttcaagagcaactccgccgtggcctggtccaacaagtccgatttcgcctgcgccaacgccttcaacaacagcattatccccgaggacacattcttcccaagcagcgacgtgccctgcgacgtgaagctggtggaaaagagcttcgagacagacaccaacctgaacttccagaacctgagcgtgatcggcttcagaatcctgctgctgaaagtggccggctttaacctgctgatgaccctgcggctgtggtccagccgcgccaagagaagcggatctggcgtgaagcagaccctgaatttcgacctgctgaagctggctggcgacgtggaatccaacccaggccctactagtaccatggactggatttggcgcatccttttccttgtcggcgctgctaccggcacccattccgggcccgaagtgcaactggttgaatccggtggcggcctggtgcaacccggcggatctctcagacttagctgtgccgcctccggcagaaccttcacaatgggatggtacaggcaggctccagggaaagagagagagttcgtcgccgccatctctctgtctcccacactggcctactacgccgactctgtgaaaggccggttcaccatctccagagataatagcaagaacaccgtggtgctgcaaatgaactctctgagagccgaggatacagccctgtactattgtgccgctgaccggaagtccgtgatgagcatcagacccgattactggggacagggcacactggtcacagtgtctagtggatccggcggcggaggatctggcggaggcggatctgggggcggaggctctttcgaacaagttcagctggttcagagcggagccgaagtgaagaaacctggcagcagcgtgaaggtgtcctgcaaagcaagcggcggcacctttagctcctacgccatccactgggttcgacaggcaccaggacaaggactggaatggatgggcagaatcatccccatcgagggcagagcctactacgcccagaaattccagggcagagtgaccatcaccgccgacgagtctacaagcaccgcctacatggaactgagcagcctgagaagcgaggataccgctgtgtactattgcgccagaggccggtacagctacagatattggttcgactactggggccagggcaccctggttacagtctcttctacgcgtgaggacctgaagaacgtgttcccacctgaggtggccgtgttcgagcctagcaaggccgagatcgcccacacccagaaagccaccctcgtgtgcctggctaccggcttctaccccgaccatgtggaactgtcttggtgggtcaacggcaaagaggtgcacagcggcgtgtgtaccgacccccagccactgaaagaacagcccgccctgaacgacagccggtactgcctgagcagcagactgagagtgtccgccaccttctggcagaacccccggaaccacttcagatgccaggtgcagttctacggcctgagcgagaacgacgagtggacccaggacagagccaagcccgtgacccagatcgtgtctgccgaagcctggggcagagccgattgcggcatcaccagcgccagctaccaccagggcgtgctgagcgccaccatcctgtacgagatcctgctgggcaaggccaccctgtacgccgtgctggtgtctgccctggtgctgatggctatggtcaagcggaaggacagccggggataa

SEQ ID NO: 39803 - DNA, 2700 bp, synthetic construct
  source 1..2700: mol_type = other DNA
atggccttaccagtgaccgccttgctcctgccgctggccttgctgctccacgccgccaggccggaagtgcagctggttgaatctggcggaggactggttcaggctggcggatctctgagactgtcttgtgccgccagcggcagaacctttagcatgggctggtttagacaggcccctggcaaagagagagagttcgtcgccgccatcacatactctggcggcagcccttactacgccgactctgtgaagggcagattcaccatcagccgggacaacgccaagaacaccgtgtacctccagatgaacagcctgaagcctgaggacaccgccgtgtactactgcgccgccaatccaacatacggcagcgactggaacgccgagaattggggccagggaacccaagtgacagtgtctagcggtaccggcggaggcggatctggcggcggaggtagcggtggcggaggatctgaattcgagatcgtgctgacacagtctcccgccacactgtcactgtctccaggcgaaagagccacactgagctgtagagccagccagagcgtgtcctcttacctggcctggtatcagcagaagcctggacaggctccccggctgctgatctacgatgccagcaatagagccacaggcatccccgccagattttctggctctggcagcggcaccgatttcaccctgaccataagcagcctggaacctgaggacttcgccgtgtactactgccagcagagaagcgactggcccctgacatttggcggcggaacaaaggtggaaatcaaactcgagatccagaaccctgatcctgccgtgtaccagctgcgggatagcaagagcagcgacaagagcgtgtgtctgttcaccgacttcgacagccagaccaacgtgtcccagagcaaggactccgacgtgtacatcaccgataagtgcgtgctggacatgcggagcatggacttcaagagcaactccgccgtggcctggtccaacaagtccgatttcgcctgcgccaacgccttcaacaacagcattatccccgaggacacattcttcccaagcagcgacgtgccctgcgacgtgaagctggtggaaaagagcttcgagacagacaccaacctgaacttccagaacctgagcgtgatcggcttcagaatcctgctgctgaaagtggccggctttaacctgctgatgaccctgcggctgtggtccagccgcgccaagagaagcggatctggcgtgaagcagaccctgaatttcgacctgctgaagctggctggcgacgtggaatccaacccaggccctactagtaccatggactggatttggcgcatccttttccttgtcggcgctgctaccggcgcccattccgggcccgaagtgcaactggttgaatccggtggcggcctggtgcaacccggcggatctctcagacttagctgtgccgcctccggcagaaccttcacaatgggatggtacaggcaggctccagggaaagagagagagttcgtcgccgccatctctctgtctcccacactggcctactacgccgactctgtgaaaggccggttcaccatctccagagataatagcaagaacaccgtggtgctgcaaatgaactctctgagagccgaggatacagccctgtactattgtgccgctgaccggaagtccgtgatgagcatcagacccgattactggggacagggcacactggtcacagtgtctagtggatccggcggcggaggatctggcggaggcggatctgggggcggaggctctttcgaacaagttcagctggttcagagcggagccgaagtgaagaaacctggcagcagcgtgaaggtgtcctgcaaagcaagcggcggcacctttagctcctacgccatccactgggttcgacaggcaccaggacaaggactggaatggatgggcagaatcatccccatcgagggcagagcctactacgcccagaaattccagggcagagtgaccatcaccgccgacgagtctacaagcaccgcctacatggaactgagcagcctgagaagcgaggataccgctgtgtactattgcgccagaggccggtacagctacagatattggttcgactactggggccagggcaccctggttacagtctcttctacgcgtgaggacctgaagaacgtgttcccacctgaggtggccgtgttcgagcctagcaaggccgagatcgcccacacccagaaagccaccctcgtgtgcctggctaccggcttctaccccgaccatgtggaactgtcttggtgggtcaacggcaaagaggtgcacagcggcgtgtgtaccgacccccagccactgaaagaacagcccgccctgaacgacagccggtactgcctgagcagcagactgagagtgtccgccaccttctggcagaacccccggaaccacttcagatgccaggtgcagttctacggcctgagcgagaacgacgagtggacccaggacagagccaagcccgtgacccagatcgtgtctgccgaagcctggggcagagccgattgcggcatcaccagcgccagctaccaccagggcgtgctgagcgccaccatcctgtacgagatcctgctgggcaaggccaccctgtacgccgtgctggtgtctgccctggtgctgatggctatggtcaagcggaaggacagccggggataa

SEQ ID NO: 39804 - DNA, 2691 bp, synthetic construct
  source 1..2691: mol_type = other DNA
atggccttaccagtgaccgccttgctcctgccgctggccttgctgctccacgccgccaggccggaagtgcagctggttgaatctggcggaggactggttcaggctggcggatctctgagactgtcttgtgccgccagcggcagaacctttagcatgggctggtttagacaggcccctggcaaagagagagagttcgtcgccgccatcacatactctggcggcagcccttactacgccgactctgtgaagggcagattcaccatcagccgggacaacgccaagaacaccgtgtacctccagatgaacagcctgaagcctgaggacaccgccgtgtactactgcgccgccaatccaacatacggcagcgactggaacgccgagaattggggccagggaacccaagtgacagtgtctagcggtaccggcggaggcggatctggcggcggaggtagcggtggcggaggatctgaattcgagatcgtgctgacacagtctcccgccacactgtcactgtctccaggcgaaagagccacactgagctgtagagccagccagagcgtgtcctcttacctggcctggtatcagcagaagcctggacaggctccccggctgctgatctacgatgccagcaatagagccacaggcatccccgccagattttctggctctggcagcggcaccgatttcaccctgaccataagcagcctggaacctgaggacttcgccgtgtactactgccagcagagaagcgactggcccctgacatttggcggcggaacaaaggtggaaatcaaactcgaggacctgaagaacgtgttcccacctgaggtggccgtgttcgagcctagcgaggccgagatcagccacacccagaaagccaccctcgtgtgcctggctaccggcttctaccccgaccatgtggaactgtcttggtgggtcaacggcaaagaggtgcacagcggcgtgtgtaccgacccccagccactgaaagaacagcccgccctgaacgacagccggtactgcctgagcagcagactgagagtgtccgccaccttctggcagaacccccggaaccacttcagatgccaggtgcagttctacggcctgagcgagaacgacgagtggacccaggacagagccaagcccgtgacccagatcgtgtctgccgaagcctggggcagagccgattgcggctttaccagcgagagctaccagcagggcgtgctgagcgccaccatcctgtacgagatcctgctgggcaaggccaccctgtacgccgtgctggtgtctgccctggtgctgatggctatggtcaagcggaaggacagccggggaagggccaagcgatctggatctggagcaacaaacttctcactactcaaacaagcaggtgacgtggaggagaatcccgggcctactagtgccaccatggactggatttggcgcatccttttccttgtcggcgctgctaccggcgcccattccgggcccgaagtgcaactggttgaatccggtggcggcctggtgcaagcaggcggatctctcagacttagctgtgccgcctccggcagaaccttcacaatgggatggtttaggcaggctccagggaaagagagagagttcgtcgccgccatctctctgtctcccacactggcctactacgccgactctgtgaaaggccggttcaccatctccagagataatgccaagaacaccgtggtgctgcaaatgaactctctgaaacccgaggatacagccctgtactattgtgccgctgaccggaagtccgtgatgagcatcagacccgattactggggacagggcacacaagtcacagtgtcctctggatccggcggcggaggatctggcggaggcggatctgggggcggaggctctttcgaacaagttcagctggttcagagcggagccgaagtgaagaaacctggcagcagcgtgaaggtgtcctgcaaagcaagcggcggcacctttagctcctacgccatccactgggttcgacaggcaccaggacaaggactggaatggatgggcagaatcatccccatcgagggcagagcctactacgcccagaaattccagggcagagtgaccatcaccgccgacgagtctacaagcaccgcctacatggaactgagcagcctgagaagcgaggataccgctgtgtactattgcgccagaggccggtacagctacagatattggttcgactactggggccagggcaccctggttacagtctcttctacgcgtatccagaaccctgatcctgccgtgtaccagctgcgggatagcaagagcagcgacaagagcgtgtgtctgttcaccgacttcgacagccagaccaacgtgtcccagagcaaggactccgacgtgtacatcaccgataagtgcgtgctggacatgcggagcatggacttcaagagcaactccgccgtggcctggtccaacaagtccgatttcgcctgcgccaacgccttcaacaacagcattatccccgaggacacattcttcccaagccccgagagcagctgcgacgtgaagctggtggaaaagagcttcgagacagacaccaacctgaacttccagaacctgagcgtgatcggcttcagaatcctgctgctgaaagtggccggctttaacctgctgatgaccctgcggctgtggtccagctaa

SEQ ID NO: 39805 - DNA, 2304 bp, synthetic construct
  source 1..2304: mol_type = other DNA
atggccttaccagtgaccgccttgctcctgccgctggccttgctgctccacgccgccaggccggaagtgcagctggttgaatctggcggaggactggttcagcctggcggatctctgagactgagctgtgaagccagcggcttcgccagcgacgattacatcatcggctggttcagacaggcccctggcaaagagagagagggcgtcagctgcatcagctctaagtacgccaacaccgtgtacaccgacagcgtgaagggcagattcagactgagcagaggcaccgccaagaataccgtgtacctccagatgagcgccctgaagcctgaggataccgccgtgtactactgcgctatggacagccgcagagtgacatgccctgagatcagcaccatgcaccggaacttcgattcttggggccagggcacactggtcacagtgtcatctggtaccggcggaggcggatctggcggcggaggtagcggtggcggaggatctgaattcgagatcgtgctgacacagtctcccgccacactgtcactgtctccaggcgaaagagccacactgagctgtagagccagccagagcgtgtcctcttacctggcctggtatcagcagaagcctggacaggctccccggctgctgatctacgatgccagcaatagagccacaggcatccccgccagattttctggctctggcagcggcaccgatttcaccctgaccataagcagcctggaacctgaggacttcgccgtgtactactgccagcagagaagcgactggcccctgacatttggcggcggaacaaaggtggaaatcaaactcgaggacctgaagaacgtgttcccacctgaggtggccgtgttcgagcctagcaaggccgagatcgcccacacccagaaagccaccctcgtgtgcctggctaccggcttctaccccgaccatgtggaactgtcttggtgggtcaacggcaaagaggtgcacagcggcgtgtgtaccgacccccagccactgaaagaacagcccgccctgaacgacagccggtactgcctgagcagcagactgagagtgtccgccaccttctggcagaacccccggaaccacttcagatgccaggtgcagttctacggcctgagcgagaacgacgagtggacccaggacagagccaagcccgtgacccagatcgtgtctgccgaagcctggggcagagccgattgcggcatcaccagcgccagctaccaccagggcgtgctgagcgccaccatcctgtacgagatcctgctgggcaaggccaccctgtacgccgtgctggtgtctgccctggtgctgatggctatggtcaagcggaaggacagccggggaagggccaagcgatctggatctggagcaacaaacttctcactactcaaacaagcaggtgacgtggaggagaatcccgggcctactagtatggactggatttggcgcatccttttccttgtcggcgctgctaccggcgcgcattccttcgaacaagttcagctggttcagagcggagccgaagtgaagaaacctggcagcagcgtgaaggtgtcctgcaaagcaagcggcggcacctttagctcctacgccatccactgggttcgacaggcaccaggacaaggactggaatggatgggcagaatcatccccatcgagggcagagcctactacgcccagaaattccagggcagagtgaccatcaccgccgacgagtctacaagcaccgcctacatggaactgagcagcctgagaagcgaggataccgctgtgtactattgcgccagaggccggtacagctacagatattggttcgactactggggccagggcaccctggttacagtctcttctacgcgtatccagaaccctgatcctgccgtgtaccagctgcgggatagcaagagcagcgacaagagcgtgtgtctgttcaccgacttcgacagccagaccaacgtgtcccagagcaaggactccgacgtgtacatcaccgataagtgcgtgctggacatgcggagcatggacttcaagagcaactccgccgtggcctggtccaacaagtccgatttcgcctgcgccaacgccttcaacaacagcattatccccgaggacacattcttcccaagcagcgacgtgccctgcgacgtgaagctggtggaaaagagcttcgagacagacaccaacctgaacttccagaacctgagcgtgatcggcttcagaatcctgctgctgaaagtggccggctttaacctgctgatgaccctgcggctgtggtccagctaa

SEQ ID NO: 39806 - DNA, 2277 bp, synthetic construct
  source 1..2277: mol_type = other DNA
atggccttaccagtgaccgccttgctcctgccgctggccttgctgctccacgccgccaggccggagatcgtgctgacacagtctcccgccacactgtcactgtctccaggcgaaagagccacactgagctgtagagccagccagagcgtgtcctcttacctggcctggtatcagcagaagcctggacaggctccccggctgctgatctacgatgccagcaatagagccacaggcatccccgccagattttctggctctggcagcggcaccgatttcaccctgaccataagcagcctggaacctgaggacttcgccgtgtactactgccagcagagaagcgactggcccctgacatttggcggcggaacaaaggtggaaatcaaactcgaggacctgaagaacgtgttcccacctgaggtggccgtgttcgagcctagcgaggccgagatcagccacacccagaaagccaccctcgtgtgcctggctaccggcttctaccccgaccatgtggaactgtcttggtgggtcaacggcaaagaggtgcacagcggcgtgtgtaccgacccccagccactgaaagaacagcccgccctgaacgacagccggtactgcctgagcagcagactgagagtgtccgccaccttctggcagaacccccggaaccacttcagatgccaggtgcagttctacggcctgagcgagaacgacgagtggacccaggacagagccaagcccgtgacccagatcgtgtctgccgaagcctggggcagagccgattgcggctttaccagcgagagctaccagcagggcgtgctgagcgccaccatcctgtacgagatcctgctgggcaaggccaccctgtacgccgtgctggtgtctgccctggtgctgatggctatggtcaagcggaaggacagccggggaagggccaagcgatctggatctggagcaacaaacttctcactactcaaacaagcaggtgacgtggaggagaatcccgggcctactagtaccatggactggatttggcgcatccttttccttgtcggcgctgctaccggcgcccattccgggcccgaagtgcaactggttgaatccggtggcggcctggtgcaacccggcggatctctcagacttagctgtgccgcctccggcagaaccttcacaatgggatggtacaggcaggctccagggaaagagagagagttcgtcgccgccatctctctgtctcccacactggcctactacgccgactctgtgaaaggccggttcaccatctccagagataatagcaagaacaccgtggtgctgcaaatgaactctctgagagccgaggatacagccctgtactattgtgccgctgaccggaagtccgtgatgagcatcagacccgattactggggacagggcacactggtcacagtgtctagtggatccggcggcggaggatctggcggaggcggatctgggggcggaggctctttcgaacaagttcagctggttcagagcggagccgaagtgaagaaacctggcagcagcgtgaaggtgtcctgcaaagcaagcggcggcacctttagctcctacgccatccactgggttcgacaggcaccaggacaaggactggaatggatgggcagaatcatccccatcgagggcagagcctactacgcccagaaattccagggcagagtgaccatcaccgccgacgagtctacaagcaccgcctacatggaactgagcagcctgagaagcgaggataccgctgtgtactattgcgccagaggccggtacagctacagatattggttcgactactggggccagggcaccctggttacagtctcttctacgcgtatccagaaccctgatcctgccgtgtaccagctgcgggatagcaagagcagcgacaagagcgtgtgtctgttcaccgacttcgacagccagaccaacgtgtcccagagcaaggactccgacgtgtacatcaccgataagtgcgtgctggacatgcggagcatggacttcaagagcaactccgccgtggcctggtccaacaagtccgatttcgcctgcgccaacgccttcaacaacagcattatccccgaggacacattcttcccaagccccgagagcagctgcgacgtgaagctggtggaaaagagcttcgagacagacaccaacctgaacttccagaacctgagcgtgatcggcttcagaatcctgctgctgaaagtggccggctttaacctgctgatgaccctgcggctgtggtccagctaa

SEQ ID NO: 39807 - DNA, 2295 bp, synthetic construct
  source 1..2295: mol_type = other DNA
atggccttaccagtgaccgccttgctcctgccgctggccttgctgctccacgccgccaggccggagatcgtgctgacacagtctcccgccacactgtcactgtctccaggcgaaagagccacactgagctgtagagccagccagagcgtgtcctcttacctggcctggtatcagcagaagcctggacaggctccccggctgctgatctacgatgccagcaatagagccacaggcatccccgccagattttctggctctggcagcggcaccgatttcaccctgaccataagcagcctggaacctgaggacttcgccgtgtactactgccagcagagaagcgactggcccctgacatttggcggcggaacaaaggtggaaatcaaactcgaggacctgaagaacgtgttcccacctgaggtggccgtgttcgagcctagcgaggccgagatcagccacacccagaaagccaccctcgtgtgcctggctaccggcttctaccccgaccatgtggaactgtcttggtgggtcaacggcaaagaggtgcacagcggcgtgtgtaccgacccccagccactgaaagaacagcccgccctgaacgacagccggtactgcctgagcagcagactgagagtgtccgccaccttctggcagaacccccggaaccacttcagatgccaggtgcagttctacggcctgagcgagaacgacgagtggacccaggacagagccaagcccgtgacccagatcgtgtctgccgaagcctggggcagagccgattgcggctttaccagcgagagctaccagcagggcgtgctgagcgccaccatcctgtacgagatcctgctgggcaaggccaccctgtacgccgtgctggtgtctgccctggtgctgatggctatggtcaagcggaaggacagccggggaagggccaagcgatctggatctggagcaacaaacttctcactactcaaacaagcaggtgacgtggaggagaatcccgggcctactagtaccatggactggatttggcgcatccttttccttgtcggcgctgctaccggcgcccattccgggccccaggtgcagctggttgaatctggcggaggactggttcagcctggcggatctctgagactgtcttgtgccgccagcggcaacatcaacagcagaaactgcatgggctggttcagacaggcccctggcaagggaagagaaggcgtggcagctatcggccaagtgaccggcagaacctactacgtggacagcgtgaagggcagattcaccatcagcctggacaacagcaagaacaccctgtacctccagatgaacagcctgagagccgaggacaccgccgtgtactattgtgctgctgcccctggctgtctgctgtctgcacttagaagcgccgactacagaaactggggccagggcacactggtcaccgtttcttctggatccggcggcggaggatctggcggaggcggatctgggggcggaggctctttcgaacaagttcagctggttcagagcggagccgaagtgaagaaacctggcagcagcgtgaaggtgtcctgcaaagcaagcggcggcacctttagctcctacgccatccactgggttcgacaggcaccaggacaaggactggaatggatgggcagaatcatccccatcgagggcagagcctactacgcccagaaattccagggcagagtgaccatcaccgccgacgagtctacaagcaccgcctacatggaactgagcagcctgagaagcgaggataccgctgtgtactattgcgccagaggccggtacagctacagatattggttcgactactggggccagggcaccctggttacagtctcttctacgcgtatccagaaccctgatcctgccgtgtaccagctgcgggatagcaagagcagcgacaagagcgtgtgtctgttcaccgacttcgacagccagaccaacgtgtcccagagcaaggactccgacgtgtacatcaccgataagtgcgtgctggacatgcggagcatggacttcaagagcaactccgccgtggcctggtccaacaagtccgatttcgcctgcgccaacgccttcaacaacagcattatccccgaggacacattcttcccaagccccgagagcagctgcgacgtgaagctggtggaaaagagcttcgagacagacaccaacctgaacttccagaacctgagcgtgatcggcttcagaatcctgctgctgaaagtggccggctttaacctgctgatgaccctgcggctgtggtccagc

SEQ ID NO: 39808 - DNA, 2298 bp, synthetic construct
  source 1..2298: mol_type = other DNA
atggccttaccagtgaccgccttgctcctgccgctggccttgctgctccacgccgccaggccggagatcgtgctgacacagtctcccgccacactgtcactgtctccaggcgaaagagccacactgagctgtagagccagccagagcgtgtcctcttacctggcctggtatcagcagaagcctggacaggctccccggctgctgatctacgatgccagcaatagagccacaggcatccccgccagattttctggctctggcagcggcaccgatttcaccctgaccataagcagcctggaacctgaggacttcgccgtgtactactgccagcagagaagcgactggcccctgacatttggcggcggaacaaaggtggaaatcaaactcgaggacctgaagaacgtgttcccacctgaggtggccgtgttcgagcctagcgaggccgagatcagccacacccagaaagccaccctcgtgtgcctggctaccggcttctaccccgaccatgtggaactgtcttggtgggtcaacggcaaagaggtgcacagcggcgtgtgtaccgacccccagccactgaaagaacagcccgccctgaacgacagccggtactgcctgagcagcagactgagagtgtccgccaccttctggcagaacccccggaaccacttcagatgccaggtgcagttctacggcctgagcgagaacgacgagtggacccaggacagagccaagcccgtgacccagatcgtgtctgccgaagcctggggcagagccgattgcggctttaccagcgagagctaccagcagggcgtgctgagcgccaccatcctgtacgagatcctgctgggcaaggccaccctgtacgccgtgctggtgtctgccctggtgctgatggctatggtcaagcggaaggacagccggggaagggccaagcgatctggatctggagcaacaaacttctcactactcaaacaagcaggtgacgtggaggagaatcccgggcctactagtaccatggactggatttggcgcatccttttccttgtcggcgctgctaccggcgcccattccgggccccaggtgcagctggttgaatctggcggaggatctgttcaggctggcggctctctgagactgtcttgtggcgcttccggcaacatcagcagcagaaactgcatgggctggttcagacaggcccctggcaaagagagagaaggcgttgccgccatcggacaagtgaccggcagatcctactacgtggacagcgtgaagggcagattcaccatcagcctggacaacgccaagaacaccctgtacctccagatgaacacactgaagcccgaggacaccgccatgtactactgtgctgctgcccctggctgtctgctgtctgcacttagaagcgccgactacagaaactggggccagggaacccaagtgacagtgtctagtggatccggcggcggaggatctggcggaggcggatctgggggcggaggctctttcgaacaagttcagctggttcagagcggagccgaagtgaagaaacctggcagcagcgtgaaggtgtcctgcaaagcaagcggcggcacctttagctcctacgccatccactgggttcgacaggcaccaggacaaggactggaatggatgggcagaatcatccccatcgagggcagagcctactacgcccagaaattccagggcagagtgaccatcaccgccgacgagtctacaagcaccgcctacatggaactgagcagcctgagaagcgaggataccgctgtgtactattgcgccagaggccggtacagctacagatattggttcgactactggggccagggcaccctggttacagtctcttctacgcgtatccagaaccctgatcctgccgtgtaccagctgcgggatagcaagagcagcgacaagagcgtgtgtctgttcaccgacttcgacagccagaccaacgtgtcccagagcaaggactccgacgtgtacatcaccgataagtgcgtgctggacatgcggagcatggacttcaagagcaactccgccgtggcctggtccaacaagtccgatttcgcctgcgccaacgccttcaacaacagcattatccccgaggacacattcttcccaagccccgagagcagctgcgacgtgaagctggtggaaaagagcttcgagacagacaccaacctgaacttccagaacctgagcgtgatcggcttcagaatcctgctgctgaaagtggccggctttaacctgctgatgaccctgcggctgtggtccagctaa

SEQ ID NO: 39809 - DNA, 2721 bp, synthetic construct
  source 1..2721: mol_type = other DNA
atggccttaccagtgaccgccttgctcctgccgctggccttgctgctccacgccgccaggccggaagtgcagctggttgaatctggcggaggactggttcaggctggcggatctctgagactgtcttgtgccgccagcggcagaacctttagcatgggctggtttagacaggcccctggcaaagagagagagttcgtcgccgccatcacatactctggcggcagcccttactacgccgactctgtgaagggcagattcaccatcagccgggacaacgccaagaacaccgtgtacctccagatgaacagcctgaagcctgaggacaccgccgtgtactactgcgccgccaatccaacatacggcagcgactggaacgccgagaattggggccagggaacccaagtgacagtgtctagcggtaccggcggaggcggatctggcggcggaggtagcggtggcggaggatctgaattcgagatcgtgctgacacagtctcccgccacactgtcactgtctccaggcgaaagagccacactgagctgtagagccagccagagcgtgtcctcttacctggcctggtatcagcagaagcctggacaggctccccggctgctgatctacgatgccagcaatagagccacaggcatccccgccagattttctggctctggcagcggcaccgatttcaccctgaccataagcagcctggaacctgaggacttcgccgtgtactactgccagcagagaagcgactggcccctgacatttggcggcggaacaaaggtggaaatcaaactcgagatccagaaccctgatcctgccgtgtaccagctgcgggatagcaagagcagcgacaagagcgtgtgtctgttcaccgacttcgacagccagaccaacgtgtcccagagcaaggactccgacgtgtacatcaccgataagtgcgtgctggacatgcggagcatggacttcaagagcaactccgccgtggcctggtccaacaagtccgatttcgcctgcgccaacgccttcaacaacagcattatccccgaggacacattcttcccaagcagcgacgtgccctgcgacgtgaagctggtggaaaagagcttcgagacagacaccaacctgaacttccagaacctgagcgtgatcggcttcagaatcctgctgctgaaagtggccggctttaacctgctgatgaccctgcggctgtggtccagccgcgccaagagaagcggatctggcgtgaagcagaccctgaatttcgacctgctgaagctggctggcgacgtggaatccaacccaggccctactagtaccatggactggatttggcgcatccttttccttgtcggcgctgctaccggcgcccattccgggccccaggtgcagctggttgaatctggcggaggatctgttcaggctggcggctctctgagactgtcttgtggcgcttccggcaacatcagcagcagaaactgcatgggctggttcagacaggcccctggcaaagagagagaaggcgttgccgccatcggacaagtgaccggcagatcctactacgtggacagcgtgaagggcagattcaccatcagcctggacaacgccaagaacaccctgtacctccagatgaacacactgaagcccgaggacaccgccatgtactactgtgctgctgcccctggctgtctgctgtctgcacttagaagcgccgactacagaaactggggccagggaacccaagtgacagtgtctagtggatccggcggcggaggatctggcggaggcggatctgggggcggaggctctttcgaacaagttcagctggttcagagcggagccgaagtgaagaaacctggcagcagcgtgaaggtgtcctgcaaagcaagcggcggcacctttagctcctacgccatccactgggttcgacaggcaccaggacaaggactggaatggatgggcagaatcatccccatcgagggcagagcctactacgcccagaaattccagggcagagtgaccatcaccgccgacgagtctacaagcaccgcctacatggaactgagcagcctgagaagcgaggataccgctgtgtactattgcgccagaggccggtacagctacagatattggttcgactactggggccagggcaccctggttacagtctcttctacgcgtgaggacctgaagaacgtgttcccacctgaggtggccgtgttcgagcctagcaaggccgagatcgcccacacccagaaagccaccctcgtgtgcctggctaccggcttctaccccgaccatgtggaactgtcttggtgggtcaacggcaaagaggtgcacagcggcgtgtgtaccgacccccagccactgaaagaacagcccgccctgaacgacagccggtactgcctgagcagcagactgagagtgtccgccaccttctggcagaacccccggaaccacttcagatgccaggtgcagttctacggcctgagcgagaacgacgagtggacccaggacagagccaagcccgtgacccagatcgtgtctgccgaagcctggggcagagccgattgcggcatcaccagcgccagctaccaccagggcgtgctgagcgccaccatcctgtacgagatcctgctgggcaaggccaccctgtacgccgtgctggtgtctgccctggtgctgatggctatggtcaagcggaaggacagccggggataa

SEQ ID NO: 39810 - DNA, 2712 bp, synthetic construct
  source 1..2712: mol_type = other DNA
atggccttaccagtgaccgccttgctcctgccgctggccttgctgctccacgccgccaggccgcaggtgcagctggttgaatctggcggaggatctgttcaggctggcggctctctgagactgtcttgtggcgcttccggcaacatcagcagcagaaactgcatgggctggttcagacaggcccctggcaaagagagagaaggcgttgccgccatcggacaagtgaccggcagatcctactacgtggacagcgtgaagggcagattcaccatcagcctggacaacgccaagaacaccctgtacctccagatgaacacactgaagcccgaggacaccgccatgtactactgtgctgctgcccctggctgtctgctgtctgcacttagaagcgccgactacagaaactggggccagggaacccaagtgacagtgtctagtggtaccggcggaggcggatctggcggcggaggtagcggtggcggaggatctgaattcgagatcgtgctgacacagtctcccgccacactgtcactgtctccaggcgaaagagccacactgagctgtagagccagccagagcgtgtcctcttacctggcctggtatcagcagaagcctggacaggctccccggctgctgatctacgatgccagcaatagagccacaggcatccccgccagattttctggctctggcagcggcaccgatttcaccctgaccataagcagcctggaacctgaggacttcgccgtgtactactgccagcagagaagcgactggcccctgacatttggcggcggaacaaaggtggaaatcaaactcgaggacctgaagaacgtgttcccacctgaggtggccgtgttcgagcctagcgaggccgagatcagccacacccagaaagccaccctcgtgtgcctggctaccggcttctaccccgaccatgtggaactgtcttggtgggtcaacggcaaagaggtgcacagcggcgtgtgtaccgacccccagccactgaaagaacagcccgccctgaacgacagccggtactgcctgagcagcagactgagagtgtccgccaccttctggcagaacccccggaaccacttcagatgccaggtgcagttctacggcctgagcgagaacgacgagtggacccaggacagagccaagcccgtgacccagatcgtgtctgccgaagcctggggcagagccgattgcggctttaccagcgagagctaccagcagggcgtgctgagcgccaccatcctgtacgagatcctgctgggcaaggccaccctgtacgccgtgctggtgtctgccctggtgctgatggctatggtcaagcggaaggacagccggggaagggccaagcgatctggatctggagcaacaaacttctcactactcaaacaagcaggtgacgtggaggagaatcccgggcctactagtgccaccatggactggatttggcgcatccttttccttgtcggcgctgctaccggcgcccattccgggcccgaagtgcaactggttgaatccggtggcggcctggtgcaagcaggcggatctctcagacttagctgtgccgcctccggcagaaccttcacaatgggatggtttaggcaggctccagggaaagagagagagttcgtcgccgccatctctctgtctcccacactggcctactacgccgactctgtgaaaggccggttcaccatctccagagataatgccaagaacaccgtggtgctgcaaatgaactctctgaaacccgaggatacagccctgtactattgtgccgctgaccggaagtccgtgatgagcatcagacccgattactggggacagggcacacaagtcacagtgtcctctggatccggcggcggaggatctggcggaggcggatctgggggcggaggctctttcgaacaagttcagctggttcagagcggagccgaagtgaagaaacctggcagcagcgtgaaggtgtcctgcaaagcaagcggcggcacctttagctcctacgccatccactgggttcgacaggcaccaggacaaggactggaatggatgggcagaatcatccccatcgagggcagagcctactacgcccagaaattccagggcagagtgaccatcaccgccgacgagtctacaagcaccgcctacatggaactgagcagcctgagaagcgaggataccgctgtgtactattgcgccagaggccggtacagctacagatattggttcgactactggggccagggcaccctggttacagtctcttctacgcgtatccagaaccctgatcctgccgtgtaccagctgcgggatagcaagagcagcgacaagagcgtgtgtctgttcaccgacttcgacagccagaccaacgtgtcccagagcaaggactccgacgtgtacatcaccgataagtgcgtgctggacatgcggagcatggacttcaagagcaactccgccgtggcctggtccaacaagtccgatttcgcctgcgccaacgccttcaacaacagcattatccccgaggacacattcttcccaagccccgagagcagctgcgacgtgaagctggtggaaaagagcttcgagacagacaccaacctgaacttccagaacctgagcgtgatcggcttcagaatcctgctgctgaaagtggccggctttaacctgctgatgaccctgcggctgtggtccagctaa

SEQ ID NO: 39811 - DNA, 2301 bp, synthetic construct
  source 1..2301: mol_type = other DNA
atggccttaccagtgaccgccttgctcctgccgctggccttgctgctccacgccgccaggccgcaggtgcagctggttgaatctggcggaggatctgttcaggctggcggctctctgagactgtcttgtggcgcttccggcaacatcagcagcagaaactgcatgggctggttcagacaggcccctggcaaagagagagaaggcgttgccgccatcggacaagtgaccggcagatcctactacgtggacagcgtgaagggcagattcaccatcagcctggacaacgccaagaacaccctgtacctccagatgaacacactgaagcccgaggacaccgccatgtactactgtgctgctgcccctggctgtctgctgtctgcacttagaagcgccgactacagaaactggggccagggaacccaagtgacagtgtctagtggtaccggcggaggcggatctggcggcggaggtagcggtggcggaggatctgaattcgagatcgtgctgacacagtctcccgccacactgtcactgtctccaggcgaaagagccacactgagctgtagagccagccagagcgtgtcctcttacctggcctggtatcagcagaagcctggacaggctccccggctgctgatctacgatgccagcaatagagccacaggcatccccgccagattttctggctctggcagcggcaccgatttcaccctgaccataagcagcctggaacctgaggacttcgccgtgtactactgccagcagagaagcgactggcccctgacatttggcggcggaacaaaggtggaaatcaaactcgaggacctgaagaacgtgttcccacctgaggtggccgtgttcgagcctagcgaggccgagatcagccacacccagaaagccaccctcgtgtgcctggctaccggcttctaccccgaccatgtggaactgtcttggtgggtcaacggcaaagaggtgcacagcggcgtgtgtaccgacccccagccactgaaagaacagcccgccctgaacgacagccggtactgcctgagcagcagactgagagtgtccgccaccttctggcagaacccccggaaccacttcagatgccaggtgcagttctacggcctgagcgagaacgacgagtggacccaggacagagccaagcccgtgacccagatcgtgtctgccgaagcctggggcagagccgattgcggctttaccagcgagagctaccagcagggcgtgctgagcgccaccatcctgtacgagatcctgctgggcaaggccaccctgtacgccgtgctggtgtctgccctggtgctgatggctatggtcaagcggaaggacagccggggaagggccaagcgatctggatctggagcaacaaacttctcactactcaaacaagcaggtgacgtggaggagaatcccgggcctactagtgccaccatggactggatttggcgcatccttttccttgtcggcgctgctaccggcgcccattccttcgaacaagttcagctggttcagagcggagccgaagtgaagaaacctggcagcagcgtgaaggtgtcctgcaaagcaagcggcggcacctttagctcctacgccatccactgggttcgacaggcaccaggacaaggactggaatggatgggcagaatcatccccatcgagggcagagcctactacgcccagaaattccagggcagagtgaccatcaccgccgacgagtctacaagcaccgcctacatggaactgagcagcctgagaagcgaggataccgctgtgtactattgcgccagaggccggtacagctacagatattggttcgactactggggccagggcaccctggttacagtctcttctacgcgtatccagaaccctgatcctgccgtgtaccagctgcgggatagcaagagcagcgacaagagcgtgtgtctgttcaccgacttcgacagccagaccaacgtgtcccagagcaaggactccgacgtgtacatcaccgataagtgcgtgctggacatgcggagcatggacttcaagagcaactccgccgtggcctggtccaacaagtccgatttcgcctgcgccaacgccttcaacaacagcattatccccgaggacacattcttcccaagccccgagagcagctgcgacgtgaagctggtggaaaagagcttcgagacagacaccaacctgaacttccagaacctgagcgtgatcggcttcagaatcctgctgctgaaagtggccggctttaacctgctgatgaccctgcggctgtggtccagctaa

SEQ ID NO: 39812 - DNA, 2301 bp, synthetic construct
  source 1..2301: mol_type = other DNA
atggccttaccagtgaccgccttgctcctgccgctggccttgctgctccacgccgccaggccgcaagttcagctggtggaaagcggtggtggcgttgtgcaacctggtggaagtctgaggctgagctgtgccgcttctggcctgagctttagcacctacactgtggcctggttcaggcaggctcccggaaagggtcttgaaggcgtggccgccattccttacaccagccagcacatggtgtacacagacagcgtcagaggccggttcaccatcagcagagacaactccaagaatacgctctatctccagatgaactctctgcgcgccgaagatacagccgtgtattactgcgccaccgacagacggcctggcacctctatgctggctatcaacggctacaacagatggggacagggaaccaccgtgaccgtgtcatctggtaccggcggaggcggatctggcggcggaggtagcggtggcggaggatctgaattcgagatcgtgctgacacagtctcccgccacactgtcactgtctccaggcgaaagagccacactgagctgtagagccagccagagcgtgtcctcttacctggcctggtatcagcagaagcctggacaggctccccggctgctgatctacgatgccagcaatagagccacaggcatccccgccagattttctggctctggcagcggcaccgatttcaccctgaccataagcagcctggaacctgaggacttcgccgtgtactactgccagcagagaagcgactggcccctgacatttggcggcggaacaaaggtggaaatcaaactcgaggacctgaagaacgtgttcccacctgaggtggccgtgttcgagcctagcgaggccgagatcagccacacccagaaagccaccctcgtgtgcctggctaccggcttctaccccgaccatgtggaactgtcttggtgggtcaacggcaaagaggtgcacagcggcgtgtgtaccgacccccagccactgaaagaacagcccgccctgaacgacagccggtactgcctgagcagcagactgagagtgtccgccaccttctggcagaacccccggaaccacttcagatgccaggtgcagttctacggcctgagcgagaacgacgagtggacccaggacagagccaagcccgtgacccagatcgtgtctgccgaagcctggggcagagccgattgcggctttaccagcgagagctaccagcagggcgtgctgagcgccaccatcctgtacgagatcctgctgggcaaggccaccctgtacgccgtgctggtgtctgccctggtgctgatggctatggtcaagcggaaggacagccggggaagggccaagcgatctggatctggagcaacaaacttctcactactcaaacaagcaggtgacgtggaggagaatcccgggcctactagtgccaccatggactggatttggcgcatccttttccttgtcggcgctgctaccggcgcccattccttcgaacaagttcagctggttcagagcggagccgaagtgaagaaacctggcagcagcgtgaaggtgtcctgcaaagcaagcggcggcacctttagctcctacgccatccactgggttcgacaggcaccaggacaaggactggaatggatgggcagaatcatccccatcgagggcagagcctactacgcccagaaattccagggcagagtgaccatcaccgccgacgagtctacaagcaccgcctacatggaactgagcagcctgagaagcgaggataccgctgtgtactattgcgccagaggccggtacagctacagatattggttcgactactggggccagggcaccctggttacagtctcttctacgcgtatccagaaccctgatcctgccgtgtaccagctgcgggatagcaagagcagcgacaagagcgtgtgtctgttcaccgacttcgacagccagaccaacgtgtcccagagcaaggactccgacgtgtacatcaccgataagtgcgtgctggacatgcggagcatggacttcaagagcaactccgccgtggcctggtccaacaagtccgatttcgcctgcgccaacgccttcaacaacagcattatccccgaggacacattcttcccaagccccgagagcagctgcgacgtgaagctggtggaaaagagcttcgagacagacaccaacctgaacttccagaacctgagcgtgatcggcttcagaatcctgctgctgaaagtggccggctttaacctgctgatgaccctgcggctgtggtccagctaa

SEQ ID NO: 39813 - DNA, 2298 bp, synthetic construct
  source 1..2298: mol_type = other DNA
atggccttaccagtgaccgccttgctcctgccgctggccttgctgctccacgccgccaggccggagatcgtgctgacacagtctcccgccacactgtcactgtctccaggcgaaagagccacactgagctgtagagccagccagagcgtgtcctcttacctggcctggtatcagcagaagcctggacaggctccccggctgctgatctacgatgccagcaatagagccacaggcatccccgccagattttctggctctggcagcggcaccgatttcaccctgaccataagcagcctggaacctgaggacttcgccgtgtactactgccagcagagaagcgactggcccctgacatttggcggcggaacaaaggtggaaatcaaactcgaggacctgaagaacgtgttcccacctgaggtggccgtgttcgagcctagcgaggccgagatcagccacacccagaaagccaccctcgtgtgcctggctaccggcttctaccccgaccatgtggaactgtcttggtgggtcaacggcaaagaggtgcacagcggcgtgtgtaccgacccccagccactgaaagaacagcccgccctgaacgacagccggtactgcctgagcagcagactgagagtgtccgccaccttctggcagaacccccggaaccacttcagatgccaggtgcagttctacggcctgagcgagaacgacgagtggacccaggacagagccaagcccgtgacccagatcgtgtctgccgaagcctggggcagagccgattgcggctttaccagcgagagctaccagcagggcgtgctgagcgccaccatcctgtacgagatcctgctgggcaaggccaccctgtacgccgtgctggtgtctgccctggtgctgatggctatggtcaagcggaaggacagccggggaagggccaagcgatctggatctggagcaacaaacttctcactactcaaacaagcaggtgacgtggaggagaatcccgggcctactagtaccatggactggatttggcgcatccttttccttgtcggcgctgctaccggcgcccattccgggccccaagttcagctggtggaaagcggtggtggcgttgtgcaacctggtggaagtctgaggctgagctgtgccgcttctggcctgagctttagcacctacactgtggcctggttcaggcaggctcccggaaagggtcttgaaggcgtggccgccattccttacaccagccagcacatggtgtacacagacagcgtcagaggccggttcaccatcagcagagacaactccaagaatacgctctatctccagatgaactctctgcgcgccgaagatacagccgtgtattactgcgccaccgacagacggcctggcacctctatgctggctatcaacggctacaacagatggggacagggaaccaccgtgaccgtgtcatctggatccggcggcggaggatctggcggaggcggatctgggggcggaggctctttcgaacaagttcagctggttcagagcggagccgaagtgaagaaacctggcagcagcgtgaaggtgtcctgcaaagcaagcggcggcacctttagctcctacgccatccactgggttcgacaggcaccaggacaaggactggaatggatgggcagaatcatccccatcgagggcagagcctactacgcccagaaattccagggcagagtgaccatcaccgccgacgagtctacaagcaccgcctacatggaactgagcagcctgagaagcgaggataccgctgtgtactattgcgccagaggccggtacagctacagatattggttcgactactggggccagggcaccctggttacagtctcttctacgcgtatccagaaccctgatcctgccgtgtaccagctgcgggatagcaagagcagcgacaagagcgtgtgtctgttcaccgacttcgacagccagaccaacgtgtcccagagcaaggactccgacgtgtacatcaccgataagtgcgtgctggacatgcggagcatggacttcaagagcaactccgccgtggcctggtccaacaagtccgatttcgcctgcgccaacgccttcaacaacagcattatccccgaggacacattcttcccaagccccgagagcagctgcgacgtgaagctggtggaaaagagcttcgagacagacaccaacctgaacttccagaacctgagcgtgatcggcttcagaatcctgctgctgaaagtggccggctttaacctgctgatgaccctgcggctgtggtccagctaa

SEQ ID NO: 39814 - DNA, 2304 bp, synthetic construct
  source 1..2304: mol_type = other DNA
atggccttaccagtgaccgccttgctcctgccgctggccttgctgctccacgccgccaggccggagatcgtgctgacacagtctcccgccacactgtcactgtctccaggcgaaagagccacactgagctgtagagccagccagagcgtgtcctcttacctggcctggtatcagcagaagcctggacaggctccccggctgctgatctacgatgccagcaatagagccacaggcatccccgccagattttctggctctggcagcggcaccgatttcaccctgaccataagcagcctggaacctgaggacttcgccgtgtactactgccagcagagaagcgactggcccctgacatttggcggcggaacaaaggtggaaatcaaactcgaggacctgaagaacgtgttcccacctgaggtggccgtgttcgagcctagcgaggccgagatcagccacacccagaaagccaccctcgtgtgcctggctaccggcttctaccccgaccatgtggaactgtcttggtgggtcaacggcaaagaggtgcacagcggcgtgtgtaccgacccccagccactgaaagaacagcccgccctgaacgacagccggtactgcctgagcagcagactgagagtgtccgccaccttctggcagaacccccggaaccacttcagatgccaggtgcagttctacggcctgagcgagaacgacgagtggacccaggacagagccaagcccgtgacccagatcgtgtctgccgaagcctggggcagagccgattgcggctttaccagcgagagctaccagcagggcgtgctgagcgccaccatcctgtacgagatcctgctgggcaaggccaccctgtacgccgtgctggtgtctgccctggtgctgatggctatggtcaagcggaaggacagccggggaagggccaagcgatctggatctggagcaacaaacttctcactactcaaacaagcaggtgacgtggaggagaatcccgggcctactagtaccatggactggatttggcgcatccttttccttgtcggcgctgctaccggcgcccattccgggcccgaggtgcagctggttgaatctggcggaggatctgttcaggctggcggctctctgagactgtcttgtgccgccagcggctacacctacagcatcaactgcatgggctggttcagacaggcccctggcaaagagagagaaggcgttgccgccatctctaccggcggaggcagaaccgattaccgggattctgtgaagggcagattcaccatcagccaggacaacgccaagaacaccgtgtacctccagatgaacagcctgaagcctgaggacaccgccatgtactactgtgccggcaagaccacctatcctggctacggatgtggcctgggcagaagcgcctacaattattggggccagggcacccaagtgaccgtgtcatctggatccggcggcggaggatctggcggaggcggatctgggggcggaggctctttcgaacaagttcagctggttcagagcggagccgaagtgaagaaacctggcagcagcgtgaaggtgtcctgcaaagcaagcggcggcacctttagctcctacgccatccactgggttcgacaggcaccaggacaaggactggaatggatgggcagaatcatccccatcgagggcagagcctactacgcccagaaattccagggcagagtgaccatcaccgccgacgagtctacaagcaccgcctacatggaactgagcagcctgagaagcgaggataccgctgtgtactattgcgccagaggccggtacagctacagatattggttcgactactggggccagggcaccctggttacagtctcttctacgcgtatccagaaccctgatcctgccgtgtaccagctgcgggatagcaagagcagcgacaagagcgtgtgtctgttcaccgacttcgacagccagaccaacgtgtcccagagcaaggactccgacgtgtacatcaccgataagtgcgtgctggacatgcggagcatggacttcaagagcaactccgccgtggcctggtccaacaagtccgatttcgcctgcgccaacgccttcaacaacagcattatccccgaggacacattcttcccaagccccgagagcagctgcgacgtgaagctggtggaaaagagcttcgagacagacaccaacctgaacttccagaacctgagcgtgatcggcttcagaatcctgctgctgaaagtggccggctttaacctgctgatgaccctgcggctgtggtccagctaa

SEQ ID NO: 39815 - DNA, 1860 bp, synthetic construct
  source 1..1860: mol_type = other DNA
atggccttaccagtgaccgccttgctcctgccgctggccttgctgctccacgccgccaggccggagatcgtgctgacacagtctcccgccacactgtcactgtctccaggcgaaagagccacactgagctgtagagccagccagagcgtgtcctcttacctggcctggtatcagcagaagcctggacaggctccccggctgctgatctacgatgccagcaatagagccacaggcatccccgccagattttctggctctggcagcggcaccgatttcaccctgaccataagcagcctggaacctgaggacttcgccgtgtactactgccagcagagaagcgactggcccctgacatttggcggcggaacaaaggtggaaatcaaactcgaggacctgaagcacgtgttcccacctgaggtggccgtgttcgagcctagcgacgccgagatctggcacacccagaaagccaccctcgtgtgcctggctaccggcttctaccccgaccatgtggaactgtcttggtgggtcaacggcaaagaggtgcacagcggcgtgtctaccgacccccagccactgaaagaacagcccgccctgaacgacagccggtactgcctgagcagcagactgagagtgtccgccaccttctggcagaacccccggaaccacttcagatgccaggtgcagttctacggcctgagcgagaacgacgagtggacccaggacagagccaagcccgtgacccagatcgtgtctgccgaagcctggggcagagccgattgcggctttaccagcgagagctaccagcagggcgtgctgagcgccaccatcctgtacgagatcctgctgggcaaggccaccctgtacgccgtgctggtgtctgccctggtgctgatggctatggtcaagcggaaggacagccggggaagggccaagcgatctggatctggagcaacaaacttctcactactcaaacaagcaggtgacgtggaggagaatcccgggcctactagtatggactggatttggcgcatccttttccttgtcggcgctgctaccggcgcgcattccttcgaacaagttcagctggttcagagcggagccgaagtgaagaaacctggcagcagcgtgaaggtgtcctgcaaagcaagcggcggcacctttagctcctacgccatccactgggttcgacaggcaccaggacaaggactggaatggatgggcagaatcatccccatcgagggcagagcctactacgcccagaaattccagggcagagtgaccatcaccgccgacgagtctacaagcaccgcctacatggaactgagcagcctgagaagcgaggataccgctgtgtactattgcgccagaggccggtacagctacagatattggttcgactactggggccagggcaccctggttacagtctcttctacgcgtatccagaaccctgatcctgccgtgtaccagctgcgggatagcaagagcagcgacaagagcgtgtgtctgttcaccgacttcgacagccagaccaacgtgtcccagagcaaggactccgacgtgtacatcaccgataagaccgtgctggacatgcggagcatggacttcaagagcaactccgccgtggcctggtccagcaagtccgatttcgcctgcgccaacgccttcaacaacagcattatccccgaggacacattcttcccaagccccgagatggcctgcgacgtgaagctggtggaaaagagcttcgagacagacaccaacctgaacttccagaacctgctcgtgatctggctgagaatcctgctgctgaaagtggccggctttaacctgctgatgaccctgcggctgtggtccagc

SEQ ID NO: 39816 - DNA, 1860 bp, synthetic construct
  source 1..1860: mol_type = other DNA
atggccttaccagtgaccgccttgctcctgccgctggccttgctgctccacgccgccaggccggagatcgtgctgacacagtctcccgccacactgtcactgtctccaggcgaaagagccacactgagctgtagagccagccagagcgtgtcctcttacctggcctggtatcagcagaagcctggacaggctccccggctgctgatctacgatgccagcaatagagccacaggcatccccgccagattttctggctctggcagcggcaccgatttcaccctgaccataagcagcctggaacctgaggacttcgccgtgtactactgccagcagagaagcgactggcccctgacatttggcggcggaacaaaggtggaaatcaaactcgaggacctgaagcacgtgttcccacctgaggtggccgtgttcgagcctagcgacgccgagatctggcacacccagaaagccaccctcgtgtgcctggctaccggcttctaccccgaccatgtggaactgtcttggtgggtcaacggcaaagaggtgcacagcggcgtgtctaccgacccccagccactgaaagaacagcccgccctgaacgacagccggtactgcctgagcagcagactgagagtgtccgccaccttctggcagaacccccggaaccacttcagatgccaggtgcagttctacggcctgagcgagaacgacgagtggacccaggacagagccaagcccgtgacccagatcgtgtctgccgaagcctggggcagagccgattgcggctttaccagcgagagctaccagcagggcgtgctgagcgccaccatcctgtacgagatcctgctgggcaaggccaccctgtacgccgtgctggtgtctgccctggtgctgatggctatggtcaagcggaaggacagccggggaagggccaagcgatctggatctggagcaacaaacttctcactactcaaacaagcaggtgacgtggaggagaatcccgggcctactagtatggactggatttggcgcatccttttccttgtcggcgctgctaccggcgcgcattccttcgaacaagttcagctggttcagagcggagccgaagtgaagaaacctggcagcagcgtgaaggtgtcctgcaaagcaagcggcggcacctttagctcctacgccatccactgggttcgacaggcaccaggacaaggactggaatggatgggcagaatcatccccatcgagggcagagcctactacgcccagaaattccagggcagagtgaccatcaccgccgacgagtctacaagcaccgcctacatggaactgagcagcctgagaagcgaggataccgctgtgtactattgcgccagaggccggtacagctacagatattggttcgactactggggccagggcaccctggttacagtctcttctacgcgtatccagaaccctgatcctgccgtgtaccagctgcgggatagcaagagcagcgacaagagcgtgtgtctgttcaccgacttcgacagccagaccaacgtgtcccagagcaaggactccgacgtgtacatcaccgataagaccgtgctggacatgcggagcatggacttcaagagcaactccgccgtggcctggtccaccaagtccgatttcgcctgcgccaacgccttcaacaacagcattatccccgaggacacattcttcccaagccccgaggtggtgtgcgacgtgaagctggtggaaaagagcttcgagacagacaccaacctgaacttccagaacctggtggtgatcggcgccagaatcctgctgctgaaagtggccggctttaacctgctgatgaccctgcggctgtggtccagc

SEQ ID NO: 39817 - DNA, 1860 bp, synthetic construct
  source 1..1860: mol_type = other DNA
atggccttaccagtgaccgccttgctcctgccgctggccttgctgctccacgccgccaggccggagatcgtgctgacacagtctcccgccacactgtcactgtctccaggcgaaagagccacactgagctgtagagccagccagagcgtgtcctcttacctggcctggtatcagcagaagcctggacaggctccccggctgctgatctacgatgccagcaatagagccacaggcatccccgccagattttctggctctggcagcggcaccgatttcaccctgaccataagcagcctggaacctgaggacttcgccgtgtactactgccagcagagaagcgactggcccctgacatttggcggcggaacaaaggtggaaatcaaactcgaggacctgaagaacgtgttcccacctgaggtggccgtgttcgagcctagcaaggccgagatcagcagaacccagaaagccaccctcgtgtgcctggctaccggcttctaccctcctcatgtggaactgtcttggtgggtcaacggcaaagaggtgcacgacggcgtgtgtaccgacccccagccactgaaagaacagcccgccctgaacgacagccggtactgcctgagcagcagactgagagtgtccgccaccttctggcagaacccccggaaccacttcagatgccaggtgcagttctacggcctgagcgagaacgacgagtggacccaggacagagccaagcccgtgacccagatcgtgtctgccgaagcctggggcagagccgattgcggctttaccagcgagagctaccagcagggcgtgctgagcgccaccatcctgtacgagatcctgctgggcaaggccaccctgtacgccgtgctggtgtctgccctggtgctgatggctatggtcaagcggaaggacagccggggaagggccaagcgatctggatctggagcaacaaacttctcactactcaaacaagcaggtgacgtggaggagaatcccgggcctactagtatggactggatttggcgcatccttttccttgtcggcgctgctaccggcgcgcattccttcgaacaagttcagctggttcagagcggagccgaagtgaagaaacctggcagcagcgtgaaggtgtcctgcaaagcaagcggcggcacctttagctcctacgccatccactgggttcgacaggcaccaggacaaggactggaatggatgggcagaatcatccccatcgagggcagagcctactacgcccagaaattccagggcagagtgaccatcaccgccgacgagtctacaagcaccgcctacatggaactgagcagcctgagaagcgaggataccgctgtgtactattgcgccagaggccggtacagctacagatattggttcgactactggggccagggcaccctggttacagtctcttctacgcgtatccagaaccctgatcctgccgtgtaccagctgcgggatagcaagagcagcgacaagttcgtgtgtctgttcaccgacttcgacagccagatcaacgtgtcccagagcaaggactccgacgtgtacatcaccgataagtgcgtgctggacatgcggagcatggacttcaagagcaactccgccgtggcctggtccaacaagtccgatttcacctgcgccaacgccttcaacaacagcattatccccgaggacacattcttcccaagccccgagagcagctgcgacgtgaagctggtggaaaagagcttcgagacagacaccaacctgaacttccagaacctgagcgtgatcggcttcagaatcctgctgctgaaagtggccggctttaacctgctgatgaccctgcggctgtggtccagc

SEQ ID NO: 39818 - DNA, 2286 bp, synthetic construct
  source 1..2286: mol_type = other DNA
atggccttaccagtgaccgccttgctcctgccgctggccttgctgctccacgccgccaggccggagatcgtgctgacacagtctcccgccacactgtcactgtctccaggcgaaagagccacactgagctgtagagccagccagagcgtgtcctcttacctggcctggtatcagcagaagcctggacaggctccccggctgctgatctacgatgccagcaatagagccacaggcatccccgccagattttctggctctggcagcggcaccgatttcaccctgaccataagcagcctggaacctgaggacttcgccgtgtactactgccagcagagaagcgactggcccctgacatttggcggcggaacaaaggtggaaatcaaactcgaggacctgaagaacgtgttcccacctgaggtggccgtgttcgagcctagcgaggccgagatcagccacacccagaaagccaccctcgtgtgcctggctaccggcttctaccccgaccatgtggaactgtcttggtgggtcaacggcaaagaggtgcacagcggcgtgtgtaccgacccccagccactgaaagaacagcccgccctgaacgacagccggtactgcctgagcagcagactgagagtgtccgccaccttctggcagaacccccggaaccacttcagatgccaggtgcagttctacggcctgagcgagaacgacgagtggacccaggacagagccaagcccgtgacccagatcgtgtctgccgaagcctggggcagagccgattgcggctttaccagcgagagctaccagcagggcgtgctgagcgccaccatcctgtacgagatcctgctgggcaaggccaccctgtacgccgtgctggtgtctgccctggtgctgatggctatggtcaagcggaaggacagccggggaagggccaagcgatctggatctggagcaacaaacttctcactactcaaacaagcaggtgacgtggaggagaatcccgggcctactagtaccatggactggatttggcgcatccttttccttgtcggcgctgctaccggcgcccattccgggccccaggtgcagctccaagaaagcggacccggactggttaagccctctcagaccctgtctctgacctgcacagttagcggagccagcattaccacaggcgagtattattggaattggtttcggcagccaccaggcaaggggcttgagtggatgggtgctattgctgcctctggcagcaccacctactctcccagctttgagagcagaacctccatcagccgggacacctccaaaaaccagttctctctgaagctgtcctccgtgaccgctgctgacaccgccgtctattattgtggccggtctttcggcgtggcagctgtgaccacaggacagaacagaggccagggaacacttgtgaccgtgtcctctggatccggcggcggaggatctggcggaggcggatctgggggcggaggctctttcgaacaagttcagctggttcagagcggagccgaagtgaagaaacctggcagcagcgtgaaggtgtcctgcaaagcaagcggcggcacctttagctcctacgccatccactgggttcgacaggcaccaggacaaggactggaatggatgggcagaatcatccccatcgagggcagagcctactacgcccagaaattccagggcagagtgaccatcaccgccgacgagtctacaagcaccgcctacatggaactgagcagcctgagaagcgaggataccgctgtgtactattgcgccagaggccggtacagctacagatattggttcgactactggggccagggcaccctggttacagtctcttctacgcgtatccagaaccctgatcctgccgtgtaccagctgcgggatagcaagagcagcgacaagagcgtgtgtctgttcaccgacttcgacagccagaccaacgtgtcccagagcaaggactccgacgtgtacatcaccgataagtgcgtgctggacatgcggagcatggacttcaagagcaactccgccgtggcctggtccaacaagtccgatttcgcctgcgccaacgccttcaacaacagcattatccccgaggacacattcttcccaagccccgagagcagctgcgacgtgaagctggtggaaaagagcttcgagacagacaccaacctgaacttccagaacctgagcgtgatcggcttcagaatcctgctgctgaaagtggccggctttaacctgctgatgaccctgcggctgtggtccagc

SEQ ID NO: 39819 - DNA, 2709 bp, synthetic construct
  source 1..2709: mol_type = other DNA
atggccttaccagtgaccgccttgctcctgccgctggccttgctgctccacgccgccaggccgcaggttcagctgcaagagtctggccctggcctggtcaagcctagccaaacactgagcctgacctgtaccgtgtctggcggctctatcaccaccggcgagttctactggaactggttcagacagcctcctggcaaaggactggaatggatgggagccattgccgccagcggcagcacaacatacagccctagcttcgagagccggaccagcatcagcagagacaccagcaagaatcagttcagcctgaagctgagcagcgtgacagccgccgatacagccgtgtattactgcggcagatcctttggagtggccgccgtgacaaccggccagaatagaggacagggcaccctggtcacagtgtctagcggtaccggcggaggcggatctggcggcggaggtagcggtggcggaggatctgaattcgagatcgtgctgacacagtctcccgccacactgtcactgtctccaggcgaaagagccacactgagctgtagagccagccagagcgtgtcctcttacctggcctggtatcagcagaagcctggacaggctccccggctgctgatctacgatgccagcaatagagccacaggcatccccgccagattttctggctctggcagcggcaccgatttcaccctgaccataagcagcctggaacctgaggacttcgccgtgtactactgccagcagagaagcgactggcccctgacatttggcggcggaacaaaggtggaaatcaaactcgagatccagaaccctgatcctgccgtgtaccagctgcgggatagcaagagcagcgacaagagcgtgtgtctgttcaccgacttcgacagccagaccaacgtgtcccagagcaaggactccgacgtgtacatcaccgataagtgcgtgctggacatgcggagcatggacttcaagagcaactccgccgtggcctggtccaacaagtccgatttcgcctgcgccaacgccttcaacaacagcattatccccgaggacacattcttcccaagcagcgacgtgccctgcgacgtgaagctggtggaaaagagcttcgagacagacaccaacctgaacttccagaacctgagcgtgatcggcttcagaatcctgctgctgaaagtggccggctttaacctgctgatgaccctgcggctgtggtccagccgcgccaagagaagcggatctggcgtgaagcagaccctgaatttcgacctgctgaagctggctggcgacgtggaatccaacccaggccctactagtaccatggactggatttggcgcatccttttccttgtcggcgctgctaccggcgcccattccgggcccgaagtgcaactggttgaatccggtggcggcctggtgcaacccggcggatctctcagacttagctgtgccgcctccggcagaaccttcacaatgggatggtacaggcaggctccagggaaagagagagagttcgtcgccgccatctctctgtctcccacactggcctactacgccgactctgtgaaaggccggttcaccatctccagagataatagcaagaacaccgtggtgctgcaaatgaactctctgagagccgaggatacagccctgtactattgtgccgctgaccggaagtccgtgatgagcatcagacccgattactggggacagggcacactggtcacagtgtctagtggatccggcggcggaggatctggcggaggcggatctgggggcggaggctctttcgaacaagttcagctggttcagagcggagccgaagtgaagaaacctggcagcagcgtgaaggtgtcctgcaaagcaagcggcggcacctttagctcctacgccatccactgggttcgacaggcaccaggacaaggactggaatggatgggcagaatcatccccatcgagggcagagcctactacgcccagaaattccagggcagagtgaccatcaccgccgacgagtctacaagcaccgcctacatggaactgagcagcctgagaagcgaggataccgctgtgtactattgcgccagaggccggtacagctacagatattggttcgactactggggccagggcaccctggttacagtctcttctacgcgtgaggacctgaagaacgtgttcccacctgaggtggccgtgttcgagcctagcaaggccgagatcgcccacacccagaaagccaccctcgtgtgcctggctaccggcttctaccccgaccatgtggaactgtcttggtgggtcaacggcaaagaggtgcacagcggcgtgtgtaccgacccccagccactgaaagaacagcccgccctgaacgacagccggtactgcctgagcagcagactgagagtgtccgccaccttctggcagaacccccggaaccacttcagatgccaggtgcagttctacggcctgagcgagaacgacgagtggacccaggacagagccaagcccgtgacccagatcgtgtctgccgaagcctggggcagagccgattgcggcatcaccagcgccagctaccaccagggcgtgctgagcgccaccatcctgtacgagatcctgctgggcaaggccaccctgtacgccgtgctggtgtctgccctggtgctgatggctatggtcaagcggaaggacagccgggga

SEQ ID NO: 39820 - DNA, 2298 bp, synthetic construct
  source 1..2298: mol_type = other DNA
atggccttaccagtgaccgccttgctcctgccgctggccttgctgctccacgccgccaggccgcaggttcagctgcaagagtctggccctggcctggtcaagcctagccaaacactgagcctgacctgtaccgtgtctggcggctctatcaccaccggcgagttctactggaactggttcagacagcctcctggcaaaggactggaatggatgggagccattgccgccagcggcagcacaacatacagccctagcttcgagagccggaccagcatcagcagagacaccagcaagaatcagttcagcctgaagctgagcagcgtgacagccgccgatacagccgtgtattactgcggcagatcctttggagtggccgccgtgacaaccggccagaatagaggacagggcaccctggtcacagtgtctagcggtaccggcggaggcggatctggcggcggaggtagcggtggcggaggatctgaattcgagatcgtgctgacacagtctcccgccacactgtcactgtctccaggcgaaagagccacactgagctgtagagccagccagagcgtgtcctcttacctggcctggtatcagcagaagcctggacaggctccccggctgctgatctacgatgccagcaatagagccacaggcatccccgccagattttctggctctggcagcggcaccgatttcaccctgaccataagcagcctggaacctgaggacttcgccgtgtactactgccagcagagaagcgactggcccctgacatttggcggcggaacaaaggtggaaatcaaactcgagatccagaaccctgatcctgccgtgtaccagctgcgggatagcaagagcagcgacaagagcgtgtgtctgttcaccgacttcgacagccagaccaacgtgtcccagagcaaggactccgacgtgtacatcaccgataagtgcgtgctggacatgcggagcatggacttcaagagcaactccgccgtggcctggtccaacaagtccgatttcgcctgcgccaacgccttcaacaacagcattatccccgaggacacattcttcccaagcagcgacgtgccctgcgacgtgaagctggtggaaaagagcttcgagacagacaccaacctgaacttccagaacctgagcgtgatcggcttcagaatcctgctgctgaaagtggccggctttaacctgctgatgaccctgcggctgtggtccagccgcgccaagagaagcggatctggcgtgaagcagaccctgaatttcgacctgctgaagctggctggcgacgtggaatccaacccaggccctactagtaccatggactggatttggcgcatccttttccttgtcggcgctgctaccggcgcccattccttcgaacaagttcagctggttcagagcggagccgaagtgaagaaacctggcagcagcgtgaaggtgtcctgcaaagcaagcggcggcacctttagctcctacgccatccactgggttcgacaggcaccaggacaaggactggaatggatgggcagaatcatccccatcgagggcagagcctactacgcccagaaattccagggcagagtgaccatcaccgccgacgagtctacaagcaccgcctacatggaactgagcagcctgagaagcgaggataccgctgtgtactattgcgccagaggccggtacagctacagatattggttcgactactggggccagggcaccctggttacagtctcttctacgcgtgaggacctgaagaacgtgttcccacctgaggtggccgtgttcgagcctagcaaggccgagatcgcccacacccagaaagccaccctcgtgtgcctggctaccggcttctaccccgaccatgtggaactgtcttggtgggtcaacggcaaagaggtgcacagcggcgtgtgtaccgacccccagccactgaaagaacagcccgccctgaacgacagccggtactgcctgagcagcagactgagagtgtccgccaccttctggcagaacccccggaaccacttcagatgccaggtgcagttctacggcctgagcgagaacgacgagtggacccaggacagagccaagcccgtgacccagatcgtgtctgccgaagcctggggcagagccgattgcggcatcaccagcgccagctaccaccagggcgtgctgagcgccaccatcctgtacgagatcctgctgggcaaggccaccctgtacgccgtgctggtgtctgccctggtgctgatggctatggtcaagcggaaggacagccgggga

SEQ ID NO: 39821 - DNA, 2697 bp, synthetic construct
  source 1..2697: mol_type = other DNA
atggccttaccagtgaccgccttgctcctgccgctggccttgctgctccacgccgccaggccggaagtgcagctggttgaatctggcggaggactggttcaggctggcggatctctgagactgtcttgtgccgccagcggcagaacctttagcatgggctggtttagacaggcccctggcaaagagagagagttcgtcgccgccatcacatactctggcggcagcccttactacgccgactctgtgaagggcagattcaccatcagccgggacaacgccaagaacaccgtgtacctccagatgaacagcctgaagcctgaggacaccgccgtgtactactgcgccgccaatccaacatacggcagcgactggaacgccgagaattggggccagggaacccaagtgacagtgtctagcggtaccggcggaggcggatctggcggcggaggtagcggtggcggaggatctgaattcgagatcgtgctgacacagtctcccgccacactgtcactgtctccaggcgaaagagccacactgagctgtagagccagccagagcgtgtcctcttacctggcctggtatcagcagaagcctggacaggctccccggctgctgatctacgatgccagcaatagagccacaggcatccccgccagattttctggctctggcagcggcaccgatttcaccctgaccataagcagcctggaacctgaggacttcgccgtgtactactgccagcagagaagcgactggcccctgacatttggcggcggaacaaaggtggaaatcaaactcgaggacctgaagaacgtgttcccacctgaggtggccgtgttcgagcctagcgaggccgagatcagccacacccagaaagccaccctcgtgtgcctggctaccggcttctaccccgaccatgtggaactgtcttggtgggtcaacggcaaagaggtgcacagcggcgtgtgtaccgacccccagccactgaaagaacagcccgccctgaacgacagccggtactgcctgagcagcagactgagagtgtccgccaccttctggcagaacccccggaaccacttcagatgccaggtgcagttctacggcctgagcgagaacgacgagtggacccaggacagagccaagcccgtgacccagatcgtgtctgccgaagcctggggcagagccgattgcggctttaccagcgagagctaccagcagggcgtgctgagcgccaccatcctgtacgagatcctgctgggcaaggccaccctgtacgccgtgctggtgtctgccctggtgctgatggctatggtcaagcggaaggacagccggggaagggccaagcgatctggatctggagcaacaaacttctcactactcaaacaagcaggtgacgtggaggagaatcccgggcctactagtaccatggactggatttggcgcatccttttccttgtcggcgctgctaccggcgcccattccgggccccaggtgcagctccaagaaagcggacccggactggttaagccctctcagaccctgtctctgacctgcacagttagcggagccagcattaccacaggcgagtattattggaattggtttcggcagccaccaggcaaggggcttgagtggatgggtgctattgctgcctctggcagcaccacctactctcccagctttgagagcagaacctccatcagccgggacacctccaaaaaccagttctctctgaagctgtcctccgtgaccgctgctgacaccgccgtctattattgtggccggtctttcggcgtggcagctgtgaccacaggacagaacagaggccagggaacacttgtgaccgtgtcctctggatccggcggcggaggatctggcggaggcggatctgggggcggaggctctttcgaacaagttcagctggttcagagcggagccgaagtgaagaaacctggcagcagcgtgaaggtgtcctgcaaagcaagcggcggcacctttagctcctacgccatccactgggttcgacaggcaccaggacaaggactggaatggatgggcagaatcatccccatcgagggcagagcctactacgcccagaaattccagggcagagtgaccatcaccgccgacgagtctacaagcaccgcctacatggaactgagcagcctgagaagcgaggataccgctgtgtactattgcgccagaggccggtacagctacagatattggttcgactactggggccagggcaccctggttacagtctcttctacgcgtatccagaaccctgatcctgccgtgtaccagctgcgggatagcaagagcagcgacaagagcgtgtgtctgttcaccgacttcgacagccagaccaacgtgtcccagagcaaggactccgacgtgtacatcaccgataagtgcgtgctggacatgcggagcatggacttcaagagcaactccgccgtggcctggtccaacaagtccgatttcgcctgcgccaacgccttcaacaacagcattatccccgaggacacattcttcccaagccccgagagcagctgcgacgtgaagctggtggaaaagagcttcgagacagacaccaacctgaacttccagaacctgagcgtgatcggcttcagaatcctgctgctgaaagtggccggctttaacctgctgatgaccctgcggctgtggtccagc

SEQ ID NO: 39822 - DNA, 2718 bp, synthetic construct
  source 1..2718: mol_type = other DNA
atggccttaccagtgaccgccttgctcctgccgctggccttgctgctccacgccgccaggccggaagtgcagctggttgaatctggcggaggactggttcaggctggcggatctctgagactgtcttgtgccgccagcggcagaacctttagcatgggctggtttagacaggcccctggcaaagagagagagttcgtcgccgccatcacatactctggcggcagcccttactacgccgactctgtgaagggcagattcaccatcagccgggacaacgccaagaacaccgtgtacctccagatgaacagcctgaagcctgaggacaccgccgtgtactactgcgccgccaatccaacatacggcagcgactggaacgccgagaattggggccagggaacccaagtgacagtgtctagcggtaccggcggaggcggatctggcggcggaggtagcggtggcggaggatctgaattcgagatcgtgctgacacagtctcccgccacactgtcactgtctccaggcgaaagagccacactgagctgtagagccagccagagcgtgtcctcttacctggcctggtatcagcagaagcctggacaggctccccggctgctgatctacgatgccagcaatagagccacaggcatccccgccagattttctggctctggcagcggcaccgatttcaccctgaccataagcagcctggaacctgaggacttcgccgtgtactactgccagcagagaagcgactggcccctgacatttggcggcggaacaaaggtggaaatcaaactcgagatccagaaccctgatcctgccgtgtaccagctgcgggatagcaagagcagcgacaagagcgtgtgtctgttcaccgacttcgacagccagaccaacgtgtcccagagcaaggactccgacgtgtacatcaccgataagtgcgtgctggacatgcggagcatggacttcaagagcaactccgccgtggcctggtccaacaagtccgatttcgcctgcgccaacgccttcaacaacagcattatccccgaggacacattcttcccaagcagcgacgtgccctgcgacgtgaagctggtggaaaagagcttcgagacagacaccaacctgaacttccagaacctgagcgtgatcggcttcagaatcctgctgctgaaagtggccggctttaacctgctgatgaccctgcggctgtggtccagccgcgccaagagaagcggatctggcgtgaagcagaccctgaatttcgacctgctgaagctggctggcgacgtggaatccaacccaggccctactagtaccatggactggatttggcgcatccttttccttgtcggcgctgctaccggcgcccattccgggccccaggtgcagctggttgaatctggcggaggactggttcagcctggcggatctctgagactgtcttgtgccgccagcggcaacatcaacagcagaaactgcatgggctggttcagacaggcccctggcaagggaagagaaggcgtggcagctatcggccaagtgaccggcagaacctactacgtggacagcgtgaagggcagattcaccatcagcctggacaacagcaagaacaccctgtacctccagatgaacagcctgagagccgaggacaccgccgtgtactattgtgctgctgcccctggctgtctgctgtctgcacttagaagcgccgactacagaaactggggccagggcacactggtcaccgtttcttctggatccggcggcggaggatctggcggaggcggatctgggggcggaggctctttcgaacaagttcagctggttcagagcggagccgaagtgaagaaacctggcagcagcgtgaaggtgtcctgcaaagcaagcggcggcacctttagctcctacgccatccactgggttcgacaggcaccaggacaaggactggaatggatgggcagaatcatccccatcgagggcagagcctactacgcccagaaattccagggcagagtgaccatcaccgccgacgagtctacaagcaccgcctacatggaactgagcagcctgagaagcgaggataccgctgtgtactattgcgccagaggccggtacagctacagatattggttcgactactggggccagggcaccctggttacagtctcttctacgcgtgaggacctgaagaacgtgttcccacctgaggtggccgtgttcgagcctagcaaggccgagatcgcccacacccagaaagccaccctcgtgtgcctggctaccggcttctaccccgaccatgtggaactgtcttggtgggtcaacggcaaagaggtgcacagcggcgtgtgtaccgacccccagccactgaaagaacagcccgccctgaacgacagccggtactgcctgagcagcagactgagagtgtccgccaccttctggcagaacccccggaaccacttcagatgccaggtgcagttctacggcctgagcgagaacgacgagtggacccaggacagagccaagcccgtgacccagatcgtgtctgccgaagcctggggcagagccgattgcggcatcaccagcgccagctaccaccagggcgtgctgagcgccaccatcctgtacgagatcctgctgggcaaggccaccctgtacgccgtgctggtgtctgccctggtgctgatggctatggtcaagcggaaggacagccgggga

SEQ ID NO: 39823 - DNA, 2706 bp, synthetic construct
  source 1..2706: mol_type = other DNA
atggccttaccagtgaccgccttgctcctgccgctggccttgctgctccacgccgccaggccggaagtgcagctggttgaatctggcggaggactggttcaggctggcggatctctgagactgtcttgtgccgccagcggcagaacctttagcatgggctggtttagacaggcccctggcaaagagagagagttcgtcgccgccatcacatactctggcggcagcccttactacgccgactctgtgaagggcagattcaccatcagccgggacaacgccaagaacaccgtgtacctccagatgaacagcctgaagcctgaggacaccgccgtgtactactgcgccgccaatccaacatacggcagcgactggaacgccgagaattggggccagggaacccaagtgacagtgtctagcggtaccggcggaggcggatctggcggcggaggtagcggtggcggaggatctgaattcgagatcgtgctgacacagtctcccgccacactgtcactgtctccaggcgaaagagccacactgagctgtagagccagccagagcgtgtcctcttacctggcctggtatcagcagaagcctggacaggctccccggctgctgatctacgatgccagcaatagagccacaggcatccccgccagattttctggctctggcagcggcaccgatttcaccctgaccataagcagcctggaacctgaggacttcgccgtgtactactgccagcagagaagcgactggcccctgacatttggcggcggaacaaaggtggaaatcaaactcgaggacctgaagaacgtgttcccacctgaggtggccgtgttcgagcctagcgaggccgagatcagccacacccagaaagccaccctcgtgtgcctggctaccggcttctaccccgaccatgtggaactgtcttggtgggtcaacggcaaagaggtgcacagcggcgtgtgtaccgacccccagccactgaaagaacagcccgccctgaacgacagccggtactgcctgagcagcagactgagagtgtccgccaccttctggcagaacccccggaaccacttcagatgccaggtgcagttctacggcctgagcgagaacgacgagtggacccaggacagagccaagcccgtgacccagatcgtgtctgccgaagcctggggcagagccgattgcggctttaccagcgagagctaccagcagggcgtgctgagcgccaccatcctgtacgagatcctgctgggcaaggccaccctgtacgccgtgctggtgtctgccctggtgctgatggctatggtcaagcggaaggacagccggggaagggccaagcgatctggatctggagcaacaaacttctcactactcaaacaagcaggtgacgtggaggagaatcccgggcctactagtaccatggactggatttggcgcatccttttccttgtcggcgctgctaccggcgcccattccgggccccaggtgcagctggttgaatctggcggaggactggttcagcctggcggatctctgagactgtcttgtgccgccagcggcaacatcaacagcagaaactgcatgggctggttcagacaggcccctggcaagggaagagaaggcgtggcagctatcggccaagtgaccggcagaacctactacgtggacagcgtgaagggcagattcaccatcagcctggacaacagcaagaacaccctgtacctccagatgaacagcctgagagccgaggacaccgccgtgtactattgtgctgctgcccctggctgtctgctgtctgcacttagaagcgccgactacagaaactggggccagggcacactggtcaccgtttcttctggatccggcggcggaggatctggcggaggcggatctgggggcggaggctctttcgaacaagttcagctggttcagagcggagccgaagtgaagaaacctggcagcagcgtgaaggtgtcctgcaaagcaagcggcggcacctttagctcctacgccatccactgggttcgacaggcaccaggacaaggactggaatggatgggcagaatcatccccatcgagggcagagcctactacgcccagaaattccagggcagagtgaccatcaccgccgacgagtctacaagcaccgcctacatggaactgagcagcctgagaagcgaggataccgctgtgtactattgcgccagaggccggtacagctacagatattggttcgactactggggccagggcaccctggttacagtctcttctacgcgtatccagaaccctgatcctgccgtgtaccagctgcgggatagcaagagcagcgacaagagcgtgtgtctgttcaccgacttcgacagccagaccaacgtgtcccagagcaaggactccgacgtgtacatcaccgataagtgcgtgctggacatgcggagcatggacttcaagagcaactccgccgtggcctggtccaacaagtccgatttcgcctgcgccaacgccttcaacaacagcattatccccgaggacacattcttcccaagccccgagagcagctgcgacgtgaagctggtggaaaagagcttcgagacagacaccaacctgaacttccagaacctgagcgtgatcggcttcagaatcctgctgctgaaagtggccggctttaacctgctgatgaccctgcggctgtggtccagc

SEQ ID NO: 39824 - DNA, 2706 bp, synthetic construct
  source 1..2706: mol_type = other DNA
atggccttaccagtgaccgccttgctcctgccgctggccttgctgctccacgccgccaggccggaagtgcaactggttgaatccggtggcggcctggtgcaagcaggcggatctctcagacttagctgtgccgcctccggcagaaccttcacaatgggatggtttaggcaggctccagggaaagagagagagttcgtcgccgccatctctctgtctcccacactggcctactacgccgactctgtgaaaggccggttcaccatctccagagataatgccaagaacaccgtggtgctgcaaatgaactctctgaaacccgaggatacagccctgtactattgtgccgctgaccggaagtccgtgatgagcatcagacccgattactggggacagggcacacaagtcacagtgtcctctggtaccggcggaggcggatctggcggcggaggtagcggtggcggaggatctgaattcgagatcgtgctgacacagtctcccgccacactgtcactgtctccaggcgaaagagccacactgagctgtagagccagccagagcgtgtcctcttacctggcctggtatcagcagaagcctggacaggctccccggctgctgatctacgatgccagcaatagagccacaggcatccccgccagattttctggctctggcagcggcaccgatttcaccctgaccataagcagcctggaacctgaggacttcgccgtgtactactgccagcagagaagcgactggcccctgacatttggcggcggaacaaaggtggaaatcaaactcgaggacctgaagaacgtgttcccacctgaggtggccgtgttcgagcctagcgaggccgagatcagccacacccagaaagccaccctcgtgtgcctggctaccggcttctaccccgaccatgtggaactgtcttggtgggtcaacggcaaagaggtgcacagcggcgtgtgtaccgacccccagccactgaaagaacagcccgccctgaacgacagccggtactgcctgagcagcagactgagagtgtccgccaccttctggcagaacccccggaaccacttcagatgccaggtgcagttctacggcctgagcgagaacgacgagtggacccaggacagagccaagcccgtgacccagatcgtgtctgccgaagcctggggcagagccgattgcggctttaccagcgagagctaccagcagggcgtgctgagcgccaccatcctgtacgagatcctgctgggcaaggccaccctgtacgccgtgctggtgtctgccctggtgctgatggctatggtcaagcggaaggacagccggggaagggccaagcgatctggatctggagcaacaaacttctcactactcaaacaagcaggtgacgtggaggagaatcccgggcctactagtaccatggactggatttggcgcatccttttccttgtcggcgctgctaccggcgcccattccgggccccaggtgcagctggttgaatctggcggaggactggttcagcctggcggatctctgagactgtcttgtgccgccagcggcaacatcaacagcagaaactgcatgggctggttcagacaggcccctggcaagggaagagaaggcgtggcagctatcggccaagtgaccggcagaacctactacgtggacagcgtgaagggcagattcaccatcagcctggacaacagcaagaacaccctgtacctccagatgaacagcctgagagccgaggacaccgccgtgtactattgtgctgctgcccctggctgtctgctgtctgcacttagaagcgccgactacagaaactggggccagggcacactggtcaccgtttcttctggatccggcggcggaggatctggcggaggcggatctgggggcggaggctctttcgaacaagttcagctggttcagagcggagccgaagtgaagaaacctggcagcagcgtgaaggtgtcctgcaaagcaagcggcggcacctttagctcctacgccatccactgggttcgacaggcaccaggacaaggactggaatggatgggcagaatcatccccatcgagggcagagcctactacgcccagaaattccagggcagagtgaccatcaccgccgacgagtctacaagcaccgcctacatggaactgagcagcctgagaagcgaggataccgctgtgtactattgcgccagaggccggtacagctacagatattggttcgactactggggccagggcaccctggttacagtctcttctacgcgtatccagaaccctgatcctgccgtgtaccagctgcgggatagcaagagcagcgacaagagcgtgtgtctgttcaccgacttcgacagccagaccaacgtgtcccagagcaaggactccgacgtgtacatcaccgataagtgcgtgctggacatgcggagcatggacttcaagagcaactccgccgtggcctggtccaacaagtccgatttcgcctgcgccaacgccttcaacaacagcattatccccgaggacacattcttcccaagccccgagagcagctgcgacgtgaagctggtggaaaagagcttcgagacagacaccaacctgaacttccagaacctgagcgtgatcggcttcagaatcctgctgctgaaagtggccggctttaacctgctgatgaccctgcggctgtggtccagc

SEQ ID NO: 39825 - DNA, 2718 bp, synthetic construct
  source 1..2718: mol_type = other DNA
atggccttaccagtgaccgccttgctcctgccgctggccttgctgctccacgccgccaggccgcaggttcagctgcaagagtctggccctggcctggtcaagcctagccaaacactgagcctgacctgtaccgtgtctggcggctctatcaccaccggcgagttctactggaactggttcagacagcctcctggcaaaggactggaatggatgggagccattgccgccagcggcagcacaacatacagccctagcttcgagagccggaccagcatcagcagagacaccagcaagaatcagttcagcctgaagctgagcagcgtgacagccgccgatacagccgtgtattactgcggcagatcctttggagtggccgccgtgacaaccggccagaatagaggacagggcaccctggtcacagtgtctagcggtaccggcggaggcggatctggcggcggaggtagcggtggcggaggatctgaattcgagatcgtgctgacacagtctcccgccacactgtcactgtctccaggcgaaagagccacactgagctgtagagccagccagagcgtgtcctcttacctggcctggtatcagcagaagcctggacaggctccccggctgctgatctacgatgccagcaatagagccacaggcatccccgccagattttctggctctggcagcggcaccgatttcaccctgaccataagcagcctggaacctgaggacttcgccgtgtactactgccagcagagaagcgactggcccctgacatttggcggcggaacaaaggtggaaatcaaactcgaggacctgaagaacgtgttcccacctgaggtggccgtgttcgagcctagcgaggccgagatcagccacacccagaaagccaccctcgtgtgcctggctaccggcttctaccccgaccatgtggaactgtcttggtgggtcaacggcaaagaggtgcacagcggcgtgtgtaccgacccccagccactgaaagaacagcccgccctgaacgacagccggtactgcctgagcagcagactgagagtgtccgccaccttctggcagaacccccggaaccacttcagatgccaggtgcagttctacggcctgagcgagaacgacgagtggacccaggacagagccaagcccgtgacccagatcgtgtctgccgaagcctggggcagagccgattgcggctttaccagcgagagctaccagcagggcgtgctgagcgccaccatcctgtacgagatcctgctgggcaaggccaccctgtacgccgtgctggtgtctgccctggtgctgatggctatggtcaagcggaaggacagccggggaagggccaagcgatctggatctggagcaacaaacttctcactactcaaacaagcaggtgacgtggaggagaatcccgggcctactagtaccatggactggatttggcgcatccttttccttgtcggcgctgctaccggcgcccattccgggccccaggtgcagctggttgaatctggcggaggactggttcagcctggcggatctctgagactgtcttgtgccgccagcggcaacatcaacagcagaaactgcatgggctggttcagacaggcccctggcaagggaagagaaggcgtggcagctatcggccaagtgaccggcagaacctactacgtggacagcgtgaagggcagattcaccatcagcctggacaacagcaagaacaccctgtacctccagatgaacagcctgagagccgaggacaccgccgtgtactattgtgctgctgcccctggctgtctgctgtctgcacttagaagcgccgactacagaaactggggccagggcacactggtcaccgtttcttctggatccggcggcggaggatctggcggaggcggatctgggggcggaggctctttcgaacaagttcagctggttcagagcggagccgaagtgaagaaacctggcagcagcgtgaaggtgtcctgcaaagcaagcggcggcacctttagctcctacgccatccactgggttcgacaggcaccaggacaaggactggaatggatgggcagaatcatccccatcgagggcagagcctactacgcccagaaattccagggcagagtgaccatcaccgccgacgagtctacaagcaccgcctacatggaactgagcagcctgagaagcgaggataccgctgtgtactattgcgccagaggccggtacagctacagatattggttcgactactggggccagggcaccctggttacagtctcttctacgcgtatccagaaccctgatcctgccgtgtaccagctgcgggatagcaagagcagcgacaagagcgtgtgtctgttcaccgacttcgacagccagaccaacgtgtcccagagcaaggactccgacgtgtacatcaccgataagtgcgtgctggacatgcggagcatggacttcaagagcaactccgccgtggcctggtccaacaagtccgatttcgcctgcgccaacgccttcaacaacagcattatccccgaggacacattcttcccaagccccgagagcagctgcgacgtgaagctggtggaaaagagcttcgagacagacaccaacctgaacttccagaacctgagcgtgatcggcttcagaatcctgctgctgaaagtggccggctttaacctgctgatgaccctgcggctgtggtccagc

SEQ ID NO: 39826 - DNA, 1455 bp, synthetic construct
  source 1..1455: mol_type = other DNA
atggccttaccagtgaccgccttgctcctgccgctggccttgctgctccacgccgccaggccggagatcgtgctgacacagtctcccgccacactgtcactgtctccaggcgaaagagccacactgagctgtagagccagccagagcgtgtcctcttacctggcctggtatcagcagaagcctggacaggctccccggctgctgatctacgatgccagcaatagagccacaggcatccccgccagattttctggctctggcagcggcaccgatttcaccctgaccataagcagcctggaacctgaggacttcgccgtgtactactgccagcagagaagcaactggcccctgacctttggacagggcaccaaggtggaaatcaaaggcggaggcggaagtggaggcggaggatctggcggcggaggctctcaagttcagctggttcagagcggagccgaagtgaagaaacctggcagcagcgtgaaggtgtcctgcaaagcaagcggcggcacctttagcacctacgccatccactgggttcgacaggcaccaggacaaggactggaatggatgggcagaatcatccccatcgagggcagagcctactacgcccagaaattccagggcagagtgaccatcaccgccgacgagtctacaagcaccgcctacatggaactgagcagcctgagaagcgaggataccgctgtgtactattgcgccagaggccggtacagctacagatattggttcgactactggggccagggcaccctggttacagtctcttctacgcgtaaaattgaagttatgtatcctcctccttacctagacaatgagaagagcaatggaaccattatccatgtgaaagggaaacacctttgtccaagtcccctatttcccggaccttctaagcccttttgggtgctggtggtggttgggggagtcctggcttgctatagcttgctagtaacagtggcctttattattttctgggtgaggagtaagaggagcaggctcctgcacagtgactacatgaacatgactccacgccgccccggacccacccgcaagcattaccagccctatgccccaccacgcgacttcgcagcctatcgctccagagtgaagttcagcaggagcgcagacgcccccgcgtaccagcagggccagaaccagctctataacgagctcaatctaggacgaagagaggagtacgatgttttggacaagagacgtggccgggaccctgagatggggggaaagccgagaaggaagaaccctcaggaaggcctgtacaatgaactgcagaaagataagatggcggaggcctacagtgagattgggatgaaaggcgagcgccggaggggcaaggggcacgatggcctttaccagggtctcagtacagccaccaaggacacctacgacgcccttcacatgcaggccctgccccctcgc

SEQ ID NO: 39827 - DNA, 1473 bp, synthetic construct
  source 1..1473: mol_type = other DNA
atggccttaccagtgaccgccttgctcctgccgctggccttgctgctccacgccgccaggccggagatcgtgctgacacagtctcccgccacactgtcactgtctccaggcgaaagagccacactgagctgtagagccagccagagcgtgtcctcttacctggcctggtatcagcagaagcctggacaggctccccggctgctgatctacgatgccagcaatagagccacaggcatccccgccagattttctggctctggcagcggcaccgatttcaccctgaccataagcagcctggaacctgaggacttcgccgtgtactactgccagcagagaagcaactggcccctgacctttggacagggcaccaaggtggaaatcaaaggcggaggcggaagtggaggcggaggatctggcggcggaggctctcaagttcagctggttcagagcggagccgaagtgaagaaacctggcagcagcgtgaaggtgtcctgcaaagcaagcggcggcacctttagcacctacgccatccactgggttcgacaggcaccaggacaaggactggaatggatgggcagaatcatccccatcgagggcagagcctactacgcccagaaattccagggcagagtgaccatcaccgccgacgagtctacaagcaccgcctacatggaactgagcagcctgagaagcgaggataccgctgtgtactattgcgccagaggccggtacagctacagatattggttcgactactggggccagggcaccctggttacagtctcttctacgcgtgcgaagcccaccacgacgccagcgccgcgaccaccaacaccggcgcccaccatcgcgtcgcagcccctgtccctgcgcccagaggcgtgccggccagcggcggggggcgcagtgcacacgagggggctggacttcgcctgtgacatctacatctgggcgcccttggccgggacttgtggggtccttctcctgtcactggttatcaccctttactgcaaacggggcagaaagaaactcctgtatatattcaaacaaccatttatgagaccagtacaaactactcaagaggaagatggctgtagctgccgatttccagaagaagaagaaggaggatgtgaactgagagtgaagttcagcaggagcgcagacgcccccgcgtaccagcagggccagaaccagctctataacgagctgaatctaggacgaagagaggagtacgatgttttggacaagagacgtggccgggaccctgagatggggggaaagccgagaaggaagaaccctcaggaaggcctgtacaatgaactgcagaaagataagatggcggaggcctacagtgagattgggatgaaaggcgagcgccggaggggcaaggggcacgatggcctttaccagggtctcagtacagccaccaaggacacctacgacgcccttcacatgcaggccctgccccctcgc

SEQ ID NO: 39828 - DNA, 1473 bp, synthetic construct
  source 1..1473: mol_type = other DNA
atggccttaccagtgaccgccttgctcctgccgctggccttgctgctccacgccgccaggccgcaagttcagctggttcagagcggagccgaagtgaagaaacctggcagcagcgtgaaggtgtcctgcaaagcaagcggcggcacctttagcacctacgccatccactgggttcgacaggcaccaggacaaggactggaatggatgggcagaatcatccccatcgagggcagagcctactacgcccagaaattccagggcagagtgaccatcaccgccgacgagtctacaagcaccgcctacatggaactgagcagcctgagaagcgaggataccgctgtgtactattgcgccagaggccggtacagctacagatattggttcgactactggggccagggcaccctggttacagtctcttctggcggaggcggaagtggaggcggaggatctggcggcggaggctctgagatcgtgctgacacagtctcccgccacactgtcactgtctccaggcgaaagagccacactgagctgtagagccagccagagcgtgtcctcttacctggcctggtatcagcagaagcctggacaggctccccggctgctgatctacgatgccagcaatagagccacaggcatccccgccagattttctggctctggcagcggcaccgatttcaccctgaccataagcagcctggaacctgaggacttcgccgtgtactactgccagcagagaagcaactggcccctgacctttggacagggcaccaaggtggaaatcaaaacgcgtgcgaagcccaccacgacgccagcgccgcgaccaccaacaccggcgcccaccatcgcgtcgcagcccctgtccctgcgcccagaggcgtgccggccagcggcggggggcgcagtgcacacgagggggctggacttcgcctgtgacatctacatctgggcgcccttggccgggacttgtggggtccttctcctgtcactggttatcaccctttactgcaaacggggcagaaagaaactcctgtatatattcaaacaaccatttatgagaccagtacaaactactcaagaggaagatggctgtagctgccgatttccagaagaagaagaaggaggatgtgaactgagagtgaagttcagcaggagcgcagacgcccccgcgtaccagcagggccagaaccagctctataacgagctgaatctaggacgaagagaggagtacgatgttttggacaagagacgtggccgggaccctgagatggggggaaagccgagaaggaagaaccctcaggaaggcctgtacaatgaactgcagaaagataagatggcggaggcctacagtgagattgggatgaaaggcgagcgccggaggggcaaggggcacgatggcctttaccagggtctcagtacagccaccaaggacacctacgacgcccttcacatgcaggccctgccccctcgc

SEQ ID NO: 39829 - DNA, 1872 bp, synthetic construct
  source 1..1872: mol_type = other DNA
atggccttaccagtgaccgccttgctcctgccgctggccttgctgctccacgccgccaggccggagatcgtgctgacacagtctcccgccacactgtcactgtctccaggcgaaagagccacactgagctgtagagccagccagagcgtgtcctcttacctggcctggtatcagcagaagcctggacaggctccccggctgctgatctacgatgccagcaatagagccacaggcatccccgccagattttctggctctggcagcggcaccgatttcaccctgaccataagcagcctggaacctgaggacttcgccgtgtactactgccagcagagaagcaactggcccctgacctttggacagggcaccaaggtggaaatcaaactcgagatccagaaccctgatcctgccgtgtaccagctgcgggatagcaagagcagcgacaagagcgtgtgtctgttcaccgacttcgacagccagaccaacgtgtcccagagcaaggactccgacgtgtacatcaccgataagtgcgtgctggacatgcggagcatggacttcaagagcaactccgccgtggcctggtccaacaagtccgatttcgcctgcgccaacgccttcaacaacagcattatccccgaggacacattcttcccaagcagcgacgtgccctgcgacgtgaagctggtggaaaagagcttcgagacagacaccaacctgaacttccagaacctgagcgtgatcggcttcagaatcctgctgctgaaagtggccggctttaacctgctgatgaccctgcggctgtggtccagccgcgccaagagaagcggatctggcgtgaagcagaccctgaatttcgacctgctgaagctggctggcgacgtggaatccaacccaggccctactagtatggactggatttggcgcatccttttccttgtcggcgctgctaccggcgcgcattccttcgaacaagttcagctggttcagagcggagccgaagtgaagaaacctggcagcagcgtgaaggtgtcctgcaaagcaagcggcggcacctttagcacctacgccatccactgggttcgacaggcaccaggacaaggactggaatggatgggcagaatcatccccatcgagggcagagcctactacgcccagaaattccagggcagagtgaccatcaccgccgacgagtctacaagcaccgcctacatggaactgagcagcctgagaagcgaggataccgctgtgtactattgcgccagaggccggtacagctacagatattggttcgactactggggccagggcaccctggttacagtctcttctacgcgtgaggacctgaagaacgtgttcccacctgaggtggccgtgttcgagcctagcaaggccgagatcgcccacacccagaaagccaccctcgtgtgcctggctaccggcttctaccccgaccatgtggaactgtcttggtgggtcaacggcaaagaggtgcacagcggcgtgtgtaccgacccccagccactgaaagaacagcccgccctgaacgacagccggtactgcctgagcagcagactgagagtgtccgccaccttctggcagaacccccggaaccacttcagatgccaggtgcagttctacggcctgagcgagaacgacgagtggacccaggacagagccaagcccgtgacccagatcgtgtctgccgaagcctggggcagagccgattgcggcatcaccagcgccagctaccaccagggcgtgctgagcgccaccatcctgtacgagatcctgctgggcaaggccaccctgtacgccgtgctggtgtctgccctggtgctgatggctatggtcaagcggaaggacagccgggga

SEQ ID NO: 39830 - DNA, 1860 bp, synthetic construct
  source 1..1860: mol_type = other DNA
atggccttaccagtgaccgccttgctcctgccgctggccttgctgctccacgccgccaggccggagatcgtgctgacacagtctcccgccacactgtcactgtctccaggcgaaagagccacactgagctgtagagccagccagagcgtgtcctcttacctggcctggtatcagcagaagcctggacaggctccccggctgctgatctacgatgccagcaatagagccacaggcatccccgccagattttctggctctggcagcggcaccgatttcaccctgaccataagcagcctggaacctgaggacttcgccgtgtactactgccagcagagaagcaactggcccctgacctttggacagggcaccaaggtggaaatcaaactcgaggacctgaagaacgtgttcccacctgaggtggccgtgttcgagcctagcaaggccgagatcgcccacacccagaaagccaccctcgtgtgcctggctaccggcttctaccccgaccatgtggaactgtcttggtgggtcaacggcaaagaggtgcacagcggcgtgtgtaccgacccccagccactgaaagaacagcccgccctgaacgacagccggtactgcctgagcagcagactgagagtgtccgccaccttctggcagaacccccggaaccacttcagatgccaggtgcagttctacggcctgagcgagaacgacgagtggacccaggacagagccaagcccgtgacccagatcgtgtctgccgaagcctggggcagagccgattgcggcatcaccagcgccagctaccaccagggcgtgctgagcgccaccatcctgtacgagatcctgctgggcaaggccaccctgtacgccgtgctggtgtctgccctggtgctgatggctatggtcaagcggaaggacagccggggaagggccaagcgatctggatctggagcaacaaacttctcactactcaaacaagcaggtgacgtggaggagaatcccgggcctactagtatggactggatttggcgcatccttttccttgtcggcgctgctaccggcgcgcattccttcgaacaagttcagctggttcagagcggagccgaagtgaagaaacctggcagcagcgtgaaggtgtcctgcaaagcaagcggcggcacctttagcacctacgccatccactgggttcgacaggcaccaggacaaggactggaatggatgggcagaatcatccccatcgagggcagagcctactacgcccagaaattccagggcagagtgaccatcaccgccgacgagtctacaagcaccgcctacatggaactgagcagcctgagaagcgaggataccgctgtgtactattgcgccagaggccggtacagctacagatattggttcgactactggggccagggcaccctggttacagtctcttctacgcgtatccagaaccctgatcctgccgtgtaccagctgcgggatagcaagagcagcgacaagagcgtgtgtctgttcaccgacttcgacagccagaccaacgtgtcccagagcaaggactccgacgtgtacatcaccgataagtgcgtgctggacatgcggagcatggacttcaagagcaactccgccgtggcctggtccaacaagtccgatttcgcctgcgccaacgccttcaacaacagcattatccccgaggacacattcttcccaagcagcgacgtgccctgcgacgtgaagctggtggaaaagagcttcgagacagacaccaacctgaacttccagaacctgagcgtgatcggcttcagaatcctgctgctgaaagtggccggctttaacctgctgatgaccctgcggctgtggtccagc

SEQ ID NO: 39831 - DNA, 1860 bp, synthetic construct
  source 1..1860: mol_type = other DNA
atggccttaccagtgaccgccttgctcctgccgctggccttgctgctccacgccgccaggccggagatcgtgctgacacagtctcccgccacactgtcactgtctccaggcgaaagagccacactgagctgtagagccagccagagcgtgtcctcttacctggcctggtatcagcagaagcctggacaggctccccggctgctgatctacgatgccagcaatagagccacaggcatccccgccagattttctggctctggcagcggcaccgatttcaccctgaccataagcagcctggaacctgaggacttcgccgtgtactactgccagcagagaagcaactggcccctgacctttggacagggcaccaaggtggaaatcaaactcgaggacctgaagaacgtgttcccacctgaggtggccgtgttcgagcctagcgaggccgagatcagccacacccagaaagccaccctcgtgtgcctggctaccggcttctaccccgaccatgtggaactgtcttggtgggtcaacggcaaagaggtgcacagcggcgtgtgtaccgacccccagccactgaaagaacagcccgccctgaacgacagccggtactgcctgagcagcagactgagagtgtccgccaccttctggcagaacccccggaaccacttcagatgccaggtgcagttctacggcctgagcgagaacgacgagtggacccaggacagagccaagcccgtgacccagatcgtgtctgccgaagcctggggcagagccgattgcggctttaccagcgagagctaccagcagggcgtgctgagcgccaccatcctgtacgagatcctgctgggcaaggccaccctgtacgccgtgctggtgtctgccctggtgctgatggctatggtcaagcggaaggacagccggggaagggccaagcgatctggatctggagcaacaaacttctcactactcaaacaagcaggtgacgtggaggagaatcccgggcctactagtatggactggatttggcgcatccttttccttgtcggcgctgctaccggcgcgcattccttcgaacaagttcagctggttcagagcggagccgaagtgaagaaacctggcagcagcgtgaaggtgtcctgcaaagcaagcggcggcacctttagcacctacgccatccactgggttcgacaggcaccaggacaaggactggaatggatgggcagaatcatccccatcgagggcagagcctactacgcccagaaattccagggcagagtgaccatcaccgccgacgagtctacaagcaccgcctacatggaactgagcagcctgagaagcgaggataccgctgtgtactattgcgccagaggccggtacagctacagatattggttcgactactggggccagggcaccctggttacagtctcttctacgcgtatccagaaccctgatcctgccgtgtaccagctgcgggatagcaagagcagcgacaagagcgtgtgtctgttcaccgacttcgacagccagaccaacgtgtcccagagcaaggactccgacgtgtacatcaccgataagtgcgtgctggacatgcggagcatggacttcaagagcaactccgccgtggcctggtccaacaagtccgatttcgcctgcgccaacgccttcaacaacagcattatccccgaggacacattcttcccaagccccgagagcagctgcgacgtgaagctggtggaaaagagcttcgagacagacaccaacctgaacttccagaacctgagcgtgatcggcttcagaatcctgctgctgaaagtggccggctttaacctgctgatgaccctgcggctgtggtccagc

SEQ ID NO: 39832 - DNA, 1872 bp, synthetic construct
  source 1..1872: mol_type = other DNA
atggccttaccagtgaccgccttgctcctgccgctggccttgctgctccacgccgccaggccggagatcgtgctgacacagtctcccgccacactgtcactgtctccaggcgaaagagccacactgagctgtagagccagccagagcgtgtcctcttacctggcctggtatcagcagaagcctggacaggctccccggctgctgatctacgatgccagcaatagagccacaggcatccccgccagattttctggctctggcagcggcaccgatttcaccctgaccataagcagcctggaacctgaggacttcgccgtgtactactgccagcagagaagcaactggcccctgacctttggacagggcaccaaggtggaaatcaaactcgagatccagaaccctgatcctgccgtgtaccagctgcgggatagcaagagcagcgacaagagcgtgtgtctgttcaccgacttcgacagccagaccaacgtgtcccagagcaaggactccgacgtgtacatcaccgataagtgcgtgctggacatgcggagcatggacttcaagagcaactccgccgtggcctggtccaacaagtccgatttcgcctgcgccaacgccttcaacaacagcattatccccgaggacacattcttcccaagccccgagagcagctgcgacgtgaagctggtggaaaagagcttcgagacagacaccaacctgaacttccagaacctgagcgtgatcggcttcagaatcctgctgctgaaagtggccggctttaacctgctgatgaccctgcggctgtggtccagccgcgccaagagaagcggatctggcgtgaagcagaccctgaatttcgacctgctgaagctggctggcgacgtggaatccaacccaggccctactagtatggactggatttggcgcatccttttccttgtcggcgctgctaccggcgcgcattccttcgaacaagttcagctggttcagagcggagccgaagtgaagaaacctggcagcagcgtgaaggtgtcctgcaaagcaagcggcggcacctttagcacctacgccatccactgggttcgacaggcaccaggacaaggactggaatggatgggcagaatcatccccatcgagggcagagcctactacgcccagaaattccagggcagagtgaccatcaccgccgacgagtctacaagcaccgcctacatggaactgagcagcctgagaagcgaggataccgctgtgtactattgcgccagaggccggtacagctacagatattggttcgactactggggccagggcaccctggttacagtctcttctacgcgtgaggacctgaagaacgtgttcccacctgaggtggccgtgttcgagcctagcgaggccgagatcagccacacccagaaagccaccctcgtgtgcctggctaccggcttctaccccgaccatgtggaactgtcttggtgggtcaacggcaaagaggtgcacagcggcgtgtgtaccgacccccagccactgaaagaacagcccgccctgaacgacagccggtactgcctgagcagcagactgagagtgtccgccaccttctggcagaacccccggaaccacttcagatgccaggtgcagttctacggcctgagcgagaacgacgagtggacccaggacagagccaagcccgtgacccagatcgtgtctgccgaagcctggggcagagccgattgcggctttaccagcgagagctaccagcagggcgtgctgagcgccaccatcctgtacgagatcctgctgggcaaggccaccctgtacgccgtgctggtgtctgccctggtgctgatggctatggtcaagcggaaggacagccgggga

SEQ ID NO: 39833 - DNA, 1908 bp, synthetic construct
  source 1..1908: mol_type = other DNA
atggccttaccagtgaccgccttgctcctgccgctggccttgctgctccacgccgccaggccgctcgaggaggacctgaagaacgtgttcccacctgaggtggccgtgttcgagcctagcaaggccgagatcgcccacacccagaaagccaccctcgtgtgcctggctaccggcttctaccccgaccatgtggaactgtcttggtgggtcaacggcaaagaggtgcacagcggcgtgtgtaccgacccccagccactgaaagaacagcccgccctgaacgacagccggtactgcctgagcagcagactgagagtgtccgccaccttctggcagaacccccggaaccacttcagatgccaggtgcagttctacggcctgagcgagaacgacgagtggacccaggacagagccaagcccgtgacccagatcgtgtctgccgaagcctggggcagagccgattgcggcatcaccagcgccagctaccaccagggcgtgctgagcgccaccatcctgtacgagatcctgctgggcaaggccaccctgtacgccgtgctggtgtctgccctggtgctgatggctatggtcaagcggaaggacagccggggaagggccaagcgatctggatctggagcaacaaacttctcactactcaaacaagcaggtgacgtggaggagaatcccgggcctactagcatggccttaccagtgaccgccttgctcctgccgctggccttgctgctccacgccgccaggccggagatcgtgctgacacagtctcccgccacactgtcactgtctccaggcgaaagagccacactgagctgtagagccagccagagcgtgtcctcttacctggcctggtatcagcagaagcctggacaggctccccggctgctgatctacgatgccagcaatagagccacaggcatccccgccagattttctggctctggcagcggcaccgatttcaccctgaccataagcagcctggaacctgaggacttcgccgtgtactactgccagcagagaagcaactggcccctgacctttggacagggcaccaaggtggaaatcaaaggcggaggcggaagtggaggcggaggatctggcggcggaggctctcaagttcagctggttcagagcggagccgaagtgaagaaacctggcagcagcgtgaaggtgtcctgcaaagcaagcggcggcacctttagcacctacgccatccactgggttcgacaggcaccaggacaaggactggaatggatgggcagaatcatccccatcgagggcagagcctactacgcccagaaattccagggcagagtgaccatcaccgccgacgagtctacaagcaccgcctacatggaactgagcagcctgagaagcgaggataccgctgtgtactattgcgccagaggccggtacagctacagatattggttcgactactggggccagggcaccctggttacagtctcttctacgcgtatccagaaccctgatcctgccgtgtaccagctgcgggatagcaagagcagcgacaagagcgtgtgtctgttcaccgacttcgacagccagaccaacgtgtcccagagcaaggactccgacgtgtacatcaccgataagtgcgtgctggacatgcggagcatggacttcaagagcaactccgccgtggcctggtccaacaagtccgatttcgcctgcgccaacgccttcaacaacagcattatccccgaggacacattcttcccaagcagcgacgtgccctgcgacgtgaagctggtggaaaagagcttcgagacagacaccaacctgaacttccagaacctgagcgtgatcggcttcagaatcctgctgctgaaagtggccggctttaacctgctgatgaccctgcggctgtggtccagc

SEQ ID NO: 39834 - DNA, 1929 bp, synthetic construct
  source 1..1929: mol_type = other DNA
atggccttaccagtgaccgccttgctcctgccgctggccttgctgctccacgccgccaggccgctcgagggctccggcgatcgccctgatcctgccgtgtaccagctgcgggatagcaagagcagcgacaagagcgtgtgtctgttcaccgacttcgacagccagaccaacgtgtcccagagcaaggactccgacgtgtacatcaccgataagtgcgtgctggacatgcggagcatggacttcaagagcaactccgccgtggcctggtccaacaagtccgatttcgcctgcgccaacgccttcaacaacagcattatccccgaggacacattcttcccaagccccgagagcagctgcgacgtgaagctggtggaaaagagcttcgagacagacaccaacctgaacttccagaacctgagcgtgatcggcttcagaatcctgctgctgaaagtggccggctttaacctgctgatgaccctgcggctgtggtccagctctagtcgcgccaagagaagcggatctggcgtgaagcagaccctgaatttcgacctgctgaagctggctggcgacgtggaatccaacccaggccccactagcatggccttaccagtgaccgccttgctcctgccgctggccttgctgctccacgccgccaggccggagatcgtgctgacacagtctcccgccacactgtcactgtctccaggcgaaagagccacactgagctgtagagccagccagagcgtgtcctcttacctggcctggtatcagcagaagcctggacaggctccccggctgctgatctacgatgccagcaatagagccacaggcatccccgccagattttctggctctggcagcggcaccgatttcaccctgaccataagcagcctggaacctgaggacttcgccgtgtactactgccagcagagaagcaactggcccctgacctttggacagggcaccaaggtggaaatcaaaggcggaggcggaagtggaggcggaggatctggcggcggaggctctcaagttcagctggttcagagcggagccgaagtgaagaaacctggcagcagcgtgaaggtgtcctgcaaagcaagcggcggcacctttagcacctacgccatccactgggttcgacaggcaccaggacaaggactggaatggatgggcagaatcatccccatcgagggcagagcctactacgcccagaaattccagggcagagtgaccatcaccgccgacgagtctacaagcaccgcctacatggaactgagcagcctgagaagcgaggataccgctgtgtactattgcgccagaggccggtacagctacagatattggttcgactactggggccagggcaccctggttacagtctcttctacgcgtgaggacctgaagaacgtgttcccacctgaggtggccgtgttcgagcctagcgaggccgagatcagccacacccagaaagccaccctcgtgtgcctggctaccggcttctaccccgaccatgtggaactgtcttggtgggtcaacggcaaagaggtgcacagcggcgtgtgtaccgacccccagccactgaaagaacagcccgccctgaacgacagccggtactgcctgagcagcagactgagagtgtccgccaccttctggcagaacccccggaaccacttcagatgccaggtgcagttctacggcctgagcgagaacgacgagtggacccaggacagagccaagcccgtgacccagatcgtgtctgccgaagcctggggcagagccgattgcggctttaccagcgagagctaccagcagggcgtgctgagcgccaccatcctgtacgagatcctgctgggcaaggccaccctgtacgccgtgctggtgtctgccctggtgctgatggctatggtcaagcggaaggacagccgggga

SEQ ID NO: 39835 - DNA, 1860 bp, synthetic construct
  source 1..1860: mol_type = other DNA
atggccttaccagtgaccgccttgctcctgccgctggccttgctgctccacgccgccaggccggagatcgtgctgacacagtctcccgccacactgtcactgtctccaggcgaaagagccacactgagctgtagagccagccagagcgtgtcctcttacctggcctggtatcagcagaagcctggacaggctccccggctgctgatctacgatgccagcaatagagccacaggcatccccgccagattttctggctctggcagcggcaccgatttcaccctgaccataagcagcctggaacctgaggacttcgccgtgtactactgccagcagagaagcaactggcccctgacctttggacagggcaccaaggtggaaatcaaactcgaggacctgaagaacgtgttcccacctgaggtggccgtgttcgagcctagcgaggccgagatcagccacacccagaaagccaccctcgtgtgcctggctaccggcttctaccccgaccatgtggaactgtcttggtgggtcaacggcaaagaggtgcacagcggcgtgtctaccgacccccagccactgaaagaacagcccgccctgaacgacagccggtactgcctgagcagcagactgagagtgtccgccaccttctggcagaacccccggaaccacttcagatgccaggtgcagttctacggcctgagcgagaacgacgagtggacccaggacagagccaagcccgtgacccagatcgtgtctgccgaagcctggggcagagccgattgcggctttaccagcgagagctaccagcagggcgtgctgagcgccaccatcctgtacgagatcctgctgggcaaggccaccctgtacgccgtgctggtgtctgccctggtgctgatggctatggtcaagcggaaggacagccggggaagggccaagcgatctggatctggagcaacaaacttctcactactcaaacaagcaggtgacgtggaggagaatcccgggcctactagtatggactggatttggcgcatccttttccttgtcggcgctgctaccggcgcgcattccttcgaacaagttcagctggttcagagcggagccgaagtgaagaaacctggcagcagcgtgaaggtgtcctgcaaagcaagcggcggcacctttagcacctacgccatccactgggttcgacaggcaccaggacaaggactggaatggatgggcagaatcatccccatcgagggcagagcctactacgcccagaaattccagggcagagtgaccatcaccgccgacgagtctacaagcaccgcctacatggaactgagcagcctgagaagcgaggataccgctgtgtactattgcgccagaggccggtacagctacagatattggttcgactactggggccagggcaccctggttacagtctcttctacgcgtatccagaaccctgatcctgccgtgtaccagctgcgggatagcaagagcagcgacaagagcgtgtgtctgttcaccgacttcgacagccagaccaacgtgtcccagagcaaggactccgacgtgtacatcaccgataagaccgtgctggacatgcggagcatggacttcaagagcaactccgccgtggcctggtccaacaagtccgatttcgcctgcgccaacgccttcaacaacagcattatccccgaggacacattcttcccaagccccgagagcagctgcgacgtgaagctggtggaaaagagcttcgagacagacaccaacctgaacttccagaacctgagcgtgatcggcttcagaatcctgctgctgaaagtggccggctttaacctgctgatgaccctgcggctgtggtccagc

SEQ ID NO: 39836 - DNA, 1884 bp, synthetic construct
  source 1..1884: mol_type = other DNA
atggccttaccagtgaccgccttgctcctgccgctggccttgctgctccacgccgccaggccggagatcgtgctgacacagtctcccgccacactgtcactgtctccaggcgaaagagccacactgagctgtagagccagccagagcgtgtcctcttacctggcctggtatcagcagaagcctggacaggctccccggctgctgatctacgatgccagcaatagagccacaggcatccccgccagattttctggctctggcagcggcaccgatttcaccctgaccataagcagcctggaacctgaggacttcgccgtgtactactgccagcagagaagcaactggcccctgacctttggacagggcaccaaggtggaaatcaaactcgaggacaagcagctggacgccgacgtgtcccccaagcctaccatcttcctgccctctatcgccgagacaaagctccagaaggccggcacctacctgtgcctgctggaaaagttcttcccagatgtgattaagatccactggcaggaaaagaagtccaacaccatcctgggcagccaggaaggcaacaccatgaagaccaacgacacctacatgaagttcagctggctgaccgtgcccgagaagtccctggacaaagaacacagatgcatcgtgcggcacgaaaacaacaagaacggcgtggaccaggaaatcatcttcccacccatcaagaccgatgtgattacaatggaccccaaggacaactgctccaaggacgccaacgataccctgctgctccagctgaccaacaccagcgcctactacatgtacttgttgctgctgctgaagtccgtggtgtacttcgccatcatcacatgctgcctgctgcggagaaccgccttctgctgcaacggcgagaagtctagggccaagcgatctggatctggagcaacaaacttctcactactcaaacaagcaggtgacgtggaggagaatcccgggcctactagtatggactggatttggcgcatccttttccttgtcggcgctgctaccggcgcgcattccttcgaacaagttcagctggttcagagcggagccgaagtgaagaaacctggcagcagcgtgaaggtgtcctgcaaagcaagcggcggcacctttagcacctacgccatccactgggttcgacaggcaccaggacaaggactggaatggatgggcagaatcatccccatcgagggcagagcctactacgcccagaaattccagggcagagtgaccatcaccgccgacgagtctacaagcaccgcctacatggaactgagcagcctgagaagcgaggataccgctgtgtactattgcgccagaggccggtacagctacagatattggttcgactactggggccagggcaccctggttacagtctcttctacgcgtagccagcctcacaccaagcccagcgtgttcgtgatgaagaacggcaccaacgtggcctgcctcgtgaaagagttctaccccaaggacatcaggatcaacctggtgtccagcaagaagatcaccgagttcgaccccgccatcgtgatctcccccagcggcaagtacaacgccgtgaagctggggaagtacgaggacagcaacagcgtgacctgctccgtgcagcacgacaacaagaccgtgcacagcaccgactttgaagtgaaaaccgactccaccgaccacgtgaagcccaaagagacagagaacaccaagcagcccagcaagagctgccacaagcccaaggccatcgtgcacaccgagaaagtgaacatgatgagcctgaccgtgctgggcctgcggatgctgttcgccaaaaccgtggccgtgaacttcctgctgaccgccaagctgttcttcctc

SEQ ID NO: 39837 - DNA, 1884 bp, synthetic construct
  source 1..1884: mol_type = other DNA
atggccttaccagtgaccgccttgctcctgccgctggccttgctgctccacgccgccaggccggagatcgtgctgacacagtctcccgccacactgtcactgtctccaggcgaaagagccacactgagctgtagagccagccagagcgtgtcctcttacctggcctggtatcagcagaagcctggacaggctccccggctgctgatctacgatgccagcaatagagccacaggcatccccgccagattttctggctctggcagcggcaccgatttcaccctgaccataagcagcctggaacctgaggacttcgccgtgtactactgccagcagagaagcaactggcccctgacctttggacagggcaccaaggtggaaatcaaactcgagagccagcctcacaccaagcccagcgtgttcgtgatgaagaacggcaccaacgtggcctgcctcgtgaaagagttctaccccaaggacatcaggatcaacctggtgtccagcaagaagatcaccgagttcgaccccgccatcgtgatctcccccagcggcaagtacaacgccgtgaagctggggaagtacgaggacagcaacagcgtgacctgctccgtgcagcacgacaacaagaccgtgcacagcaccgactttgaagtgaaaaccgactccaccgaccacgtgaagcccaaagagacagagaacaccaagcagcccagcaagagctgccacaagcccaaggccatcgtgcacaccgagaaagtgaacatgatgagcctgaccgtgctgggcctgcggatgctgttcgccaaaaccgtggccgtgaacttcctgctgaccgccaagctgttcttcctcagggccaagcgatctggatctggagcaacaaacttctcactactcaaacaagcaggtgacgtggaggagaatcccgggcctactagtatggactggatttggcgcatccttttccttgtcggcgctgctaccggcgcgcattccttcgaacaagttcagctggttcagagcggagccgaagtgaagaaacctggcagcagcgtgaaggtgtcctgcaaagcaagcggcggcacctttagcacctacgccatccactgggttcgacaggcaccaggacaaggactggaatggatgggcagaatcatccccatcgagggcagagcctactacgcccagaaattccagggcagagtgaccatcaccgccgacgagtctacaagcaccgcctacatggaactgagcagcctgagaagcgaggataccgctgtgtactattgcgccagaggccggtacagctacagatattggttcgactactggggccagggcaccctggttacagtctcttctacgcgtgacaagcagctggacgccgacgtgtcccccaagcctaccatcttcctgccctctatcgccgagacaaagctccagaaggccggcacctacctgtgcctgctggaaaagttcttcccagatgtgattaagatccactggcaggaaaagaagtccaacaccatcctgggcagccaggaaggcaacaccatgaagaccaacgacacctacatgaagttcagctggctgaccgtgcccgagaagtccctggacaaagaacacagatgcatcgtgcggcacgaaaacaacaagaacggcgtggaccaggaaatcatcttcccacccatcaagaccgatgtgattacaatggaccccaaggacaactgctccaaggacgccaacgataccctgctgctccagctgaccaacaccagcgcctactacatgtacttgttgctgctgctgaagtccgtggtgtacttcgccatcatcacatgctgcctgctgcggagaaccgccttctgctgcaacggcgagaagtct

SEQ ID NO: 39838 - DNA, 1929 bp, synthetic construct
  source 1..1929: mol_type = other DNA
atggccttaccagtgaccgccttgctcctgccgctggccttgctgctccacgccgccaggccgctcgaggacaagcagctggacgccgacgtgtcccccaagcctaccatcttcctgccctctatcgccgagacaaagctccagaaggccggcacctacctgtgcctgctggaaaagttcttcccagatgtgattaagatccactggcaggaaaagaagtccaacaccatcctgggcagccaggaaggcaacaccatgaagaccaacgacacctacatgaagttcagctggctgaccgtgcccgagaagtccctggacaaagaacacagatgcatcgtgcggcacgaaaacaacaagaacggcgtggaccaggaaatcatcttcccacccatcaagaccgatgtgattacaatggaccccaaggacaactgctccaaggacgccaacgataccctgctgctccagctgaccaacaccagcgcctactacatgtacttgttgctgctgctgaagtccgtggtgtacttcgccatcatcacatgctgcctgctgcggagaaccgccttctgctgcaacggcgagaagtctagggccaagcgatctggatctggagcaacaaacttctcactactcaaacaagcaggtgacgtggaggagaatcccgggcctactagcatggccttaccagtgaccgccttgctcctgccgctggccttgctgctccacgccgccaggccggagatcgtgctgacacagtctcccgccacactgtcactgtctccaggcgaaagagccacactgagctgtagagccagccagagcgtgtcctcttacctggcctggtatcagcagaagcctggacaggctccccggctgctgatctacgatgccagcaatagagccacaggcatccccgccagattttctggctctggcagcggcaccgatttcaccctgaccataagcagcctggaacctgaggacttcgccgtgtactactgccagcagagaagcaactggcccctgacctttggacagggcaccaaggtggaaatcaaaggcggaggcggaagtggaggcggaggatctggcggcggaggctctcaagttcagctggttcagagcggagccgaagtgaagaaacctggcagcagcgtgaaggtgtcctgcaaagcaagcggcggcacctttagcacctacgccatccactgggttcgacaggcaccaggacaaggactggaatggatgggcagaatcatccccatcgagggcagagcctactacgcccagaaattccagggcagagtgaccatcaccgccgacgagtctacaagcaccgcctacatggaactgagcagcctgagaagcgaggataccgctgtgtactattgcgccagaggccggtacagctacagatattggttcgactactggggccagggcaccctggttacagtctcttctacgcgtagccagcctcacaccaagcccagcgtgttcgtgatgaagaacggcaccaacgtggcctgcctcgtgaaagagttctaccccaaggacatcaggatcaacctggtgtccagcaagaagatcaccgagttcgaccccgccatcgtgatctcccccagcggcaagtacaacgccgtgaagctggggaagtacgaggacagcaacagcgtgacctgctccgtgcagcacgacaacaagaccgtgcacagcaccgactttgaagtgaaaaccgactccaccgaccacgtgaagcccaaagagacagagaacaccaagcagcccagcaagagctgccacaagcccaaggccatcgtgcacaccgagaaagtgaacatgatgagcctgaccgtgctgggcctgcggatgctgttcgccaaaaccgtggccgtgaacttcctgctgaccgccaagctgttcttcctc

SEQ ID NO: 39839 - DNA, 2391 bp, synthetic construct
  source 1..2391: mol_type = other DNA
atggccttaccagtgaccgccttgctcctgccgctggccttgctgctccacgccgccaggccggagatcgtgctgacacagtctcccgccacactgtcactgtctccaggcgaaagagccacactgagctgtagagccagccagagcgtgtcctcttacctggcctggtatcagcagaagcctggacaggctccccggctgctgatctacgatgccagcaatagagccacaggcatccccgccagattttctggctctggcagcggcaccgatttcaccctgaccataagcagcctggaacctgaggacttcgccgtgtactactgccagcagagaagcaactggcccctgacctttggacagggcaccaaggtggaaatcaaaggacagcctaaggccaatcctaccgtgacactgttccctccaagcagcgaagaactccaggccaacaaggccacacttgtgtgcctgatctccgacttctaccctggggctgtgacagtggcttggaaggccgatggatctcctgtgaaagccggcgtggaaaccaccaagccatccaagcagagcaacaacaaatacgccgccagctcctacctgagcctgacacctgagcagtggaagtcccacagatcctacagctgccaagtgacccacgaaggcagcaccgtggaaaagacagtggcccctacagagtgcagcggatcccagagcttcggcctgctggaccccaagctgtgctacctgctggatggcatcctgttcatctacggcgtgatcctgaccgccctgttcctgagagtgaagttcagcagaagcgccgacgcccctgcctaccagcagggacagaaccaactgtacaacgagctgaacctgggcagacgggaagagtacgacgtgctggacaagcggagaggcagggaccctgagatgggcggaaagccccagcggagaaagaacccccaggaaggactgtataacgaactccagaaagacaagatggccgaagcctacagcgagatcggcatgaagggcgagcggagaagaggcaagggccacgatggcctgtaccagggcctgagcaccgccaccaaggacacctatgacgccctgcacatgcaggccctgcctccaagaagggccaagcgatctggatctggagcaacaaacttctcactactcaaacaagcaggtgacgtggaggagaatcccgggcctactagtatggactggatttggcgcatccttttccttgtcggcgctgctaccggcgcgcattccttcgaacaagttcagctggttcagagcggagccgaagtgaagaaacctggcagcagcgtgaaggtgtcctgcaaagcaagcggcggcacctttagcacctacgccatccactgggttcgacaggcaccaggacaaggactggaatggatgggcagaatcatccccatcgagggcagagcctactacgcccagaaattccagggcagagtgaccatcaccgccgacgagtctacaagcaccgcctacatggaactgagcagcctgagaagcgaggataccgctgtgtactattgcgccagaggccggtacagctacagatattggttcgactactggggccagggcaccctggttacagtctcttctgcctctacaaagggaccctccgtgtttcctctggctcccagcagcaagtctacaagcggaggaacagccgctctgggctgcctggtcaaggattactttcccgagcctgtgaccgtgtcctggaatagcggagcactgacaagcggcgtgcacacctttccagccgtgctgcaaagcagcggcctgtactctctgagcagcgtggtcacagtgcctagctctagcctgggcacccagacctacatctgcaatgtgaaccacaagcctagcaacaccaaggtggacaagagagtggaacccaagagctgtggtacccagagttttgggttgttggaccctaaattgtgctatctgttggacggaatcctgttcatttacggagtgatcctgaccgcattgttcctgcgggttaagttttccagatccgcagacgcacccgcttaccaacaagggcagaaccaactctacaatgaacttaatttggggcggagggaagagtacgacgttctggacaaaaggaggggacgagatcccgagatgggcggaaagcctcagcgaaggaagaatccgcaagaggggctttataacgaactccagaaagataaaatggcagaagcctatagtgagattgggatgaagggagaaaggaggaggggtaaaggtcacgatgggttgtaccaaggattgagcacagccactaaagatacctatgatgcgctccacatgcaggccctgccgccaaga

SEQ ID NO: 39840 - DNA, 2448 bp, synthetic construct
  source 1..2448: mol_type = other DNA
atggccttaccagtgaccgccttgctcctgccgctggccttgctgctccacgccgccaggccggagatcgtgctgacacagtctcccgccacactgtcactgtctccaggcgaaagagccacactgagctgtagagccagccagagcgtgtcctcttacctggcctggtatcagcagaagcctggacaggctccccggctgctgatctacgatgccagcaatagagccacaggcatccccgccagattttctggctctggcagcggcaccgatttcaccctgaccataagcagcctggaacctgaggacttcgccgtgtactactgccagcagagaagcaactggcccctgacctttggacagggcaccaaggtggaaatcaaactcgaggacctgaagaacgtgttcccacctgaggtggccgtgttcgagcctagcgaggccgagatcagccacacccagaaagccaccctcgtgtgcctggctaccggcttctaccccgaccatgtggaactgtcttggtgggtcaacggcaaagaggtgcacagcggcgtgtctaccgacccccagccactgaaagaacagcccgccctgaacgacagccggtactgcctgagcagcagactgagagtgtccgccaccttctggcagaacccccggaaccacttcagatgccaggtgcagttctacggcctgagcgagaacgacgagtggacccaggacagagccaagcccgtgacccagatcgtgtctgccgaagcctggggcagagccgattgcggatcccagagcttcggcctgctggaccccaagctgtgctacctgctggatggcatcctgttcatctacggcgtgatcctgaccgccctgttcctgagagtgaagttcagcagaagcgccgacgcccctgcctaccagcagggacagaaccaactgtacaacgagctgaacctgggcagacgggaagagtacgacgtgctggacaagcggagaggcagggaccctgagatgggcggaaagccccagcggagaaagaacccccaggaaggactgtataacgaactccagaaagacaagatggccgaagcctacagcgagatcggcatgaagggcgagcggagaagaggcaagggccacgatggcctgtaccagggcctgagcaccgccaccaaggacacctatgacgccctgcacatgcaggccctgcctccaagaagggccaagcgatctggatctggagcaacaaacttctcactactcaaacaagcaggtgacgtggaggagaatcccgggcctactagtatggactggatttggcgcatccttttccttgtcggcgctgctaccggcgcgcattccttcgaacaagttcagctggttcagagcggagccgaagtgaagaaacctggcagcagcgtgaaggtgtcctgcaaagcaagcggcggcacctttagcacctacgccatccactgggttcgacaggcaccaggacaaggactggaatggatgggcagaatcatccccatcgagggcagagcctactacgcccagaaattccagggcagagtgaccatcaccgccgacgagtctacaagcaccgcctacatggaactgagcagcctgagaagcgaggataccgctgtgtactattgcgccagaggccggtacagctacagatattggttcgactactggggccagggcaccctggttacagtctcttctacgcgtatccagaaccctgatcctgccgtgtaccagctgcgggatagcaagagcagcgacaagagcgtgtgtctgttcaccgacttcgacagccagaccaacgtgtcccagagcaaggactccgacgtgtacatcaccgataagaccgtgctggacatgcggagcatggacttcaagagcaactccgccgtggcctggtccaacaagtccgatttcgcctgcgccaacgccttcaacaacagcattatccccgaggacacattcttcccaagccccgagagcagctgcggtacccagagttttgggttgttggaccctaaattgtgctatctgttggacggaatcctgttcatttacggagtgatcctgaccgcattgttcctgcgggttaagttttccagatccgcagacgcacccgcttaccaacaagggcagaaccaactctacaatgaacttaatttggggcggagggaagagtacgacgttctggacaaaaggaggggacgagatcccgagatgggcggaaagcctcagcgaaggaagaatccgcaagaggggctttataacgaactccagaaagataaaatggcagaagcctatagtgagattgggatgaagggagaaaggaggaggggtaaaggtcacgatgggttgtaccaaggattgagcacagccactaaagatacctatgatgcgctccacatgcaggccctgccgccaaga

SEQ ID NO: 39841 - DNA, 2574 bp, synthetic construct
  source 1..2574: mol_type = other DNA
atggccttaccagtgaccgccttgctcctgccgctggccttgctgctccacgccgccaggccggagatcgtgctgacacagtctcccgccacactgtcactgtctccaggcgaaagagccacactgagctgtagagccagccagagcgtgtcctcttacctggcctggtatcagcagaagcctggacaggctccccggctgctgatctacgatgccagcaatagagccacaggcatccccgccagattttctggctctggcagcggcaccgatttcaccctgaccataagcagcctggaacctgaggacttcgccgtgtactactgccagcagagaagcaactggcccctgacctttggacagggcaccaaggtggaaatcaaactcgaggaggacctgaagaacgtgttcccacctgaggtggccgtgttcgagcctagcgaggccgagatcagccacacccagaaagccaccctcgtgtgcctggctaccggcttctaccccgaccatgtggaactgtcttggtgggtcaacggcaaagaggtgcacagcggcgtgtctaccgacccccagccactgaaagaacagcccgccctgaacgacagccggtactgcctgagcagcagactgagagtgtccgccaccttctggcagaacccccggaaccacttcagatgccaggtgcagttctacggcctgagcgagaacgacgagtggacccaggacagagccaagcccgtgacccagatcgtgtctgccgaagcctggggcagagccgattgcggatcccagagcttcggcctgctggaccccaagctgtgctacctgctggatggcatcctgttcatctacggcgtgatcctgaccgccctgttcctgagagtgaagttcagcagaagcgccgacgcccctgcctaccagcagggacagaaccaactgtacaacgagctgaacctgggcagacgggaagagtacgacgtgctggacaagcggagaggcagggaccctgagatgggcggaaagccccagcggagaaagaacccccaggaaggactgtataacgaactccagaaagacaagatggccgaagcctacagcgagatcggcatgaagggcgagcggagaagaggcaagggccacgatggcctgtaccagggcctgagcaccgccaccaaggacacctatgacgccctgcacatgcaggccctgcctccaagaagggccaagcgatctggatctggagcaacaaacttctcactactcaaacaagcaggtgacgtggaggagaatcccgggcctactagtatggactggatttggcgcatccttttccttgtcggcgctgctaccggcgcgcattccttcgaacaagttcagctggttcagagcggagccgaagtgaagaaacctggcagcagcgtgaaggtgtcctgcaaagcaagcggcggcacctttagcacctacgccatccactgggttcgacaggcaccaggacaaggactggaatggatgggcagaatcatccccatcgagggcagagcctactacgcccagaaattccagggcagagtgaccatcaccgccgacgagtctacaagcaccgcctacatggaactgagcagcctgagaagcgaggataccgctgtgtactattgcgccagaggccggtacagctacagatattggttcgactactggggccagggcaccctggttacagtctcttctacgcgtatccagaaccctgatcctgccgtgtaccagctgcgggatagcaagagcagcgacaagagcgtgtgtctgttcaccgacttcgacagccagaccaacgtgtcccagagcaaggactccgacgtgtacatcaccgataagaccgtgctggacatgcggagcatggacttcaagagcaactccgccgtggcctggtccaacaagtccgatttcgcctgcgccaacgccttcaacaacagcattatccccgaggacacattcttcccaagccccgagagcagctgcggtacccagagttttgggttgttggaccctaaattgtgctatctgttggacggaatcctgttcatttacggagtgatcctgaccgcattgttcctgaggagcaagcggtcacggctgctccacagcgattacatgaatatgacaccacgaagaccgggtcctactcgcaaacactaccaaccctacgcacctccccgcgactttgcagcgtaccgatctcgggttaagttttccagatccgcagacgcacccgcttaccaacaagggcagaaccaactctacaatgaacttaatttggggcggagggaagagtacgacgttctggacaaaaggaggggacgagatcccgagatgggcggaaagcctcagcgaaggaagaatccgcaagaggggctttataacgaactccagaaagataaaatggcagaagcctatagtgagattgggatgaagggagaaaggaggaggggtaaaggtcacgatgggttgtaccaaggattgagcacagccactaaagatacctatgatgcgctccacatgcaggccctgccgccaaga

SEQ ID NO: 39842 - DNA, 2703 bp, synthetic construct
  source 1..2703: mol_type = other DNA
atggccttaccagtgaccgccttgctcctgccgctggccttgctgctccacgccgccaggccggagatcgtgctgacacagtctcccgccacactgtcactgtctccaggcgaaagagccacactgagctgtagagccagccagagcgtgtcctcttacctggcctggtatcagcagaagcctggacaggctccccggctgctgatctacgatgccagcaatagagccacaggcatccccgccagattttctggctctggcagcggcaccgatttcaccctgaccataagcagcctggaacctgaggacttcgccgtgtactactgccagcagagaagcaactggcccctgacctttggacagggcaccaaggtggaaatcaaactcgaggaggacctgaagaacgtgttcccacctgaggtggccgtgttcgagcctagcgaggccgagatcagccacacccagaaagccaccctcgtgtgcctggctaccggcttctaccccgaccatgtggaactgtcttggtgggtcaacggcaaagaggtgcacagcggcgtgtctaccgacccccagccactgaaagaacagcccgccctgaacgacagccggtactgcctgagcagcagactgagagtgtccgccaccttctggcagaacccccggaaccacttcagatgccaggtgcagttctacggcctgagcgagaacgacgagtggacccaggacagagccaagcccgtgacccagatcgtgtctgccgaagcctggggcagagccgattgcggatcccagagcttcggcctgctggaccccaagctgtgctacctgctggatggcatcctgttcatctacggcgtgatcctgaccgccctgttcctgaaacggggcagaaagaaactcctgtatatattcaaacaaccatttatgagaccagtacaaactactcaagaggaagatggctgtagctgccgatttccagaagaagaagaaggaggatgtgaactgagagtgaagttcagcagaagcgccgacgcccctgcctaccagcagggacagaaccaactgtacaacgagctgaacctgggcagacgggaagagtacgacgtgctggacaagcggagaggcagggaccctgagatgggcggaaagccccagcggagaaagaacccccaggaaggactgtataacgaactccagaaagacaagatggccgaagcctacagcgagatcggcatgaagggcgagcggagaagaggcaagggccacgatggcctgtaccagggcctgagcaccgccaccaaggacacctatgacgccctgcacatgcaggccctgcctccaagaagggccaagcgatctggatctggagcaacaaacttctcactactcaaacaagcaggtgacgtggaggagaatcccgggcctactagtatggactggatttggcgcatccttttccttgtcggcgctgctaccggcgcgcattccttcgaacaagttcagctggttcagagcggagccgaagtgaagaaacctggcagcagcgtgaaggtgtcctgcaaagcaagcggcggcacctttagcacctacgccatccactgggttcgacaggcaccaggacaaggactggaatggatgggcagaatcatccccatcgagggcagagcctactacgcccagaaattccagggcagagtgaccatcaccgccgacgagtctacaagcaccgcctacatggaactgagcagcctgagaagcgaggataccgctgtgtactattgcgccagaggccggtacagctacagatattggttcgactactggggccagggcaccctggttacagtctcttctacgcgtatccagaaccctgatcctgccgtgtaccagctgcgggatagcaagagcagcgacaagagcgtgtgtctgttcaccgacttcgacagccagaccaacgtgtcccagagcaaggactccgacgtgtacatcaccgataagaccgtgctggacatgcggagcatggacttcaagagcaactccgccgtggcctggtccaacaagtccgatttcgcctgcgccaacgccttcaacaacagcattatccccgaggacacattcttcccaagccccgagagcagctgcggtacccagagttttgggttgttggaccctaaattgtgctatctgttggacggaatcctgttcatttacggagtgatcctgaccgcattgttcctgaagagaggccggaagaagctgctgtacatcttcaagcagcctttcatgcggcccgtgcagaccacccaggaagaggacggctgctcctgccggttccccgaggaagaagaaggcggctgcgagctgcgggttaagttttccagatccgcagacgcacccgcttaccaacaagggcagaaccaactctacaatgaacttaatttggggcggagggaagagtacgacgttctggacaaaaggaggggacgagatcccgagatgggcggaaagcctcagcgaaggaagaatccgcaagaggggctttataacgaactccagaaagataaaatggcagaagcctatagtgagattgggatgaagggagaaaggaggaggggtaaaggtcacgatgggttgtaccaaggattgagcacagccactaaagatacctatgatgcgctccacatgcaggccctgccgccaaga

SEQ ID NO: 39843 - DNA, 1764 bp, synthetic construct
  source 1..1764: mol_type = other DNA
atggccttaccagtgaccgccttgctcctgccgctggccttgctgctccacgccgccaggccggagatcgtgctgacacagtctcccgccacactgtcactgtctccaggcgaaagagccacactgagctgtagagccagccagagcgtgtcctcttacctggcctggtatcagcagaagcctggacaggctccccggctgctgatctacgatgccagcaatagagccacaggcatccccgccagattttctggctctggcagcggcaccgatttcaccctgaccataagcagcctggaacctgaggacttcgccgtgtactactgccagcagagaagcaactggcccctgacctttggacagggcaccaaggtggaaatcaaactcgagcagagcttcggcctgctggaccccaagctgtgctacctgctggatggcatcctgttcatctacggcgtgatcctgaccgccctgttcctgagagtgaagttcagcagaagcgccgacgcccctgcctaccagcagggacagaaccaactgtacaacgagctgaacctgggcagacgggaagagtacgacgtgctggacaagcggagaggcagggaccctgagatgggcggaaagccccagcggagaaagaacccccaggaaggactgtataacgaactccagaaagacaagatggccgaagcctacagcgagatcggcatgaagggcgagcggagaagaggcaagggccacgatggcctgtaccagggcctgagcaccgccaccaaggacacctatgacgccctgcacatgcaggccctgcctccaagaagggccaagcgatctggatctggagcaacaaacttctcactactcaaacaagcaggtgacgtggaggagaatcccgggcctactagtatggactggatttggcgcatccttttccttgtcggcgctgctaccggcgcgcattccttcgaacaagttcagctggttcagagcggagccgaagtgaagaaacctggcagcagcgtgaaggtgtcctgcaaagcaagcggcggcacctttagcacctacgccatccactgggttcgacaggcaccaggacaaggactggaatggatgggcagaatcatccccatcgagggcagagcctactacgcccagaaattccagggcagagtgaccatcaccgccgacgagtctacaagcaccgcctacatggaactgagcagcctgagaagcgaggataccgctgtgtactattgcgccagaggccggtacagctacagatattggttcgactactggggccagggcaccctggttacagtctcttctacgcgtcagagttttgggttgttggaccctaaattgtgctatctgttggacggaatcctgttcatttacggagtgatcctgaccgcattgttcctgcgggttaagttttccagatccgcagacgcacccgcttaccaacaagggcagaaccaactctacaatgaacttaatttggggcggagggaagagtacgacgttctggacaaaaggaggggacgagatcccgagatgggcggaaagcctcagcgaaggaagaatccgcaagaggggctttataacgaactccagaaagataaaatggcagaagcctatagtgagattgggatgaagggagaaaggaggaggggtaaaggtcacgatgggttgtaccaaggattgagcacagccactaaagatacctatgatgcgctccacatgcaggccctgccgccaaga

SEQ ID NO: 39844 - DNA, 1938 bp, synthetic construct
  source 1..1938: mol_type = other DNA
atggccttaccagtgaccgccttgctcctgccgctggccttgctgctccacgccgccaggccggagatcgtgctgacacagtctcccgccacactgtcactgtctccaggcgaaagagccacactgagctgtagagccagccagagcgtgtcctcttacctggcctggtatcagcagaagcctggacaggctccccggctgctgatctacgatgccagcaatagagccacaggcatccccgccagattttctggctctggcagcggcaccgatttcaccctgaccataagcagcctggaacctgaggacttcgccgtgtactactgccagcagagaagcaactggcccctgacctttggacagggcaccaaggtggaaatcaaactcgagggacagcctaaggccaatcctaccgtgacactgttccctccaagcagcgaagaactccaggccaacaaggccacacttgtgtgcctgatctccgacttctaccctggggctgtgacagtggcttggaaggccgatggatctcctgtgaaagccggcgtggaaaccaccaagccatccaagcagagcaacaacaaatacgccgccagctcctacctgagcctgacacctgagcagtggaagtcccacagatcctacagctgccaagtgacccacgaaggcagcaccgtggaaaagacagtggcccctacagagtgcagccccatcaagaccgatgtgattacaatggaccccaaggacaactgctccaaggacgccaacgataccctgctgctccagctgaccaacaccagcgcctactacatgtacttgttgctgctgctgaagtccgtggtgtacttcgccatcatcacatgctgcctgctgcggagaaccgccttctgctgcaacggcgagaagtctagggccaagcgatctggatctggagcaacaaacttctcactactcaaacaagcaggtgacgtggaggagaatcccgggcctactagtatggactggatttggcgcatccttttccttgtcggcgctgctaccggcgcgcattccttcgaacaagttcagctggttcagagcggagccgaagtgaagaaacctggcagcagcgtgaaggtgtcctgcaaagcaagcggcggcacctttagcacctacgccatccactgggttcgacaggcaccaggacaaggactggaatggatgggcagaatcatccccatcgagggcagagcctactacgcccagaaattccagggcagagtgaccatcaccgccgacgagtctacaagcaccgcctacatggaactgagcagcctgagaagcgaggataccgctgtgtactattgcgccagaggccggtacagctacagatattggttcgactactggggccagggcaccctggttacagtctcttctacgcgtgcctctacaaagggaccctccgtgtttcctctggctcccagcagcaagtctacaagcggaggaacagccgctctgggctgcctggtcaaggattactttcccgagcctgtgaccgtgtcctggaatagcggagcactgacaagcggcgtgcacacctttccagccgtgctgcaaagcagcggcctgtactctctgagcagcgtggtcacagtgcctagctctagcctgggcacccagacctacatctgcaatgtgaaccacaagcctagcaacaccaaggtggacaagagagtggaacccaagagctgtgaagtgaaaaccgactccaccgaccacgtgaagcccaaagagacagagaacaccaagcagcccagcaagagctgccacaagcccaaggccatcgtgcacaccgagaaagtgaacatgatgagcctgaccgtgctgggcctgcggatgctgttcgccaaaaccgtggccgtgaacttcctgctgaccgccaagctgttcttcctc

SEQ ID NO: 39845 - DNA, 1872 bp, synthetic construct
  source 1..1872: mol_type = other DNA
atggccttaccagtgaccgccttgctcctgccgctggccttgctgctccacgccgccaggccggagatcgtgctgacacagtctcccgccacactgtcactgtctccaggcgaaagagccacactgagctgtagagccagccagagcgtgtcctcttacctggcctggtatcagcagaagcctggacaggctccccggctgctgatctacgatgccagcaatagagccacaggcatccccgccagattttctggctctggcagcggcaccgatttcaccctgaccataagcagcctggaacctgaggacttcgccgtgtactactgccagcagagaagcaactggcccctgacctttggacagggcaccaaggtggaaatcaaactcgagggacagcctaaggccaatcctaccgtgacactgttccctccaagcagcgaagaactccaggccaacaaggccacacttgtgtgcctgatctccgacttctaccctggggctgtgacagtggcttggaaggccgatggatctcctgtgaaagccggcgtggaaaccaccaagccatccaagcagagcaacaacaaatacgccgccagctcctacctgagcctgacacctgagcagtggaagtcccacagatcctacagctgccaagtgacccacgaaggcagcaccgtggaaaagacagtggcccctacagagtgcagcggcagagccgattgcggcatcaccagcgccagctaccaccagggcgtgctgagcgccaccatcctgtacgagatcctgctgggcaaggccaccctgtacgccgtgctggtgtctgccctggtgctgatggctatggtcaagcggaaggacagccggggaagggccaagcgatctggatctggagcaacaaacttctcactactcaaacaagcaggtgacgtggaggagaatcccgggcctactagtatggactggatttggcgcatccttttccttgtcggcgctgctaccggcgcgcattccttcgaacaagttcagctggttcagagcggagccgaagtgaagaaacctggcagcagcgtgaaggtgtcctgcaaagcaagcggcggcacctttagcacctacgccatccactgggttcgacaggcaccaggacaaggactggaatggatgggcagaatcatccccatcgagggcagagcctactacgcccagaaattccagggcagagtgaccatcaccgccgacgagtctacaagcaccgcctacatggaactgagcagcctgagaagcgaggataccgctgtgtactattgcgccagaggccggtacagctacagatattggttcgactactggggccagggcaccctggttacagtctcttctacgcgtgcctctacaaagggaccctccgtgtttcctctggctcccagcagcaagtctacaagcggaggaacagccgctctgggctgcctggtcaaggattactttcccgagcctgtgaccgtgtcctggaatagcggagcactgacaagcggcgtgcacacctttccagccgtgctgcaaagcagcggcctgtactctctgagcagcgtggtcacagtgcctagctctagcctgggcacccagacctacatctgcaatgtgaaccacaagcctagcaacaccaaggtggacaagagagtggaacccaagagctgtatccccgaggacacattcttcccaagcagcgacgtgccctgcgacgtgaagctggtggaaaagagcttcgagacagacaccaacctgaacttccagaacctgagcgtgatcggcttcagaatcctgctgctgaaagtggccggctttaacctgctgatgaccctgcggctgtggtccagc

SEQ ID NO: 39846 - DNA, 1872 bp, synthetic construct
  source 1..1872: mol_type = other DNA
atggccttaccagtgaccgccttgctcctgccgctggccttgctgctccacgccgccaggccggagatcgtgctgacacagtctcccgccacactgtcactgtctccaggcgaaagagccacactgagctgtagagccagccagagcgtgtcctcttacctggcctggtatcagcagaagcctggacaggctccccggctgctgatctacgatgccagcaatagagccacaggcatccccgccagattttctggctctggcagcggcaccgatttcaccctgaccataagcagcctggaacctgaggacttcgccgtgtactactgccagcagagaagcaactggcccctgacctttggacagggcaccaaggtggaaatcaaactcgagggacagcctaaggccaatcctaccgtgacactgttccctccaagcagcgaagaactccaggccaacaaggccacacttgtgtgcctgatctccgacttctaccctggggctgtgacagtggcttggaaggccgatggatctcctgtgaaagccggcgtggaaaccaccaagccatccaagcagagcaacaacaaatacgccgccagctcctacctgagcctgacacctgagcagtggaagtcccacagatcctacagctgccaagtgacccacgaaggcagcaccgtggaaaagacagtggcccctacagagtgcagcggcagagccgattgcggctttaccagcgagagctaccagcagggcgtgctgagcgccaccatcctgtacgagatcctgctgggcaaggccaccctgtacgccgtgctggtgtctgccctggtgctgatggctatggtcaagcggaaggacagccggggaagggccaagcgatctggatctggagcaacaaacttctcactactcaaacaagcaggtgacgtggaggagaatcccgggcctactagtatggactggatttggcgcatccttttccttgtcggcgctgctaccggcgcgcattccttcgaacaagttcagctggttcagagcggagccgaagtgaagaaacctggcagcagcgtgaaggtgtcctgcaaagcaagcggcggcacctttagcacctacgccatccactgggttcgacaggcaccaggacaaggactggaatggatgggcagaatcatccccatcgagggcagagcctactacgcccagaaattccagggcagagtgaccatcaccgccgacgagtctacaagcaccgcctacatggaactgagcagcctgagaagcgaggataccgctgtgtactattgcgccagaggccggtacagctacagatattggttcgactactggggccagggcaccctggttacagtctcttctacgcgtgcctctacaaagggaccctccgtgtttcctctggctcccagcagcaagtctacaagcggaggaacagccgctctgggctgcctggtcaaggattactttcccgagcctgtgaccgtgtcctggaatagcggagcactgacaagcggcgtgcacacctttccagccgtgctgcaaagcagcggcctgtactctctgagcagcgtggtcacagtgcctagctctagcctgggcacccagacctacatctgcaatgtgaaccacaagcctagcaacaccaaggtggacaagagagtggaacccaagagctgtatccccgaggacacattcttcccaagccccgagagcagctgcgacgtgaagctggtggaaaagagcttcgagacagacaccaacctgaacttccagaacctgagcgtgatcggcttcagaatcctgctgctgaaagtggccggctttaacctgctgatgaccctgcggctgtggtccagc

SEQ ID NO: 39847 - DNA, 1350 bp, synthetic construct
  source 1..1350: mol_type = other DNA
atggccttaccagtgaccgccttgctcctgccgctggccttgctgctccacgccgccaggccggagatcgtgctgacacagtctcccgccacactgtcactgtctccaggcgaaagagccacactgagctgtagagccagccagagcgtgtcctcttacctggcctggtatcagcagaagcctggacaggctccccggctgctgatctacgatgccagcaatagagccacaggcatccccgccagattttctggctctggcagcggcaccgatttcaccctgaccataagcagcctggaacctgaggacttcgccgtgtactactgccagcagagaagcaactggcccctgacctttggacagggcaccaaggtggaaatcaaaggcggaggcggaagtggaggcggaggatctggcggcggaggctctcaagttcagctggttcagagcggagccgaagtgaagaaacctggcagcagcgtgaaggtgtcctgcaaagcaagcggcggcacctttagcacctacgccatccactgggttcgacaggcaccaggacaaggactggaatggatgggcagaatcatccccatcgagggcagagcctactacgcccagaaattccagggcagagtgaccatcaccgccgacgagtctacaagcaccgcctacatggaactgagcagcctgagaagcgaggataccgctgtgtactattgcgccagaggccggtacagctacagatattggttcgactactggggccagggcaccctggttacagtctcttctacgcgtgacggtaacgaggagatgggaggaatcactcaaaccccttacaaagtctcaatttcaggaacaactgttatccttacatgtccccagtatcctggcagcgagatcctttggcagcataacgacaagaatatagggggagatgaagacgataagaatatcggatctgacgaggatcacttgagcctgaaagagttctccgagcttgaacaaagcggatattatgtgtgctatccgcgcgggtcaaagccggaagacgctaacttttacctttatctccgagccagagtgtgcgaaaattgcatggaaatggacgttatgtccgttgctacaatagttatcgtagatatatgcatcacgggtggactgcttctgctggtttattattggtccaagaatagaaaggccaaagctaaacccgtgaccagaggcgctggcgcaggcggaaggcaaaggggacaaaacaaagaacggccaccaccagtgccaaatccagattatgagcctattcggaaaggacagagggacctgtactctggcctgaatcagagaagaatc

SEQ ID NO: 39848 - DNA, 1245 bp, synthetic construct
  source 1..1245: mol_type = other DNA
atggccttaccagtgaccgccttgctcctgccgctggccttgctgctccacgccgccaggccggagatcgtgctgacacagtctcccgccacactgtcactgtctccaggcgaaagagccacactgagctgtagagccagccagagcgtgtcctcttacctggcctggtatcagcagaagcctggacaggctccccggctgctgatctacgatgccagcaatagagccacaggcatccccgccagattttctggctctggcagcggcaccgatttcaccctgaccataagcagcctggaacctgaggacttcgccgtgtactactgccagcagagaagcaactggcccctgacctttggacagggcaccaaggtggaaatcaaaggcggaggcggaagtggaggcggaggatctggcggcggaggctctcaagttcagctggttcagagcggagccgaagtgaagaaacctggcagcagcgtgaaggtgtcctgcaaagcaagcggcggcacctttagcacctacgccatccactgggttcgacaggcaccaggacaaggactggaatggatgggcagaatcatccccatcgagggcagagcctactacgcccagaaattccagggcagagtgaccatcaccgccgacgagtctacaagcaccgcctacatggaactgagcagcctgagaagcgaggataccgctgtgtactattgcgccagaggccggtacagctacagatattggttcgactactggggccagggcaccctggttacagtctcttctacgcgtttcaagatccccatcgaggaactggaagatcgggtgttcgtgaactgcaacacctctatcacctgggtggaaggcaccgtgggaacactgctgagcgacatcaccagactggacctcggcaagcggattctggaccctcggggcatctacagatgcaacggcaccgacatctacaaggacaaagaaagcaccgtgcaggtccactacagaatgtgccagtcctgcgtggaactggaccctgctacagtggccggcatcatcgtgaccgatgtgatcgctactctgctgctggctctgggagtgttctgcttcgccggacacgaaacaggcagactgtctggcgctgccgatacacaggccctgctgagaaacgaccaagtgtatcagcccctgcgcgacagagatgatgcccagtattctcacctcggcggcaactgggctagaaacaag

SEQ ID NO: 39849 - DNA, 1275 bp, synthetic construct
  source 1..1275: mol_type = other DNA
atggccttaccagtgaccgccttgctcctgccgctggccttgctgctccacgccgccaggccggagatcgtgctgacacagtctcccgccacactgtcactgtctccaggcgaaagagccacactgagctgtagagccagccagagcgtgtcctcttacctggcctggtatcagcagaagcctggacaggctccccggctgctgatctacgatgccagcaatagagccacaggcatccccgccagattttctggctctggcagcggcaccgatttcaccctgaccataagcagcctggaacctgaggacttcgccgtgtactactgccagcagagaagcaactggcccctgacctttggacagggcaccaaggtggaaatcaaaggcggaggcggaagtggaggcggaggatctggcggcggaggctctcaagttcagctggttcagagcggagccgaagtgaagaaacctggcagcagcgtgaaggtgtcctgcaaagcaagcggcggcacctttagcacctacgccatccactgggttcgacaggcaccaggacaaggactggaatggatgggcagaatcatccccatcgagggcagagcctactacgcccagaaattccagggcagagtgaccatcaccgccgacgagtctacaagcaccgcctacatggaactgagcagcctgagaagcgaggataccgctgtgtactattgcgccagaggccggtacagctacagatattggttcgactactggggccagggcaccctggttacagtctcttctacgcgtcagagcatcaagggcaaccacctggtcaaggtgtacgactaccaagaggacggcagcgtgctgctgacatgtgatgccgaggccaagaacatcacctggtttaaggacggcaagatgatcggcttcctgaccgaggacaagaagaagtggaacctgggcagcaacgctaaggaccccagaggcatgtatcagtgcaagggcagccagaacaagagcaagcccctccaggtgtactaccggatgtgccagaactgcatcgagctgaacgccgctaccatcagcggctttctgttcgccgagatcgtgtccatcttcgtgctggccgtgggcgtgtactttatcgctggacaggatggcgtgcggcagagcagagcttccgataagcaaaccctgctgcctaacgaccagctgtaccagcctctgaaggacagagaggacgaccagtacagccacctccagggcaatcagctgagaagaaac

SEQ ID NO: 39850 - DNA, 1224 bp, synthetic construct
  source 1..1224: mol_type = other DNA
atggccttaccagtgaccgccttgctcctgccgctggccttgctgctccacgccgccaggccggagatcgtgctgacacagtctcccgccacactgtcactgtctccaggcgaaagagccacactgagctgtagagccagccagagcgtgtcctcttacctggcctggtatcagcagaagcctggacaggctccccggctgctgatctacgatgccagcaatagagccacaggcatccccgccagattttctggctctggcagcggcaccgatttcaccctgaccataagcagcctggaacctgaggacttcgccgtgtactactgccagcagagaagcaactggcccctgacctttggacagggcaccaaggtggaaatcaaaggcggaggcggaagtggaggcggaggatctggcggcggaggctctcaagttcagctggttcagagcggagccgaagtgaagaaacctggcagcagcgtgaaggtgtcctgcaaagcaagcggcggcacctttagcacctacgccatccactgggttcgacaggcaccaggacaaggactggaatggatgggcagaatcatccccatcgagggcagagcctactacgcccagaaattccagggcagagtgaccatcaccgccgacgagtctacaagcaccgcctacatggaactgagcagcctgagaagcgaggataccgctgtgtactattgcgccagaggccggtacagctacagatattggttcgactactggggccagggcaccctggttacagtctcttctacgcgtcagagttttgggttgttggaccctaaattgtgctatctgttggacggaatcctgttcatttacggagtgatcctgaccgcattgttcctgcgggttaagttttccagatccgcagacgcacccgcttaccaacaagggcagaaccaactctacaatgaacttaatttggggcggagggaagagtacgacgttctggacaaaaggaggggacgagatcccgagatgggcggaaagcctcagcgaaggaagaatccgcaagaggggctttataacgaactccagaaagataaaatggcagaagcctatagtgagattgggatgaagggagaaaggaggaggggtaaaggtcacgatgggttgtaccaaggattgagcacagccactaaagatacctatgatgcgctccacatgcaggccctgccgccaaga

SEQ ID NO: 39851 - DNA, 1509 bp, synthetic construct
  source 1..1509: mol_type = other DNA
atggccttaccagtgaccgccttgctcctgccgctggccttgctgctccacgccgccaggccggagatcgtgctgacacagtctcccgccacactgtcactgtctccaggcgaaagagccacactgagctgtagagccagccagagcgtgtcctcttacctggcctggtatcagcagaagcctggacaggctccccggctgctgatctacgatgccagcaatagagccacaggcatccccgccagattttctggctctggcagcggcaccgatttcaccctgaccataagcagcctggaacctgaggacttcgccgtgtactactgccagcagagaagcaactggcccctgacctttggacagggcaccaaggtggaaatcaaaggcggaggcggaagtggaggcggaggatctggcggcggaggctctcaagttcagctggttcagagcggagccgaagtgaagaaacctggcagcagcgtgaaggtgtcctgcaaagcaagcggcggcacctttagcacctacgccatccactgggttcgacaggcaccaggacaaggactggaatggatgggcagaatcatccccatcgagggcagagcctactacgcccagaaattccagggcagagtgaccatcaccgccgacgagtctacaagcaccgcctacatggaactgagcagcctgagaagcgaggataccgctgtgtactattgcgccagaggccggtacagctacagatattggttcgactactggggccagggcaccctggttacagtctcttctacgcgtggaatgaggactgaggatcttcccaaagctgtcgtctttctcgaaccccaatggtatcgggtgctcgaaaaagactctgtgacactgaaatgccaaggggcctactctcccgaggacaactccacacagtggtttcataatgagtccctcatcagctctcaggccagctcttatttcattgatgccgctacagtggacgactccggcgagtatcggtgtcagaccaatctgtctacactgtctgaccccgtgcagcttgaggtccacattggatggttgctcttgcaagccccacgctgggttttcaaagaggaagatccaatccatctgcggtgccacagctggaaaaacaccgctctccacaaagtcacatacctgcaaaatggcaaaggacgcaaatacttccatcacaattccgatttttacattccgaaggctaccctgaaagacagcggcagctatttctgccggggactcgtcggctccaagaatgtgtcctccgaaaccgtgaatatcacgattacccaaggactggctgtgcctacaatctctagcttctttccgcctggataccaagtctccttctgtcttgtgatggtcctcctgtttgctgtggacacaggactgtacttttccgtgaaaacgaacatccgcagctccacacgcgattggaaagatcacaagtttaaatggcgcaaagatccccaggacaag

SEQ ID NO: 39852 - DNA, 1434 bp, synthetic construct
  source 1..1434: mol_type = other DNA
atggccttaccagtgaccgccttgctcctgccgctggccttgctgctccacgccgccaggccggagatcgtgctgacacagtctcccgccacactgtcactgtctccaggcgaaagagccacactgagctgtagagccagccagagcgtgtcctcttacctggcctggtatcagcagaagcctggacaggctccccggctgctgatctacgatgccagcaatagagccacaggcatccccgccagattttctggctctggcagcggcaccgatttcaccctgaccataagcagcctggaacctgaggacttcgccgtgtactactgccagcagagaagcaactggcccctgacctttggacagggcaccaaggtggaaatcaaaggcggaggcggaagtggaggcggaggatctggcggcggaggctctcaagttcagctggttcagagcggagccgaagtgaagaaacctggcagcagcgtgaaggtgtcctgcaaagcaagcggcggcacctttagcacctacgccatccactgggttcgacaggcaccaggacaaggactggaatggatgggcagaatcatccccatcgagggcagagcctactacgcccagaaattccagggcagagtgaccatcaccgccgacgagtctacaagcaccgcctacatggaactgagcagcctgagaagcgaggataccgctgtgtactattgcgccagaggccggtacagctacagatattggttcgactactggggccagggcaccctggttacagtctcttctacgcgtggaatgaggactgaggatcttcccaaagctgtcgtctttctcgaaccccaatggtatcgggtgctcgaaaaagactctgtgacactgaaatgccaaggggcctactctcccgaggacaactccacacagtggtttcataatgagtccctcatcagctctcaggccagctcttatttcattgatgccgctacagtggacgactccggcgagtatcggtgtcagaccaatctgtctacactgtctgaccccgtgcagcttgaggtccacattggatggttgctcttgcaagccccacgctgggttttcaaagaggaagatccaatccatctgcggtgccacagctggaaaaacaccgctctccacaaagtcacatacctgcaaaatggcaaaggacgcaaatacttccatcacaattccgatttttacattccgaaggctaccctgaaagacagcggcagctatttctgccggggactcgtcggctccaagaatgtgtcctccgaaaccgtgaatatcacgattacccaaggactggctgtgcctacaatctctagcttctttccgcctggataccaagtctccttctgtcttgtgatggtcctcctgtttgctgtggacacaggactgtacttttccgtg

SEQ ID NO: 39853 - DNA, 1437 bp, synthetic construct
  source 1..1437: mol_type = other DNA
atggccttaccagtgaccgccttgctcctgccgctggccttgctgctccacgccgccaggccggagatcgtgctgacacagtctcccgccacactgtcactgtctccaggcgaaagagccacactgagctgtagagccagccagagcgtgtcctcttacctggcctggtatcagcagaagcctggacaggctccccggctgctgatctacgatgccagcaatagagccacaggcatccccgccagattttctggctctggcagcggcaccgatttcaccctgaccataagcagcctggaacctgaggacttcgccgtgtactactgccagcagagaagcaactggcccctgacctttggacagggcaccaaggtggaaatcaaaggcggaggcggaagtggaggcggaggatctggcggcggaggctctcaagttcagctggttcagagcggagccgaagtgaagaaacctggcagcagcgtgaaggtgtcctgcaaagcaagcggcggcacctttagcacctacgccatccactgggttcgacaggcaccaggacaaggactggaatggatgggcagaatcatccccatcgagggcagagcctactacgcccagaaattccagggcagagtgaccatcaccgccgacgagtctacaagcaccgcctacatggaactgagcagcctgagaagcgaggataccgctgtgtactattgcgccagaggccggtacagctacagatattggttcgactactggggccagggcaccctggttacagtctcttctacgcgtggaatgaggactgaggatcttcccaaagctgtcgtctttctcgaaccccaatggtatcgggtgctcgaaaaagactctgtgacactgaaatgccaaggggcctactctcccgaggacaactccacacagtggtttcataatgagtccctcatcagctctcaggccagctcttatttcattgatgccgctacagtggacgactccggcgagtatcggtgtcagaccaatctgtctacactgtctgaccccgtgcagcttgaggtccacattggatggttgctcttgcaagccccacgctgggttttcaaagaggaagatccaatccatctgcggtgccacagctggaaaaacaccgctctccacaaagtcacatacctgcaaaatggcaaaggacgcaaatacttccatcacaattccgatttttacattccgaaggctaccctgaaagacagcggcagctatttctgccggggactcgtcggctccaagaatgtgtcctccgaaaccgtgaatatcacgattacccaaggactggctgtgcctacaatctctagcttctttccgcctggataccaagtctccttctgtcttgtgatggtcctcctgtttgctgtggacacaggactgtacttttccgtgaaa

SEQ ID NO: 39854 - DNA, 2169 bp, synthetic construct
  source 1..2169: mol_type = other DNA
atggccttaccagtgaccgccttgctcctgccgctggccttgctgctccacgccgccaggccggagatcgtgctgacacagtctcccgccacactgtcactgtctccaggcgaaagagccacactgagctgtagagccagccagagcgtgtcctcttacctggcctggtatcagcagaagcctggacaggctccccggctgctgatctacgatgccagcaatagagccacaggcatccccgccagattttctggctctggcagcggcaccgatttcaccctgaccataagcagcctggaacctgaggacttcgccgtgtactactgccagcagagaagcaactggcccctgacctttggacagggcaccaaggtggaaatcaaactcgagggacagcctaaggccaatcctaccgtgacactgttccctccaagcagcgaagaactccaggccaacaaggccacacttgtgtgcctgatctccgacttctaccctggggctgtgacagtggcttggaaggccgatggatctcctgtgaaagccggcgtggaaaccaccaagccatccaagcagagcaacaacaaatacgccgccagctcctacctgagcctgacacctgagcagtggaagtcccacagatcctacagctgccaagtgacccacgaaggcagcaccgtggaaaagacagtggcccctacagagtgcagcggatcccagagcttcggcctgctggaccccaagctgtgctacctgctggatggcatcctgttcatctacggcgtgatcctgaccgccctgttcctgagagtgaagttcagcagaagcgccgacgcccctgcctaccagcagggacagaaccaactgtacaacgagctgaacctgggcagacgggaagagtacgacgtgctggacaagcggagaggcagggaccctgagatgggcggaaagccccagcggagaaagaacccccaggaaggactgtataacgaactccagaaagacaagatggccgaagcctacagcgagatcggcatgaagggcgagcggagaagaggcaagggccacgatggcctgtaccagggcctgagcaccgccaccaaggacacctatgacgccctgcacatgcaggccctgcctccaagaagggccaagcgatctggatctggagcaacaaacttctcactactcaaacaagcaggtgacgtggaggagaatcccgggcctactagtatggactggatttggcgcatccttttccttgtcggcgctgctaccggcgcgcattccttcgaacaagttcagctggttcagagcggagccgaagtgaagaaacctggcagcagcgtgaaggtgtcctgcaaagcaagcggcggcacctttagcacctacgccatccactgggttcgacaggcaccaggacaaggactggaatggatgggcagaatcatccccatcgagggcagagcctactacgcccagaaattccagggcagagtgaccatcaccgccgacgagtctacaagcaccgcctacatggaactgagcagcctgagaagcgaggataccgctgtgtactattgcgccagaggccggtacagctacagatattggttcgactactggggccagggcaccctggttacagtctcttctacgcgtgcctctacaaagggaccctccgtgtttcctctggctcccagcagcaagtctacaagcggaggaacagccgctctgggctgcctggtcaaggattactttcccgagcctgtgaccgtgtcctggaatagcggagcactgacaagcggcgtgcacacctttccagccgtgctgcaaagcagcggcctgtactctctgagcagcgtggtcacagtgcctagctctagcctgggcacccagacctacatctgcaatgtgaaccacaagcctagcaacaccaaggtggacaagagagtggaacccaagagctgtggtaccatcactcaaggtttggcagtgtcaaccatctcatcattctttccacctggctaccaagtgtccttctgcctggtcatggtgctgctgttcgccgtggataccggcctgtacttcagcgtcaagaccaacatccggtccagcaccagagactggaaggaccacaagttcaagtggcggaaggaccctcaggacaag

SEQ ID NO: 39855 - DNA, 2214 bp, synthetic construct
  source 1..2214: mol_type = other DNA
atggccttaccagtgaccgccttgctcctgccgctggccttgctgctccacgccgccaggccggagatcgtgctgacacagtctcccgccacactgtcactgtctccaggcgaaagagccacactgagctgtagagccagccagagcgtgtcctcttacctggcctggtatcagcagaagcctggacaggctccccggctgctgatctacgatgccagcaatagagccacaggcatccccgccagattttctggctctggcagcggcaccgatttcaccctgaccataagcagcctggaacctgaggacttcgccgtgtactactgccagcagagaagcaactggcccctgacctttggacagggcaccaaggtggaaatcaaactcgaggacctgaagaacgtgttcccacctgaggtggccgtgttcgagcctagcgaggccgagatcagccacacccagaaagccaccctcgtgtgcctggctaccggcttctaccccgaccatgtggaactgtcttggtgggtcaacggcaaagaggtgcacagcggcgtgtctaccgacccccagccactgaaagaacagcccgccctgaacgacagccggtactgcctgagcagcagactgagagtgtccgccaccttctggcagaacccccggaaccacttcagatgccaggtgcagttctacggcctgagcgagaacgacgagtggacccaggacagagccaagcccgtgacccagatcgtgtctgccgaagcctggggcagagccgattgcggatcccagagcttcggcctgctggaccccaagctgtgctacctgctggatggcatcctgttcatctacggcgtgatcctgaccgccctgttcctgagagtgaagttcagcagaagcgccgacgcccctgcctaccagcagggacagaaccaactgtacaacgagctgaacctgggcagacgggaagagtacgacgtgctggacaagcggagaggcagggaccctgagatgggcggaaagccccagcggagaaagaacccccaggaaggactgtataacgaactccagaaagacaagatggccgaagcctacagcgagatcggcatgaagggcgagcggagaagaggcaagggccacgatggcctgtaccagggcctgagcaccgccaccaaggacacctatgacgccctgcacatgcaggccctgcctccaagaagggccaagcgatctggatctggagcaacaaacttctcactactcaaacaagcaggtgacgtggaggagaatcccgggcctactagtatggactggatttggcgcatccttttccttgtcggcgctgctaccggcgcgcattccttcgaacaagttcagctggttcagagcggagccgaagtgaagaaacctggcagcagcgtgaaggtgtcctgcaaagcaagcggcggcacctttagcacctacgccatccactgggttcgacaggcaccaggacaaggactggaatggatgggcagaatcatccccatcgagggcagagcctactacgcccagaaattccagggcagagtgaccatcaccgccgacgagtctacaagcaccgcctacatggaactgagcagcctgagaagcgaggataccgctgtgtactattgcgccagaggccggtacagctacagatattggttcgactactggggccagggcaccctggttacagtctcttctacgcgtatccagaaccctgatcctgccgtgtaccagctgcgggatagcaagagcagcgacaagagcgtgtgtctgttcaccgacttcgacagccagaccaacgtgtcccagagcaaggactccgacgtgtacatcaccgataagaccgtgctggacatgcggagcatggacttcaagagcaactccgccgtggcctggtccaacaagtccgatttcgcctgcgccaacgccttcaacaacagcattatccccgaggacacattcttcccaagccccgagagcagctgcggtaccatcactcaaggtttggcagtgtcaaccatctcatcattctttccacctggctaccaagtgtccttctgcctggtcatggtgctgctgttcgccgtggataccggcctgtacttcagcgtcaagaccaacatccggtccagcaccagagactggaaggaccacaagttcaagtggcggaaggaccctcaggacaag

SEQ ID NO: 39856 - DNA, 2139 bp, synthetic construct
  source 1..2139: mol_type = other DNA
atggccttaccagtgaccgccttgctcctgccgctggccttgctgctccacgccgccaggccggagatcgtgctgacacagtctcccgccacactgtcactgtctccaggcgaaagagccacactgagctgtagagccagccagagcgtgtcctcttacctggcctggtatcagcagaagcctggacaggctccccggctgctgatctacgatgccagcaatagagccacaggcatccccgccagattttctggctctggcagcggcaccgatttcaccctgaccataagcagcctggaacctgaggacttcgccgtgtactactgccagcagagaagcaactggcccctgacctttggacagggcaccaaggtggaaatcaaactcgaggacctgaagaacgtgttcccacctgaggtggccgtgttcgagcctagcgaggccgagatcagccacacccagaaagccaccctcgtgtgcctggctaccggcttctaccccgaccatgtggaactgtcttggtgggtcaacggcaaagaggtgcacagcggcgtgtctaccgacccccagccactgaaagaacagcccgccctgaacgacagccggtactgcctgagcagcagactgagagtgtccgccaccttctggcagaacccccggaaccacttcagatgccaggtgcagttctacggcctgagcgagaacgacgagtggacccaggacagagccaagcccgtgacccagatcgtgtctgccgaagcctggggcagagccgattgcggatcccagagcttcggcctgctggaccccaagctgtgctacctgctggatggcatcctgttcatctacggcgtgatcctgaccgccctgttcctgagagtgaagttcagcagaagcgccgacgcccctgcctaccagcagggacagaaccaactgtacaacgagctgaacctgggcagacgggaagagtacgacgtgctggacaagcggagaggcagggaccctgagatgggcggaaagccccagcggagaaagaacccccaggaaggactgtataacgaactccagaaagacaagatggccgaagcctacagcgagatcggcatgaagggcgagcggagaagaggcaagggccacgatggcctgtaccagggcctgagcaccgccaccaaggacacctatgacgccctgcacatgcaggccctgcctccaagaagggccaagcgatctggatctggagcaacaaacttctcactactcaaacaagcaggtgacgtggaggagaatcccgggcctactagtatggactggatttggcgcatccttttccttgtcggcgctgctaccggcgcgcattccttcgaacaagttcagctggttcagagcggagccgaagtgaagaaacctggcagcagcgtgaaggtgtcctgcaaagcaagcggcggcacctttagcacctacgccatccactgggttcgacaggcaccaggacaaggactggaatggatgggcagaatcatccccatcgagggcagagcctactacgcccagaaattccagggcagagtgaccatcaccgccgacgagtctacaagcaccgcctacatggaactgagcagcctgagaagcgaggataccgctgtgtactattgcgccagaggccggtacagctacagatattggttcgactactggggccagggcaccctggttacagtctcttctacgcgtatccagaaccctgatcctgccgtgtaccagctgcgggatagcaagagcagcgacaagagcgtgtgtctgttcaccgacttcgacagccagaccaacgtgtcccagagcaaggactccgacgtgtacatcaccgataagaccgtgctggacatgcggagcatggacttcaagagcaactccgccgtggcctggtccaacaagtccgatttcgcctgcgccaacgccttcaacaacagcattatccccgaggacacattcttcccaagccccgagagcagctgcggtaccatcactcaaggtttggcagtgtcaaccatctcatcattctttccacctggctaccaagtgtccttctgcctggtcatggtgctgctgttcgccgtggataccggcctgtacttcagcgtc

SEQ ID NO: 39857 - DNA, 2142 bp, synthetic construct
  source 1..2142: mol_type = other DNA
atggccttaccagtgaccgccttgctcctgccgctggccttgctgctccacgccgccaggccggagatcgtgctgacacagtctcccgccacactgtcactgtctccaggcgaaagagccacactgagctgtagagccagccagagcgtgtcctcttacctggcctggtatcagcagaagcctggacaggctccccggctgctgatctacgatgccagcaatagagccacaggcatccccgccagattttctggctctggcagcggcaccgatttcaccctgaccataagcagcctggaacctgaggacttcgccgtgtactactgccagcagagaagcaactggcccctgacctttggacagggcaccaaggtggaaatcaaactcgaggacctgaagaacgtgttcccacctgaggtggccgtgttcgagcctagcgaggccgagatcagccacacccagaaagccaccctcgtgtgcctggctaccggcttctaccccgaccatgtggaactgtcttggtgggtcaacggcaaagaggtgcacagcggcgtgtctaccgacccccagccactgaaagaacagcccgccctgaacgacagccggtactgcctgagcagcagactgagagtgtccgccaccttctggcagaacccccggaaccacttcagatgccaggtgcagttctacggcctgagcgagaacgacgagtggacccaggacagagccaagcccgtgacccagatcgtgtctgccgaagcctggggcagagccgattgcggatcccagagcttcggcctgctggaccccaagctgtgctacctgctggatggcatcctgttcatctacggcgtgatcctgaccgccctgttcctgagagtgaagttcagcagaagcgccgacgcccctgcctaccagcagggacagaaccaactgtacaacgagctgaacctgggcagacgggaagagtacgacgtgctggacaagcggagaggcagggaccctgagatgggcggaaagccccagcggagaaagaacccccaggaaggactgtataacgaactccagaaagacaagatggccgaagcctacagcgagatcggcatgaagggcgagcggagaagaggcaagggccacgatggcctgtaccagggcctgagcaccgccaccaaggacacctatgacgccctgcacatgcaggccctgcctccaagaagggccaagcgatctggatctggagcaacaaacttctcactactcaaacaagcaggtgacgtggaggagaatcccgggcctactagtatggactggatttggcgcatccttttccttgtcggcgctgctaccggcgcgcattccttcgaacaagttcagctggttcagagcggagccgaagtgaagaaacctggcagcagcgtgaaggtgtcctgcaaagcaagcggcggcacctttagcacctacgccatccactgggttcgacaggcaccaggacaaggactggaatggatgggcagaatcatccccatcgagggcagagcctactacgcccagaaattccagggcagagtgaccatcaccgccgacgagtctacaagcaccgcctacatggaactgagcagcctgagaagcgaggataccgctgtgtactattgcgccagaggccggtacagctacagatattggttcgactactggggccagggcaccctggttacagtctcttctacgcgtatccagaaccctgatcctgccgtgtaccagctgcgggatagcaagagcagcgacaagagcgtgtgtctgttcaccgacttcgacagccagaccaacgtgtcccagagcaaggactccgacgtgtacatcaccgataagaccgtgctggacatgcggagcatggacttcaagagcaactccgccgtggcctggtccaacaagtccgatttcgcctgcgccaacgccttcaacaacagcattatccccgaggacacattcttcccaagccccgagagcagctgcggtaccatcactcaaggtttggcagtgtcaaccatctcatcattctttccacctggctaccaagtgtccttctgcctggtcatggtgctgctgttcgccgtggataccggcctgtacttcagcgtcaag

SEQ ID NO: 39858 - DNA, 2145 bp, synthetic construct
  source 1..2145: mol_type = other DNA
atggccttaccagtgaccgccttgctcctgccgctggccttgctgctccacgccgccaggccggagatcgtgctgacacagtctcccgccacactgtcactgtctccaggcgaaagagccacactgagctgtagagccagccagagcgtgtcctcttacctggcctggtatcagcagaagcctggacaggctccccggctgctgatctacgatgccagcaatagagccacaggcatccccgccagattttctggctctggcagcggcaccgatttcaccctgaccataagcagcctggaacctgaggacttcgccgtgtactactgccagcagagaagcaactggcccctgacctttggacagggcaccaaggtggaaatcaaactcgaggacctgaagaacgtgttcccacctgaggtggccgtgttcgagcctagcgaggccgagatcagccacacccagaaagccaccctcgtgtgcctggctaccggcttctaccccgaccatgtggaactgtcttggtgggtcaacggcaaagaggtgcacagcggcgtgtctaccgacccccagccactgaaagaacagcccgccctgaacgacagccggtactgcctgagcagcagactgagagtgtccgccaccttctggcagaacccccggaaccacttcagatgccaggtgcagttctacggcctgagcgagaacgacgagtggacccaggacagagccaagcccgtgacccagatcgtgtctgccgaagcctggggcagagccgattgcggatcccagagcttcggcctgctggaccccaagctgtgctacctgctggatggcatcctgttcatctacggcgtgatcctgaccgccctgttcctgagagtgaagttcagcagaagcgccgacgcccctgcctaccagcagggacagaaccaactgtacaacgagctgaacctgggcagacgggaagagtacgacgtgctggacaagcggagaggcagggaccctgagatgggcggaaagccccagcggagaaagaacccccaggaaggactgtataacgaactccagaaagacaagatggccgaagcctacagcgagatcggcatgaagggcgagcggagaagaggcaagggccacgatggcctgtaccagggcctgagcaccgccaccaaggacacctatgacgccctgcacatgcaggccctgcctccaagaagggccaagcgatctggatctggagcaacaaacttctcactactcaaacaagcaggtgacgtggaggagaatcccgggcctactagtatggactggatttggcgcatccttttccttgtcggcgctgctaccggcgcgcattccttcgaacaagttcagctggttcagagcggagccgaagtgaagaaacctggcagcagcgtgaaggtgtcctgcaaagcaagcggcggcacctttagcacctacgccatccactgggttcgacaggcaccaggacaaggactggaatggatgggcagaatcatccccatcgagggcagagcctactacgcccagaaattccagggcagagtgaccatcaccgccgacgagtctacaagcaccgcctacatggaactgagcagcctgagaagcgaggataccgctgtgtactattgcgccagaggccggtacagctacagatattggttcgactactggggccagggcaccctggttacagtctcttctacgcgtatccagaaccctgatcctgccgtgtaccagctgcgggatagcaagagcagcgacaagagcgtgtgtctgttcaccgacttcgacagccagaccaacgtgtcccagagcaaggactccgacgtgtacatcaccgataagaccgtgctggacatgcggagcatggacttcaagagcaactccgccgtggcctggtccaacaagtccgatttcgcctgcgccaacgccttcaacaacagcattatccccgaggacacattcttcccaagccccgagagcagctgcggtaccatcactcaaggtttggcagtgtcaaccatctcatcattctttccacctggctaccaagtgtccttctgcctggtcatggtgctgctgttcgccgtggataccggcctgtacttcagcgtcaagacc

SEQ ID NO: 39859 - DNA, 1956 bp, synthetic construct
  source 1..1956: mol_type = other DNA
atggccttaccagtgaccgccttgctcctgccgctggccttgctgctccacgccgccaggccggagatcgtgctgacacagtctcccgccacactgtcactgtctccaggcgaaagagccacactgagctgtagagccagccagagcgtgtcctcttacctggcctggtatcagcagaagcctggacaggctccccggctgctgatctacgatgccagcaatagagccacaggcatccccgccagattttctggctctggcagcggcaccgatttcaccctgaccataagcagcctggaacctgaggacttcgccgtgtactactgccagcagagaagcaactggcccctgacctttggacagggcaccaaggtggaaatcaaactcgagggacagcctaaggccaatcctaccgtgacactgttccctccaagcagcgaagaactccaggccaacaaggccacacttgtgtgcctgatctccgacttctaccctggggctgtgacagtggcttggaaggccgatggatctcctgtgaaagccggcgtggaaaccaccaagccatccaagcagagcaacaacaaatacgccgccagctcctacctgagcctgacacctgagcagtggaagtcccacagatcctacagctgccaagtgacccacgaaggcagcaccgtggaaaagacagtggcccctacagagtgcagcggatccctgggagagcctcagctgtgctatatcctggacgccatcctgtttctgtacggcatcgtgctgaccctgctgtactgccggctgaagatccaagtgcggaaggccgccatcaccagctacgagaaatccgacggcgtgtacaccggcctgagcaccagaaatcaagagacatacgagacactgaagcacgaaaagcctccacaaagggccaagcgatctggatctggagcaacaaacttctcactactcaaacaagcaggtgacgtggaggagaatcccgggcctactagtatggactggatttggcgcatccttttccttgtcggcgctgctaccggcgcgcattccttcgaacaagttcagctggttcagagcggagccgaagtgaagaaacctggcagcagcgtgaaggtgtcctgcaaagcaagcggcggcacctttagcacctacgccatccactgggttcgacaggcaccaggacaaggactggaatggatgggcagaatcatccccatcgagggcagagcctactacgcccagaaattccagggcagagtgaccatcaccgccgacgagtctacaagcaccgcctacatggaactgagcagcctgagaagcgaggataccgctgtgtactattgcgccagaggccggtacagctacagatattggttcgactactggggccagggcaccctggttacagtctcttctacgcgtgcctctacaaagggaccctccgtgtttcctctggctcccagcagcaagtctacaagcggaggaacagccgctctgggctgcctggtcaaggattactttcccgagcctgtgaccgtgtcctggaatagcggagcactgacaagcggcgtgcacacctttccagccgtgctgcaaagcagcggcctgtactctctgagcagcgtggtcacagtgcctagctctagcctgggcacccagacctacatctgcaatgtgaaccacaagcctagcaacaccaaggtggacaagagagtggaacccaagagctgtggtaccctcggagaaccacagctctgttacattctggatgctatcctgttcctctatgggatcgtcctgacactcctgtattgcagactcaaaattcaagttcgcaaagccgccattacctcttacgagaagagtgatggggtgtacacaggactgtctacccggaatcaagaaacctacgaaaccctcaaacatgagaagccacctcagtaa

SEQ ID NO: 39860 - DNA, 1863 bp, synthetic construct
  source 1..1863: mol_type = other DNA
atggccttaccagtgaccgccttgctcctgccgctggccttgctgctccacgccgccaggccggagatcgtgctgacacagtctcccgccacactgtcactgtctccaggcgaaagagccacactgagctgtagagccagccagagcgtgtcctcttacctggcctggtatcagcagaagcctggacaggctccccggctgctgatctacgatgccagcaatagagccacaggcatccccgccagattttctggctctggcagcggcaccgatttcaccctgaccataagcagcctggaacctgaggacttcgccgtgtactactgccagcagagaagcaactggcccctgacctttggacagggcaccaaggtggaaatcaaactcgaggacctgaagaacgtgttcccacctgaggtggccgtgttcgagcctagcgaggccgagatcagccacacccagaaagccaccctcgtgtgcctggctaccggcttctaccccgaccatgtggaactgtcttggtgggtcaacggcaaagaggtgcacagcggcgtgtgtaccgacccccagccactgaaagaacagcccgccctgaacgacagccggtactgcctgagcagcagactgagagtgtccgccaccttctggcagaacccccggaaccacttcagatgccaggtgcagttctacggcctgagcgagaacgacgagtggacccaggacagagccaagcccgtgacccagatcgtgtctgccgaagcctggggcagagccgattgcggctttaccagcgagagctaccagcagggcgtgctgagcgcctactacatgtacttgttgctgctgctgaagtccgtggtgtacttcgccatcatcacatgctgcctgctgcggagaaccgccttctgctgcaacggcgagaagtctagggccaagcgatctggatctggagcaacaaacttctcactactcaaacaagcaggtgacgtggaggagaatcccgggcctactagtatggactggatttggcgcatccttttccttgtcggcgctgctaccggcgcgcattccttcgaacaagttcagctggttcagagcggagccgaagtgaagaaacctggcagcagcgtgaaggtgtcctgcaaagcaagcggcggcacctttagcacctacgccatccactgggttcgacaggcaccaggacaaggactggaatggatgggcagaatcatccccatcgagggcagagcctactacgcccagaaattccagggcagagtgaccatcaccgccgacgagtctacaagcaccgcctacatggaactgagcagcctgagaagcgaggataccgctgtgtactattgcgccagaggccggtacagctacagatattggttcgactactggggccagggcaccctggttacagtctcttctacgcgtatccagaaccctgatcctgccgtgtaccagctgcgggatagcaagagcagcgacaagagcgtgtgtctgttcaccgacttcgacagccagaccaacgtgtcccagagcaaggactccgacgtgtacatcaccgataagtgcgtgctggacatgcggagcatggacttcaagagcaactccgccgtggcctggtccaacaagtccgatttcgcctgcgccaacgccttcaacaacagcattatccccgaggacacattcttcccaagccccgagagcagctgcgacgtgaagctggtggaaaagagcttcgagacagacaccaacctgaacttccagaacctgagcgtgatcggcttcagaatcctgctgctgaaagtggccggctttaacctgctgatgaccctgcggctgtggtccagc

SEQ ID NO: 39861 - DNA, 1884 bp, synthetic construct
  source 1..1884: mol_type = other DNA
atggccttaccagtgaccgccttgctcctgccgctggccttgctgctccacgccgccaggccggagatcgtgctgacacagtctcccgccacactgtcactgtctccaggcgaaagagccacactgagctgtagagccagccagagcgtgtcctcttacctggcctggtatcagcagaagcctggacaggctccccggctgctgatctacgatgccagcaatagagccacaggcatccccgccagattttctggctctggcagcggcaccgatttcaccctgaccataagcagcctggaacctgaggacttcgccgtgtactactgccagcagagaagcaactggcccctgacctttggacagggcaccaaggtggaaatcaaactcgaggacaagcagctggacgccgacgtgtcccccaagcctaccatcttcctgccctctatcgccgagacaaagctccagaaggccggcacctacctgtgcctgctggaaaagttcttcccagatgtgattaagatccactggcaggaaaagaagtccaacaccatcctgggcagccaggaaggcaacaccatgaagaccaacgacacctacatgaagttcagctggctgaccgtgcccgagaagtccctggacaaagaacacagatgcatcgtgcggcacgaaaacaacaagaacggcgtggaccaggaaatcatcttcccacccatcaagaccgatgtgattacaatggaccccaaggacaactgctccaaggacgccaacgataccctgctgctccagctgaccaacaccagcgcctactacatgtacgagatcctgctgggcaaggccaccctgtacgccgtgctggtgtctgccctggtgctgatggctatggtcaagcggaaggacagccggggaagggccaagcgatctggatctggagcaacaaacttctcactactcaaacaagcaggtgacgtggaggagaatcccgggcctactagtatggactggatttggcgcatccttttccttgtcggcgctgctaccggcgcgcattccttcgaacaagttcagctggttcagagcggagccgaagtgaagaaacctggcagcagcgtgaaggtgtcctgcaaagcaagcggcggcacctttagcacctacgccatccactgggttcgacaggcaccaggacaaggactggaatggatgggcagaatcatccccatcgagggcagagcctactacgcccagaaattccagggcagagtgaccatcaccgccgacgagtctacaagcaccgcctacatggaactgagcagcctgagaagcgaggataccgctgtgtactattgcgccagaggccggtacagctacagatattggttcgactactggggccagggcaccctggttacagtctcttctacgcgtagccagcctcacaccaagcccagcgtgttcgtgatgaagaacggcaccaacgtggcctgcctcgtgaaagagttctaccccaaggacatcaggatcaacctggtgtccagcaagaagatcaccgagttcgaccccgccatcgtgatctcccccagcggcaagtacaacgccgtgaagctggggaagtatgaggacagcaacagcgtgacctgctccgtgcagcacgacaacaagaccgtgcacagcaccgactttgaagtgaaaaccgactccaccgaccacgtgaagcccaaagagacagagaacaccaagcagcccagcaagagctgccacaagcccaaggccatcgtgcacaccgagaaagtgaacatgatgagcctgaccgtgatcggcttcagaatcctgctgctgaaagtggccggctttaacctgctgatgaccctgcggctgtggtccagctaa

SEQ ID NO: 39862 - DNA, 1884 bp, synthetic construct
  source 1..1884: mol_type = other DNA
atggccttaccagtgaccgccttgctcctgccgctggccttgctgctccacgccgccaggccggagatcgtgctgacacagtctcccgccacactgtcactgtctccaggcgaaagagccacactgagctgtagagccagccagagcgtgtcctcttacctggcctggtatcagcagaagcctggacaggctccccggctgctgatctacgatgccagcaatagagccacaggcatccccgccagattttctggctctggcagcggcaccgatttcaccctgaccataagcagcctggaacctgaggacttcgccgtgtactactgccagcagagaagcaactggcccctgacctttggacagggcaccaaggtggaaatcaaactcgaggacaagcagctggacgccgacgtgtcccccaagcctaccatcttcctgccctctatcgccgagacaaagctccagaaggccggcacctacctgtgcctgctggaaaagttcttcccagatgtgattaagatccactggcaggaaaagaagtccaacaccatcctgggcagccaggaaggcaacaccatgaagaccaacgacacctacatgaagttcagctggctgaccgtgcccgagaagtccctggacaaagaacacagatgcatcgtgcggcacgaaaacaacaagaacggcgtggaccaggaaatcatcttcccacccatcaagaccgatgtgattacaatggaccccaaggacaactgctccaaggacgccaacgataccctgctgctccagctgaccaacaccagcgccaccatcctgtacgagatcctgctgggcaaggccaccctgtacgccgtgctggtgtctgccctggtgctgatggctatggtcaagcggaaggacagccggggaagggccaagcgatctggatctggagcaacaaacttctcactactcaaacaagcaggtgacgtggaggagaatcccgggcctactagtatggactggatttggcgcatccttttccttgtcggcgctgctaccggcgcgcattccttcgaacaagttcagctggttcagagcggagccgaagtgaagaaacctggcagcagcgtgaaggtgtcctgcaaagcaagcggcggcacctttagcacctacgccatccactgggttcgacaggcaccaggacaaggactggaatggatgggcagaatcatccccatcgagggcagagcctactacgcccagaaattccagggcagagtgaccatcaccgccgacgagtctacaagcaccgcctacatggaactgagcagcctgagaagcgaggataccgctgtgtactattgcgccagaggccggtacagctacagatattggttcgactactggggccagggcaccctggttacagtctcttctacgcgtagccagcctcacaccaagcccagcgtgttcgtgatgaagaacggcaccaacgtggcctgcctcgtgaaagagttctaccccaaggacatcaggatcaacctggtgtccagcaagaagatcaccgagttcgaccccgccatcgtgatctcccccagcggcaagtacaacgccgtgaagctggggaagtatgaggacagcaacagcgtgacctgctccgtgcagcacgacaacaagaccgtgcacagcaccgactttgaagtgaaaaccgactccaccgaccacgtgaagcccaaagagacagagaacaccaagcagcccagcaagagctgccacaagcccaaggccatcgtgcacaccgagaaagtgaacatgatgagcctgaccgtgatcggcttcagaatcctgctgctgaaagtggccggctttaacctgctgatgaccctgcggctgtggtccagctaa

SEQ ID NO: 39863 - DNA, 1884 bp, synthetic construct
  source 1..1884: mol_type = other DNA
atggccttaccagtgaccgccttgctcctgccgctggccttgctgctccacgccgccaggccggagatcgtgctgacacagtctcccgccacactgtcactgtctccaggcgaaagagccacactgagctgtagagccagccagagcgtgtcctcttacctggcctggtatcagcagaagcctggacaggctccccggctgctgatctacgatgccagcaatagagccacaggcatccccgccagattttctggctctggcagcggcaccgatttcaccctgaccataagcagcctggaacctgaggacttcgccgtgtactactgccagcagagaagcaactggcccctgacctttggacagggcaccaaggtggaaatcaaactcgaggacaagcagctggacgccgacgtgtcccccaagcctaccatcttcctgccctctatcgccgagacaaagctccagaaggccggcacctacctgtgcctgctggaaaagttcttcccagatgtgattaagatccactggcaggaaaagaagtccaacaccatcctgggcagccaggaaggcaacaccatgaagaccaacgacacctacatgaagttcagctggctgaccgtgcccgagaagtccctggacaaagaacacagatgcatcgtgcggcacgaaaacaacaagaacggcgtggaccaggaaatcatcttcccacccatcaagaccgatgtgattacaatggaccccaaggacaactgctccaaggacgccaacgataccctgctgctccagctgaccaacaccagcgcctactacatgtacgagatcctgctgggcaaggccaccctgtacgccgtgctggtgtctgccctggtgctgatggctatggtcaagcggaaggacagccggggaagggccaagcgatctggatctggagcaacaaacttctcactactcaaacaagcaggtgacgtggaggagaatcccgggcctactagtatggactggatttggcgcatccttttccttgtcggcgctgctaccggcgcgcattccttcgaacaagttcagctggttcagagcggagccgaagtgaagaaacctggcagcagcgtgaaggtgtcctgcaaagcaagcggcggcacctttagcacctacgccatccactgggttcgacaggcaccaggacaaggactggaatggatgggcagaatcatccccatcgagggcagagcctactacgcccagaaattccagggcagagtgaccatcaccgccgacgagtctacaagcaccgcctacatggaactgagcagcctgagaagcgaggataccgctgtgtactattgcgccagaggccggtacagctacagatattggttcgactactggggccagggcaccctggttacagtctcttctacgcgtagccagcctcacaccaagcccagcgtgttcgtgatgaagaacggcaccaacgtggcctgcctcgtgaaagagttctaccccaaggacatcaggatcaacctggtgtccagcaagaagatcaccgagttcgaccccgccatcgtgatctcccccagcggcaagtacaacgccgtgaagctggggaagtacgaggacagcaacagcgtgacctgctccgtgcagcacgacaacaagaccgtgcacagcaccgactttgaagtgaaaaccgactccaccgaccacgtgaagcccaaagagacagagaacaccaagcagcccagcaagagctgccacaagcccaaggccatcgtgcacaccgagaaagtgaacatgatgagcctgaccgtgctgggcttcagaatcctgctgctgaaagtggccggctttaacctgctgatgaccctgcggctgtggtccagctaa

SEQ ID NO: 39864 - DNA, 1884 bp, synthetic construct
  source 1..1884: mol_type = other DNA
atggccttaccagtgaccgccttgctcctgccgctggccttgctgctccacgccgccaggccggagatcgtgctgacacagtctcccgccacactgtcactgtctccaggcgaaagagccacactgagctgtagagccagccagagcgtgtcctcttacctggcctggtatcagcagaagcctggacaggctccccggctgctgatctacgatgccagcaatagagccacaggcatccccgccagattttctggctctggcagcggcaccgatttcaccctgaccataagcagcctggaacctgaggacttcgccgtgtactactgccagcagagaagcaactggcccctgacctttggacagggcaccaaggtggaaatcaaactcgaggacaagcagctggacgccgacgtgtcccccaagcctaccatcttcctgccctctatcgccgagacaaagctccagaaggccggcacctacctgtgcctgctggaaaagttcttcccagatgtgattaagatccactggcaggaaaagaagtccaacaccatcctgggcagccaggaaggcaacaccatgaagaccaacgacacctacatgaagttcagctggctgaccgtgcccgagaagtccctggacaaagaacacagatgcatcgtgcggcacgaaaacaacaagaacggcgtggaccaggaaatcatcttcccacccatcaagaccgatgtgattacaatggaccccaaggacaactgctccaaggacgccaacgataccctgctgctccagctgaccaacaccagcgccaccatcctgtacgagatcctgctgggcaaggccaccctgtacgccgtgctggtgtctgccctggtgctgatggctatggtcaagcggaaggacagccggggaagggccaagcgatctggatctggagcaacaaacttctcactactcaaacaagcaggtgacgtggaggagaatcccgggcctactagtatggactggatttggcgcatccttttccttgtcggcgctgctaccggcgcgcattccttcgaacaagttcagctggttcagagcggagccgaagtgaagaaacctggcagcagcgtgaaggtgtcctgcaaagcaagcggcggcacctttagcacctacgccatccactgggttcgacaggcaccaggacaaggactggaatggatgggcagaatcatccccatcgagggcagagcctactacgcccagaaattccagggcagagtgaccatcaccgccgacgagtctacaagcaccgcctacatggaactgagcagcctgagaagcgaggataccgctgtgtactattgcgccagaggccggtacagctacagatattggttcgactactggggccagggcaccctggttacagtctcttctacgcgtagccagcctcacaccaagcccagcgtgttcgtgatgaagaacggcaccaacgtggcctgcctcgtgaaagagttctaccccaaggacatcaggatcaacctggtgtccagcaagaagatcaccgagttcgaccccgccatcgtgatctcccccagcggcaagtacaacgccgtgaagctggggaagtacgaggacagcaacagcgtgacctgctccgtgcagcacgacaacaagaccgtgcacagcaccgactttgaagtgaaaaccgactccaccgaccacgtgaagcccaaagagacagagaacaccaagcagcccagcaagagctgccacaagcccaaggccatcgtgcacaccgagaaagtgaacatgatgagcctgaccgtgctgggcttcagaatcctgctgctgaaagtggccggctttaacctgctgatgaccctgcggctgtggtccagctaa

SEQ ID NO: 39865 - DNA, 1866 bp, synthetic construct
  source 1..1866: mol_type = other DNA
atggccttaccagtgaccgccttgctcctgccgctggccttgctgctccacgccgccaggccggagatcgtgctgacacagtctcccgccacactgtcactgtctccaggcgaaagagccacactgagctgtagagccagccagagcgtgtcctcttacctggcctggtatcagcagaagcctggacaggctccccggctgctgatctacgatgccagcaatagagccacaggcatccccgccagattttctggctctggcagcggcaccgatttcaccctgaccataagcagcctggaacctgaggacttcgccgtgtactactgccagcagagaagcaactggcccctgacctttggacagggcaccaaggtggaaatcaaactcgaggacctgaagaacgtgttcccacctgaggtggccgtgttcgagcctagcgaggccgagatcagccacacccagaaagccaccctcgtgtgcctggctaccggcttctaccccgaccatgtggaactgtcttggtgggtcaacggcaaagaggtgcacagcggcgtgtgtaccgacccccagccactgaaagaacagcccgccctgaacgacagccggtactgcctgagcagcagactgagagtgtccgccaccttctggcagaacccccggaaccacttcagatgccaggtgcagttctacggcctgagcgagaacgacgagtggacccaggacagagccaagcccgtgacccagatcgtgtctgccgaagcctggggcagagccgattgcggctttaccagcgagagctaccagcagggcgtgctgagcgccaccatcctgtacttgttgctgctgctgaagtccgtggtgtacttcgccatcatcacatgctgcctgctgcggagaaccgccttctgctgcaacggcgagaagtctagggccaagcgatctggatctggagcaacaaacttctcactactcaaacaagcaggtgacgtggaggagaatcccgggcctactagtatggactggatttggcgcatccttttccttgtcggcgctgctaccggcgcgcattccttcgaacaagttcagctggttcagagcggagccgaagtgaagaaacctggcagcagcgtgaaggtgtcctgcaaagcaagcggcggcacctttagcacctacgccatccactgggttcgacaggcaccaggacaaggactggaatggatgggcagaatcatccccatcgagggcagagcctactacgcccagaaattccagggcagagtgaccatcaccgccgacgagtctacaagcaccgcctacatggaactgagcagcctgagaagcgaggataccgctgtgtactattgcgccagaggccggtacagctacagatattggttcgactactggggccagggcaccctggttacagtctcttctacgcgtatccagaaccctgatcctgccgtgtaccagctgcgggatagcaagagcagcgacaagagcgtgtgtctgttcaccgacttcgacagccagaccaacgtgtcccagagcaaggactccgacgtgtacatcaccgataagtgcgtgctggacatgcggagcatggacttcaagagcaactccgccgtggcctggtccaacaagtccgatttcgcctgcgccaacgccttcaacaacagcattatccccgaggacacattcttcccaagccccgagagcagctgcgacgtgaagctggtggaaaagagcttcgagacagacaccaacctgaacttccagaacctgagcgtgatcggcctgcggatgctgttcgccaaaaccgtggccgtgaacttcctgctgaccgccaagctgttcttcctctaa

SEQ ID NO: 39866 - DNA, 1953 bp, synthetic construct
  source 1..1953: mol_type = other DNA
atggccttaccagtgaccgccttgctcctgccgctggccttgctgctccacgccgccaggccggagatcgtgctgacacagtctcccgccacactgtcactgtctccaggcgaaagagccacactgagctgtagagccagccagagcgtgtcctcttacctggcctggtatcagcagaagcctggacaggctccccggctgctgatctacgatgccagcaatagagccacaggcatccccgccagattttctggctctggcagcggcaccgatttcaccctgaccataagcagcctggaacctgaggacttcgccgtgtactactgccagcagagaagcaactggcccctgacctttggacagggcaccaaggtggaaatcaaactcgaggacctgaagaacgtgttcccacctgaggtggccgtgttcgagcctagcgaggccgagatcagccacacccagaaagccaccctcgtgtgcctggctaccggcttctaccccgaccatgtggaactgtcttggtgggtcaacggcaaagaggtgcacagcggcgtgtctaccgacccccagccactgaaagaacagcccgccctgaacgacagccggtactgcctgagcagcagactgagagtgtccgccaccttctggcagaacccccggaaccacttcagatgccaggtgcagttctacggcctgagcgagaacgacgagtggacccaggacagagccaagcccgtgacccagatcgtgtctgccgaagcctggggcagagccgattgcggatcctccaaggacgccaacgataccctgctgctccagctgaccaacaccagcgcctactacatgtacttgttgctgctgctgaagtccgtggtgtacttcgccatcatcacatgctgcctgctgcggagaaccgccttctgctgcaacggcgagaagtctagggccaagcgatctggatctggagcaacaaacttctcactactcaaacaagcaggtgacgtggaggagaatcccgggcctactagtatggactggatttggcgcatccttttccttgtcggcgctgctaccggcgcgcattccttcgaacaagttcagctggttcagagcggagccgaagtgaagaaacctggcagcagcgtgaaggtgtcctgcaaagcaagcggcggcacctttagcacctacgccatccactgggttcgacaggcaccaggacaaggactggaatggatgggcagaatcatccccatcgagggcagagcctactacgcccagaaattccagggcagagtgaccatcaccgccgacgagtctacaagcaccgcctacatggaactgagcagcctgagaagcgaggataccgctgtgtactattgcgccagaggccggtacagctacagatattggttcgactactggggccagggcaccctggttacagtctcttctacgcgtatccagaaccctgatcctgccgtgtaccagctgcgggatagcaagagcagcgacaagagcgtgtgtctgttcaccgacttcgacagccagaccaacgtgtcccagagcaaggactccgacgtgtacatcaccgataagaccgtgctggacatgcggagcatggacttcaagagcaactccgccgtggcctggtccaacaagtccgatttcgcctgcgccaacgccttcaacaacagcattatccccgaggacacattcttcccaagccccgagagcagctgcggtaccgaagtgaaaaccgactccaccgaccacgtgaagcccaaagagacagagaacaccaagcagcccagcaagagctgccacaagcccaaggccatcgtgcacaccgagaaagtgaacatgatgagcctgaccgtgctgggcctgcggatgctgttcgccaaaaccgtggccgtgaacttcctgctgaccgccaagctgttcttcctctaa

SEQ ID NO: 39867 - DNA, 1863 bp, synthetic construct
  source 1..1863: mol_type = other DNA
atggccttaccagtgaccgccttgctcctgccgctggccttgctgctccacgccgccaggccggagatcgtgctgacacagtctcccgccacactgtcactgtctccaggcgaaagagccacactgagctgtagagccagccagagcgtgtcctcttacctggcctggtatcagcagaagcctggacaggctccccggctgctgatctacgatgccagcaatagagccacaggcatccccgccagattttctggctctggcagcggcaccgatttcaccctgaccataagcagcctggaacctgaggacttcgccgtgtactactgccagcagagaagcaactggcccctgacctttggacagggcaccaaggtggaaatcaaactcgaggacctgaagaacgtgttcccacctgaggtggccgtgttcgagcctagcgaggccgagatcagccacacccagaaagccaccctcgtgtgcctggctaccggcttctaccccgaccatgtggaactgtcttggtgggtcaacggcaaagaggtgcacagcggcgtgtgtaccgacccccagccactgaaagaacagcccgccctgaacgacagccggtactgcctgagcagcagactgagagtgtccgccaccttctggcagaacccccggaaccacttcagatgccaggtgcagttctacggcctgagcgagaacgacgagtggacccaggacagagccaagcccgtgacccagatcgtgtctgccgaagcctggggcagagccgattgcgacgtgaagctggtggaaaagagcttcgagacagacaccaacctgaacttccagaacctgagcgtgatcggcttcagaatcctgctgctgaaagtggccggctttaacctgctgatgaccctgcggctgtggtccagcagggccaagcgatctggatctggagcaacaaacttctcactactcaaacaagcaggtgacgtggaggagaatcccgggcctactagtatggactggatttggcgcatccttttccttgtcggcgctgctaccggcgcgcattccttcgaacaagttcagctggttcagagcggagccgaagtgaagaaacctggcagcagcgtgaaggtgtcctgcaaagcaagcggcggcacctttagcacctacgccatccactgggttcgacaggcaccaggacaaggactggaatggatgggcagaatcatccccatcgagggcagagcctactacgcccagaaattccagggcagagtgaccatcaccgccgacgagtctacaagcaccgcctacatggaactgagcagcctgagaagcgaggataccgctgtgtactattgcgccagaggccggtacagctacagatattggttcgactactggggccagggcaccctggttacagtctcttctacgcgtatccagaaccctgatcctgccgtgtaccagctgcgggatagcaagagcagcgacaagagcgtgtgtctgttcaccgacttcgacagccagaccaacgtgtcccagagcaaggactccgacgtgtacatcaccgataagtgcgtgctggacatgcggagcatggacttcaagagcaactccgccgtggcctggtccaacaagtccgatttcgcctgcgccaacgccttcaacaacagcattatccccgaggacacattcttcccaagccccgagagcagctgcggctttaccagcgagagctaccagcagggcgtgctgagcgccaccatcctgtacgagatcctgctgggcaaggccaccctgtacgccgtgctggtgtctgccctggtgctgatggctatggtcaagcggaaggacagccggggataa

SEQ ID NO: 39868 - DNA, 1863 bp, synthetic construct
  source 1..1863: mol_type = other DNA
atggccttaccagtgaccgccttgctcctgccgctggccttgctgctccacgccgccaggccggagatcgtgctgacacagtctcccgccacactgtcactgtctccaggcgaaagagccacactgagctgtagagccagccagagcgtgtcctcttacctggcctggtatcagcagaagcctggacaggctccccggctgctgatctacgatgccagcaatagagccacaggcatccccgccagattttctggctctggcagcggcaccgatttcaccctgaccataagcagcctggaacctgaggacttcgccgtgtactactgccagcagagaagcaactggcccctgacctttggacagggcaccaaggtggaaatcaaactcgaggacctgaagaacgtgttcccacctgaggtggccgtgttcgagcctagcgaggccgagatcagccacacccagaaagccaccctcgtgtgcctggctaccggcttctaccccgaccatgtggaactgtcttggtgggtcaacggcaaagaggtgcacagcggcgtgtgtaccgacccccagccactgaaagaacagcccgccctgaacgacagccggtactgcctgagcagcagactgagagtgtccgccaccttctggcagaacccccggaaccacttcagatgccaggtgcagttctacggcctgagcgagaacgacgagtggacccaggacagagccaagcccgtgacccagatcgtgtctgccgaagcctggggcagagccgattgcggctttaccagcgagagctaccagcagggcgtgctgagcgccaccaacctgagcgtgatcggcttcagaatcctgctgctgaaagtggccggctttaacctgctgatgaccctgcggctgtggtccagcagggccaagcgatctggatctggagcaacaaacttctcactactcaaacaagcaggtgacgtggaggagaatcccgggcctactagtatggactggatttggcgcatccttttccttgtcggcgctgctaccggcgcgcattccttcgaacaagttcagctggttcagagcggagccgaagtgaagaaacctggcagcagcgtgaaggtgtcctgcaaagcaagcggcggcacctttagcacctacgccatccactgggttcgacaggcaccaggacaaggactggaatggatgggcagaatcatccccatcgagggcagagcctactacgcccagaaattccagggcagagtgaccatcaccgccgacgagtctacaagcaccgcctacatggaactgagcagcctgagaagcgaggataccgctgtgtactattgcgccagaggccggtacagctacagatattggttcgactactggggccagggcaccctggttacagtctcttctacgcgtatccagaaccctgatcctgccgtgtaccagctgcgggatagcaagagcagcgacaagagcgtgtgtctgttcaccgacttcgacagccagaccaacgtgtcccagagcaaggactccgacgtgtacatcaccgataagtgcgtgctggacatgcggagcatggacttcaagagcaactccgccgtggcctggtccaacaagtccgatttcgcctgcgccaacgccttcaacaacagcattatccccgaggacacattcttcccaagccccgagagcagctgcgacgtgaagctggtggaaaagagcttcgagacagacaccaacctgaacttccagatcctgtacgagatcctgctgggcaaggccaccctgtacgccgtgctggtgtctgccctggtgctgatggctatggtcaagcggaaggacagccggggataa

SEQ ID NO: 39869 - DNA, 1863 bp, synthetic construct; identical to SEQ ID NO: 39867
  source 1..1863: mol_type = other DNA

SEQ ID NO: 39870 - DNA, 1863 bp, synthetic construct; identical to SEQ ID NO: 39868
  source 1..1863: mol_type = other DNA

SEQ ID NO: 39871 - DNA, 1860 bp, synthetic construct
  source 1..1860: mol_type = other DNA
atggccttaccagtgaccgccttgctcctgccgctggccttgctgctccacgccgccaggccggagatcgtgctgacacagtctcccgccacactgtcactgtctccaggcgaaagagccacactgagctgtagagccagccagagcgtgtcctcttacctggcctggtatcagcagaagcctggacaggctccccggctgctgatctacgatgccagcaatagagccacaggcatccccgccagattttctggctctggcagcggcaccgatttcaccctgaccataagcagcctggaacctgaggacttcgccgtgtactactgccagcagagaagcaactggcccctgacctttggacagggcaccaaggtggaaatcaaactcgaggacctgaagaacgtgttcccacctgaggtggccgtgttcgagcctagcgaggccgagatcagccacacccagaaagccaccctcgtgtgcctggctaccggcttctaccccgaccatgtggaactgtcttggtgggtcaacggcaaagaggtgcacagcggcgtgtgtaccgacccccagccactgaaagaacagcccgccctgaacgacagccggtactgcctgagcagcagactgagagtgtccgccaccttctggcagaacccccggaaccacttcagatgccaggtgcagttctacggcctgagcgagaacgacgagtggacccaggacagagccaagcccgtgacccagatcgtgtctgccgaagcctggggcagagccgattgcgacgtgaagctggtggaaaagagcttcgagacagacaccaacctgaacttccagaacctgagcgtgatcggcttcagaatcctgctgctgaaagtggccggctttaacctgctgatgaccctgcggctgtggtccagcagggccaagcgatctggatctggagcaacaaacttctcactactcaaacaagcaggtgacgtggaggagaatcccgggcctactagtatggactggatttggcgcatccttttccttgtcggcgctgctaccggcgcgcattccttcgaacaagttcagctggttcagagcggagccgaagtgaagaaacctggcagcagcgtgaaggtgtcctgcaaagcaagcggcggcacctttagcacctacgccatccactgggttcgacaggcaccaggacaaggactggaatggatgggcagaatcatccccatcgagggcagagcctactacgcccagaaattccagggcagagtgaccatcaccgccgacgagtctacaagcaccgcctacatggaactgagcagcctgagaagcgaggataccgctgtgtactattgcgccagaggccggtacagctacagatattggttcgactactggggccagggcaccctggttacagtctcttctacgcgtatccagaaccctgatcctgccgtgtaccagctgcgggatagcaagagcagcgacaagagcgtgtgtctgttcaccgacttcgacagccagaccaacgtgtcccagagcaaggactccgacgtgtacatcaccgataagtgcgtgctggacatgcggagcatggacttcaagagcaactccgccgtggcctggtccaacaagtccgatttcgcctgcgccaacgccttcaacaacagcattatccccgaggacacattcttcccaagccccgagagcagctgcggctttaccagcgagagctaccagcagggcgtgctgagcgccaccatcctgtacgagatcctgctgggcaaggccaccctgtacgccgtgctggtgtctgccctggtgctgatggctatggtcaagcggaaggacagccgggga

SEQ ID NO: 39872 - DNA, 1872 bp, synthetic construct
  source 1..1872: mol_type = other DNA
atggccttaccagtgaccgccttgctcctgccgctggccttgctgctccacgccgccaggccggagatcgtgctgacacagtctcccgccacactgtcactgtctccaggcgaaagagccacactgagctgtagagccagccagagcgtgtcctcttacctggcctggtatcagcagaagcctggacaggctccccggctgctgatctacgatgccagcaatagagccacaggcatccccgccagattttctggctctggcagcggcaccgatttcaccctgaccataagcagcctggaacctgaggacttcgccgtgtactactgccagcagagaagcaactggcccctgacctttggacagggcaccaaggtggaaatcaaactcgaggccgacgtgtcccccaagcctaccatcttcctgccctctatcgccgagacaaagctccagaaggccggcacctacctgtgcctgctggaaaagttcttcccagatgtgattaagatccactggcaggaaaagaagtccaacaccatcctgggcagccaggaaggcaacaccatgaagaccaacgacacctacatgaagttcagctggctgaccgtgcccgagaagtccctggacaaagaacacagatgcatcgtgcggcacgaaaacaacaagaacggcgtggaccaggaaatcatcttcccacccatcaagaccgatgtgattacaatggaccccaaggacaactgctccaaggacgccaacgataccctgctgctccagctgaccaacaccagcgcctactacatgtacttgttgctgctgctgaagtccgtggtgtacttcgccatcatcacatgctgcctgctgcggagaaccgccttctgctgcaacggcgagaagtctagggccaagcgatctggatctggagcaacaaacttctcactactcaaacaagcaggtgacgtggaggagaatcccgggcctactagtatggactggatttggcgcatccttttccttgtcggcgctgctaccggcgcgcattccttcgaacaagttcagctggttcagagcggagccgaagtgaagaaacctggcagcagcgtgaaggtgtcctgcaaagcaagcggcggcacctttagcacctacgccatccactgggttcgacaggcaccaggacaaggactggaatggatgggcagaatcatccccatcgagggcagagcctactacgcccagaaattccagggcagagtgaccatcaccgccgacgagtctacaagcaccgcctacatggaactgagcagcctgagaagcgaggataccgctgtgtactattgcgccagaggccggtacagctacagatattggttcgactactggggccagggcaccctggttacagtctcttctacgcgtagccagcctcacaccaagcccagcgtgttcgtgatgaagaacggcaccaacgtggcctgcctcgtgaaagagttctaccccaaggacatcaggatcaacctggtgtccagcaagaagatcaccgagttcgaccccgccatcgtgatctcccccagcggcaagtacaacgccgtgaagctggggaagtatgaggacagcaacagcgtgacctgctccgtgcagcacgacaacaagaccgtgcacagcaccgactttgaagtgaaaaccgactccaccgaccacgtgaagcccaaagagacagagaacaccaagcagcccagcaagagctgccacaagcccaaggccatcgtgcacaccgagaaagtgaacatgatgagcctgaccgtgatcggcttcagaatcctgctgctgaaagtggccggctttaacctgctgatgaccctgcggctgtggtccagctaa

SEQ ID NO: 39873 - DNA, 1872 bp, synthetic construct
  source 1..1872: mol_type = other DNA
atggccttaccagtgaccgccttgctcctgccgctggccttgctgctccacgccgccaggccggagatcgtgctgacacagtctcccgccacactgtcactgtctccaggcgaaagagccacactgagctgtagagccagccagagcgtgtcctcttacctggcctggtatcagcagaagcctggacaggctccccggctgctgatctacgatgccagcaatagagccacaggcatccccgccagattttctggctctggcagcggcaccgatttcaccctgaccataagcagcctggaacctgaggacttcgccgtgtactactgccagcagagaagcaactggcccctgacctttggacagggcaccaaggtggaaatcaaactcgaggccgacgtgtcccccaagcctaccatcttcctgccctctatcgccgagacaaagctccagaaggccggcacctacctgtgcctgctggaaaagttcttcccagatgtgattaagatccactggcaggaaaagaagtccaacaccatcctgggcagccaggaaggcaacaccatgaagaccaacgacacctacatgaagttcagctggctgaccgtgcccgagaagtccctggacaaagaacacagatgcatcgtgcggcacgaaaacaacaagaacggcgtggaccaggaaatcatcttcccacccatcaagaccgatgtgattacaatggaccccaaggacaactgctccaaggacgccaacgataccctgctgctccagctgaccaacaccagcgcctactacatgtacttgttgctgctgctgaagtccgtggtgtacttcgccatcatcacatgctgcctgctgcggagaaccgccttctgctgcaacggcgagaagtctagggccaagcgatctggatctggagcaacaaacttctcactactcaaacaagcaggtgacgtggaggagaatcccgggcctactagtatggactggatttggcgcatccttttccttgtcggcgctgctaccggcgcgcattccttcgaacaagttcagctggttcagagcggagccgaagtgaagaaacctggcagcagcgtgaaggtgtcctgcaaagcaagcggcggcacctttagcacctacgccatccactgggttcgacaggcaccaggacaaggactggaatggatgggcagaatcatccccatcgagggcagagcctactacgcccagaaattccagggcagagtgaccatcaccgccgacgagtctacaagcaccgcctacatggaactgagcagcctgagaagcgaggataccgctgtgtactattgcgccagaggccggtacagctacagatattggttcgactactggggccagggcaccctggttacagtctcttctacgcgtagccagcctcacaccaagcccagcgtgttcgtgatgaagaacggcaccaacgtggcctgcctcgtgaaagagttctaccccaaggacatcaggatcaacctggtgtccagcaagaagatcaccgagttcgaccccgccatcgtgatctcccccagcggcaagtacaacgccgtgaagctggggaagtacgaggacagcaacagcgtgacctgctccgtgcagcacgacaacaagaccgtgcacagcaccgactttgaagtgaaaaccgactccaccgaccacgtgaagcccaaagagacagagaacaccaagcagcccagcaagagctgccacaagcccaaggccatcgtgcacaccgagaaagtgaacatgatgagcctgaccgtgctgggcttcagaatcctgctgctgaaagtggccggctttaacctgctgatgaccctgcggctgtggtccagctaa

SEQ ID NO: 39874 - DNA, 1860 bp, synthetic construct; identical to SEQ ID NO: 39871
  source 1..1860: mol_type = other DNA

SEQ ID NO: 39875 - DNA, 1872 bp, synthetic construct
  source 1..1872: mol_type = other DNA
atggccttaccagtgaccgccttgctcctgccgctggccttgctgctccacgccgccaggccggagatcgtgctgacacagtctcccgccacactgtcactgtctccaggcgaaagagccacactgagctgtagagccagccagagcgtgtcctcttacctggcctggtatcagcagaagcctggacaggctccccggctgctgatctacgatgccagcaatagagccacaggcatccccgccagattttctggctctggcagcggcaccgatttcaccctgaccataagcagcctggaacctgaggacttcgccgtgtactactgccagcagagaagcaactggcccctgacctttggacagggcaccaaggtggaaatcaaactcgagatccagaaccctgatcctgccgtgtaccagctgcgggatagcaagagcagcgacaagagcgtgtgtctgttcaccgacttcgacagccagaccaacgtgtcccagagcaaggactccgacgtgtacatcaccgataagtgcgtgctggacatgcggagcatggacttcaagagcaactccgccgtggcctggtccaacaagtccgatttcgcctgcgccaacgccttcaacaacagcattatccccgaggacacattcttcccaagccccgagagcagctgcggctttaccagcgagagctaccagcagggcgtgctgagcgccaccatcctgtacgagatcctgctgggcaaggccaccctgtacgccgtgctggtgtctgccctggtgctgatggctatggtcaagcggaaggacagccggggacgcgccaagagaagcggatctggcgtgaagcagaccctgaatttcgacctgctgaagctggctggcgacgtggaatccaacccaggccctactagtatggactggatttggcgcatccttttccttgtcggcgctgctaccggcgcgcattccttcgaacaagttcagctggttcagagcggagccgaagtgaagaaacctggcagcagcgtgaaggtgtcctgcaaagcaagcggcggcacctttagcacctacgccatccactgggttcgacaggcaccaggacaaggactggaatggatgggcagaatcatccccatcgagggcagagcctactacgcccagaaattccagggcagagtgaccatcaccgccgacgagtctacaagcaccgcctacatggaactgagcagcctgagaagcgaggataccgctgtgtactattgcgccagaggccggtacagctacagatattggttcgactactggggccagggcaccctggttacagtctcttctacgcgtgaggacctgaagaacgtgttcccacctgaggtggccgtgttcgagcctagcgaggccgagatcagccacacccagaaagccaccctcgtgtgcctggctaccggcttctaccccgaccatgtggaactgtcttggtgggtcaacggcaaagaggtgcacagcggcgtgtgtaccgacccccagccactgaaagaacagcccgccctgaacgacagccggtactgcctgagcagcagactgagagtgtccgccaccttctggcagaacccccggaaccacttcagatgccaggtgcagttctacggcctgagcgagaacgacgagtggacccaggacagagccaagcccgtgacccagatcgtgtctgccgaagcctggggcagagccgattgcgacgtgaagctggtggaaaagagcttcgagacagacaccaacctgaacttccagaacctgagcgtgatcggcttcagaatcctgctgctgaaagtggccggctttaacctgctgatgaccctgcggctgtggtccagc

SEQ ID NO: 39876 - DNA, 2265 bp, synthetic construct
  source 1..2265: mol_type = other DNA
atggccttaccagtgaccgccttgctcctgccgctggccttgctgctccacgccgccaggccggaagtgcagctggttgaatctggcggaggactggttcagcctggcggatctctgagactgtcttgtgccgccagcggcttcagcttcagcgacttttggatgagctgggtccgacaggcccctggcaaaggacttgaatgggtcgccacaatcagccaggccggcagcgagaaggactacgtggactctgtgaagggcagattcaccatcagccgggacaacgccaagaagtccctgtacctccagatgaacagcctgagagccgaggacaccgccgtgtactattgtgcctctggcgtgtacagcttcgactacagaggccagggcaccctggtcacagtctcttctggtaccggcggaggcggatctggcggcggaggtagcggtggcggaggatctgaattcgagatcgtgctgacacagtctcccgccacactgtcactgtctccaggcgaaagagccacactgagctgtagagccagccagagcgtgtcctcttacctggcctggtatcagcagaagcctggacaggctccccggctgctgatctacgatgccagcaatagagccacaggcatccccgccagattttctggctctggcagcggcaccgatttcaccctgaccataagcagcctggaacctgaggacttcgccgtgtactactgccagcagagaagcaactggcccctgacctttggacagggcaccaaggtggaaatcaaactcgaggacctgaagaacgtgttcccacctgaggtggccgtgttcgagcctagcgaggccgagatcagccacacccagaaagccaccctcgtgtgcctggctaccggcttctaccccgaccatgtggaactgtcttggtgggtcaacggcaaagaggtgcacagcggcgtgtgtaccgacccccagccactgaaagaacagcccgccctgaacgacagccggtactgcctgagcagcagactgagagtgtccgccaccttctggcagaacccccggaaccacttcagatgccaggtgcagttctacggcctgagcgagaacgacgagtggacccaggacagagccaagcccgtgacccagatcgtgtctgccgaagcctggggcagagccgattgcgacgtgaagctggtggaaaagagcttcgagacagacaccaacctgaacttccagaacctgagcgtgatcggcttcagaatcctgctgctgaaagtggccggctttaacctgctgatgaccctgcggctgtggtccagcagggccaagcgatctggatctggagcaacaaacttctcactactcaaacaagcaggtgacgtggaggagaatcccgggcctactagtatggactggatttggcgcatccttttccttgtcggcgctgctaccggcgcgcattccttcgaacaagttcagctggttcagagcggagccgaagtgaagaaacctggcagcagcgtgaaggtgtcctgcaaagcaagcggcggcacctttagcacctacgccatccactgggttcgacaggcaccaggacaaggactggaatggatgggcagaatcatccccatcgagggcagagcctactacgcccagaaattccagggcagagtgaccatcaccgccgacgagtctacaagcaccgcctacatggaactgagcagcctgagaagcgaggataccgctgtgtactattgcgccagaggccggtacagctacagatattggttcgactactggggccagggcaccctggttacagtctcttctacgcgtatccagaaccctgatcctgccgtgtaccagctgcgggatagcaagagcagcgacaagagcgtgtgtctgttcaccgacttcgacagccagaccaacgtgtcccagagcaaggactccgacgtgtacatcaccgataagtgcgtgctggacatgcggagcatggacttcaagagcaactccgccgtggcctggtccaacaagtccgatttcgcctgcgccaacgccttcaacaacagcattatccccgaggacacattcttcccaagccccgagagcagctgcggctttaccagcgagagctaccagcagggcgtgctgagcgccaccatcctgtacgagatcctgctgggcaaggccaccctgtacgccgtgctggtgtctgccctggtgctgatggctatggtcaagcggaaggacagccgggga

SEQ ID NO: 39877 - DNA, 2277 bp, synthetic construct
  source 1..2277: mol_type = other DNA
atggccttaccagtgaccgccttgctcctgccgctggccttgctgctccacgccgccaggccggaagtgcagctggttgaatctggcggaggactggttcagcctggcggatctctgagactgtcttgtgccgccagcggcttcagcttcagcgacttttggatgagctgggtccgacaggcccctggcaaaggacttgaatgggtcgccacaatcagccaggccggcagcgagaaggactacgtggactctgtgaagggcagattcaccatcagccgggacaacgccaagaagtccctgtacctccagatgaacagcctgagagccgaggacaccgccgtgtactattgtgcctctggcgtgtacagcttcgactacagaggccagggcaccctggtcacagtctcttctggtaccggcggaggcggatctggcggcggaggtagcggtggcggaggatctgaattcgagatcgtgctgacacagtctcccgccacactgtcactgtctccaggcgaaagagccacactgagctgtagagccagccagagcgtgtcctcttacctggcctggtatcagcagaagcctggacaggctccccggctgctgatctacgatgccagcaatagagccacaggcatccccgccagattttctggctctggcagcggcaccgatttcaccctgaccataagcagcctggaacctgaggacttcgccgtgtactactgccagcagagaagcaactggcccctgacctttggacagggcaccaaggtggaaatcaaactcgagatccagaaccctgatcctgccgtgtaccagctgcgggatagcaagagcagcgacaagagcgtgtgtctgttcaccgacttcgacagccagaccaacgtgtcccagagcaaggactccgacgtgtacatcaccgataagtgcgtgctggacatgcggagcatggacttcaagagcaactccgccgtggcctggtccaacaagtccgatttcgcctgcgccaacgccttcaacaacagcattatccccgaggacacattcttcccaagccccgagagcagctgcggctttaccagcgagagctaccagcagggcgtgctgagcgccaccatcctgtacgagatcctgctgggcaaggccaccctgtacgccgtgctggtgtctgccctggtgctgatggctatggtcaagcggaaggacagccggggacgcgccaagagaagcggatctggcgtgaagcagaccctgaatttcgacctgctgaagctggctggcgacgtggaatccaacccaggccctactagtatggactggatttggcgcatccttttccttgtcggcgctgctaccggcgcgcattccttcgaacaagttcagctggttcagagcggagccgaagtgaagaaacctggcagcagcgtgaaggtgtcctgcaaagcaagcggcggcacctttagcacctacgccatccactgggttcgacaggcaccaggacaaggactggaatggatgggcagaatcatccccatcgagggcagagcctactacgcccagaaattccagggcagagtgaccatcaccgccgacgagtctacaagcaccgcctacatggaactgagcagcctgagaagcgaggataccgctgtgtactattgcgccagaggccggtacagctacagatattggttcgactactggggccagggcaccctggttacagtctcttctacgcgtgaggacctgaagaacgtgttcccacctgaggtggccgtgttcgagcctagcgaggccgagatcagccacacccagaaagccaccctcgtgtgcctggctaccggcttctaccccgaccatgtggaactgtcttggtgggtcaacggcaaagaggtgcacagcggcgtgtgtaccgacccccagccactgaaagaacagcccgccctgaacgacagccggtactgcctgagcagcagactgagagtgtccgccaccttctggcagaacccccggaaccacttcagatgccaggtgcagttctacggcctgagcgagaacgacgagtggacccaggacagagccaagcccgtgacccagatcgtgtctgccgaagcctggggcagagccgattgcgacgtgaagctggtggaaaagagcttcgagacagacaccaacctgaacttccagaacctgagcgtgatcggcttcagaatcctgctgctgaaagtggccggctttaacctgctgatgaccctgcggctgtggtccagc

SEQ ID NO: 39878 - DNA, 2676 bp, synthetic construct
  source 1..2676: mol_type = other DNA
atggccttaccagtgaccgccttgctcctgccgctggccttgctgctccacgccgccaggccggaagtgcagctggttgaatctggcggaggactggttcagcctggcggatctctgagactgtcttgtgccgccagcggcttcagcttcagcgacttttggatgagctgggtccgacaggcccctggcaaaggacttgaatgggtcgccacaatcagccaggccggcagcgagaaggactacgtggactctgtgaagggcagattcaccatcagccgggacaacgccaagaagtccctgtacctccagatgaacagcctgagagccgaggacaccgccgtgtactattgtgcctctggcgtgtacagcttcgactacagaggccagggcaccctggtcacagtctcttctggtaccggcggaggcggatctggcggcggaggtagcggtggcggaggatctgaattcgagatcgtgctgacacagtctcccgccacactgtcactgtctccaggcgaaagagccacactgagctgtagagccagccagagcgtgtcctcttacctggcctggtatcagcagaagcctggacaggctccccggctgctgatctacgatgccagcaatagagccacaggcatccccgccagattttctggctctggcagcggcaccgatttcaccctgaccataagcagcctggaacctgaggacttcgccgtgtactactgccagcagagaagcaactggcccctgacctttggacagggcaccaaggtggaaatcaaactcgaggacctgaagaacgtgttcccacctgaggtggccgtgttcgagcctagcgaggccgagatcagccacacccagaaagccaccctcgtgtgcctggctaccggcttctaccccgaccatgtggaactgtcttggtgggtcaacggcaaagaggtgcacagcggcgtgtgtaccgacccccagccactgaaagaacagcccgccctgaacgacagccggtactgcctgagcagcagactgagagtgtccgccaccttctggcagaacccccggaaccacttcagatgccaggtgcagttctacggcctgagcgagaacgacgagtggacccaggacagagccaagcccgtgacccagatcgtgtctgccgaagcctggggcagagccgattgcgacgtgaagctggtggaaaagagcttcgagacagacaccaacctgaacttccagaacctgagcgtgatcggcttcagaatcctgctgctgaaagtggccggctttaacctgctgatgaccctgcggctgtggtccagcagggccaagcgatctggatctggagcaacaaacttctcactactcaaacaagcaggtgacgtggaggagaatcccgggcctactagtatggactggatttggcgcatccttttccttgtcggcgctgctaccggcgcgcattccgggccccagctccagctgcaagagtctggacctggcctggtcaagcctagcgagacactgagcctgacctgtaccgtgtccggcgatagcatcagcagcggcgattactactggggctggatcagacagcctcctggcaaaggactggaatggatcggccacatctactacagcggcgtgacctactacaaccccagcctgaagtccagagtgaccatcagcgtggacaccagccggaaccagttctccctgaagctgtctagcgtgacagccgccgataccgccgtgtactactgcaccagagaggacagcagcaactggcggagtagaggccagggaacactggtcacagttagctctggatccggcggaggcggaagtggaggcggaggatctggcggcggaggctctttcgaacaagttcagctggttcagagcggagccgaagtgaagaaacctggcagcagcgtgaaggtgtcctgcaaagcaagcggcggcacctttagcacctacgccatccactgggttcgacaggcaccaggacaaggactggaatggatgggcagaatcatccccatcgagggcagagcctactacgcccagaaattccagggcagagtgaccatcaccgccgacgagtctacaagcaccgcctacatggaactgagcagcctgagaagcgaggataccgctgtgtactattgcgccagaggccggtacagctacagatattggttcgactactggggccagggcaccctggttacagtctcttctacgcgtatccagaaccctgatcctgccgtgtaccagctgcgggatagcaagagcagcgacaagagcgtgtgtctgttcaccgacttcgacagccagaccaacgtgtcccagagcaaggactccgacgtgtacatcaccgataagtgcgtgctggacatgcggagcatggacttcaagagcaactccgccgtggcctggtccaacaagtccgatttcgcctgcgccaacgccttcaacaacagcattatccccgaggacacattcttcccaagccccgagagcagctgcggctttaccagcgagagctaccagcagggcgtgctgagcgccaccatcctgtacgagatcctgctgggcaaggccaccctgtacgccgtgctggtgtctgccctggtgctgatggctatggtcaagcggaaggacagccgggga

SEQ ID NO: 39879 - DNA, 2688 bp, synthetic construct
  source 1..2688: mol_type = other DNA
atggccttaccagtgaccgccttgctcctgccgctggccttgctgctccacgccgccaggccggaagtgcagctggttgaatctggcggaggactggttcagcctggcggatctctgagactgtcttgtgccgccagcggcttcagcttcagcgacttttggatgagctgggtccgacaggcccctggcaaaggacttgaatgggtcgccacaatcagccaggccggcagcgagaaggactacgtggactctgtgaagggcagattcaccatcagccgggacaacgccaagaagtccctgtacctccagatgaacagcctgagagccgaggacaccgccgtgtactattgtgcctctggcgtgtacagcttcgactacagaggccagggcaccctggtcacagtctcttctggtaccggcggaggcggatctggcggcggaggtagcggtggcggaggatctgaattcgagatcgtgctgacacagtctcccgccacactgtcactgtctccaggcgaaagagccacactgagctgtagagccagccagagcgtgtcctcttacctggcctggtatcagcagaagcctggacaggctccccggctgctgatctacgatgccagcaatagagccacaggcatccccgccagattttctggctctggcagcggcaccgatttcaccctgaccataagcagcctggaacctgaggacttcgccgtgtactactgccagcagagaagcaactggcccctgacctttggacagggcaccaaggtggaaatcaaactcgagatccagaaccctgatcctgccgtgtaccagctgcgggatagcaagagcagcgacaagagcgtgtgtctgttcaccgacttcgacagccagaccaacgtgtcccagagcaaggactccgacgtgtacatcaccgataagtgcgtgctggacatgcggagcatggacttcaagagcaactccgccgtggcctggtccaacaagtccgatttcgcctgcgccaacgccttcaacaacagcattatccccgaggacacattcttcccaagccccgagagcagctgcggctttaccagcgagagctaccagcagggcgtgctgagcgccaccatcctgtacgagatcctgctgggcaaggccaccctgtacgccgtgctggtgtctgccctggtgctgatggctatggtcaagcggaaggacagccggggacgcgccaagagaagcggatctggcgtgaagcagaccctgaatttcgacctgctgaagctggctggcgacgtggaatccaacccaggccctactagtatggactggatttggcgcatccttttccttgtcggcgctgctaccggcgcgcattccgggccccagctccagctgcaagagtctggacctggcctggtcaagcctagcgagacactgagcctgacctgtaccgtgtccggcgatagcatcagcagcggcgattactactggggctggatcagacagcctcctggcaaaggactggaatggatcggccacatctactacagcggcgtgacctactacaaccccagcctgaagtccagagtgaccatcagcgtggacaccagccggaaccagttctccctgaagctgtctagcgtgacagccgccgataccgccgtgtactactgcaccagagaggacagcagcaactggcggagtagaggccagggaacactggtcacagttagctctggatccggcggaggcggaagtggaggcggaggatctggcggcggaggctctttcgaacaagttcagctggttcagagcggagccgaagtgaagaaacctggcagcagcgtgaaggtgtcctgcaaagcaagcggcggcacctttagcacctacgccatccactgggttcgacaggcaccaggacaaggactggaatggatgggcagaatcatccccatcgagggcagagcctactacgcccagaaattccagggcagagtgaccatcaccgccgacgagtctacaagcaccgcctacatggaactgagcagcctgagaagcgaggataccgctgtgtactattgcgccagaggccggtacagctacagatattggttcgactactggggccagggcaccctggttacagtctcttctacgcgtgaggacctgaagaacgtgttcccacctgaggtggccgtgttcgagcctagcgaggccgagatcagccacacccagaaagccaccctcgtgtgcctggctaccggcttctaccccgaccatgtggaactgtcttggtgggtcaacggcaaagaggtgcacagcggcgtgtgtaccgacccccagccactgaaagaacagcccgccctgaacgacagccggtactgcctgagcagcagactgagagtgtccgccaccttctggcagaacccccggaaccacttcagatgccaggtgcagttctacggcctgagcgagaacgacgagtggacccaggacagagccaagcccgtgacccagatcgtgtctgccgaagcctggggcagagccgattgcgacgtgaagctggtggaaaagagcttcgagacagacaccaacctgaacttccagaacctgagcgtgatcggcttcagaatcctgctgctgaaagtggccggctttaacctgctgatgaccctgcggctgtggtccagc

SEQ ID NO: 39880 - DNA, 2070 bp, synthetic construct
  source 1..2070: mol_type = other DNA
atggccttaccagtgaccgccttgctcctgccgctggccttgctgctccacgccgccaggccggagatcgtgctgacacagtctcccgccacactgtcactgtctccaggcgaaagagccacactgagctgtagagccagccagagcgtgtcctcttacctggcctggtatcagcagaagcctggacaggctccccggctgctgatctacgatgccagcaatagagccacaggcatccccgccagattttctggctctggcagcggcaccgatttcaccctgaccataagcagcctggaacctgaggacttcgccgtgtactactgccagcagagaagcaactggcccctgacctttggacagggcaccaaggtggaaatcaaactcgaggacctgaagaacgtgttcccacctgaggtggccgtgttcgagcctagcgaggccgagatcagccacacccagaaagccaccctcgtgtgcctggctaccggcttctaccccgaccatgtggaactgtcttggtgggtcaacggcaaagaggtgcacagcggcgtgtgtaccgacccccagccactgaaagaacagcccgccctgaacgacagccggtactgcctgagcagcagactgagagtgtccgccaccttctggcagaacccccggaaccacttcagatgccaggtgcagttctacggcctgagcgagaacgacgagtggacccaggacagagccaagcccgtgacccagatcgtgtctgccgaagcctggggcagagccgattgcgacgtgaagctggtggaaaagagcttcgagacagacaccaacctgaacttccagaacctgagcgtgatcggcttcagaatcctgctgctgaaagtggccggctttaacctgctgatgaccctgcggctgtggtccagcagggccaagcgatctggatctggagcaacaaacttctcactactcaaacaagcaggtgacgtggaggagaatcccgggcctactagtatggactggatttggcgcatccttttccttgtcggcgctgctaccggcgcccattccgggcccatggaccccgacctggaaatcagagccgccttcctgcggcagagaaacacagccctgagaacagaggtggccgagctggaacaagaggtgcagcggctggaaaacgaggtgtcccagtacgagacaagatacggccctctcggaggcggaaaaggatccggcggcggaggatctggcggaggcggatctgggggcggaggctctttcgaacaagttcagctggttcagagcggagccgaagtgaagaaacctggcagcagcgtgaaggtgtcctgcaaagcaagcggcggcacctttagcacctacgccatccactgggttcgacaggcaccaggacaaggactggaatggatgggcagaatcatccccatcgagggcagagcctactacgcccagaaattccagggcagagtgaccatcaccgccgacgagtctacaagcaccgcctacatggaactgagcagcctgagaagcgaggataccgctgtgtactattgcgccagaggccggtacagctacagatattggttcgactactggggccagggcaccctggttacagtctcttctacgcgtatccagaaccctgatcctgccgtgtaccagctgcgggatagcaagagcagcgacaagagcgtgtgtctgttcaccgacttcgacagccagaccaacgtgtcccagagcaaggactccgacgtgtacatcaccgataagtgcgtgctggacatgcggagcatggacttcaagagcaactccgccgtggcctggtccaacaagtccgatttcgcctgcgccaacgccttcaacaacagcattatccccgaggacacattcttcccaagccccgagagcagctgcggctttaccagcgagagctaccagcagggcgtgctgagcgccaccatcctgtacgagatcctgctgggcaaggccaccctgtacgccgtgctggtgtctgccctggtgctgatggctatggtcaagcggaaggacagccgggga

SEQ ID NO: 39881 - DNA, 2082 bp, synthetic construct
  source 1..2082: mol_type = other DNA
atggccttaccagtgaccgccttgctcctgccgctggccttgctgctccacgccgccaggccggagatcgtgctgacacagtctcccgccacactgtcactgtctccaggcgaaagagccacactgagctgtagagccagccagagcgtgtcctcttacctggcctggtatcagcagaagcctggacaggctccccggctgctgatctacgatgccagcaatagagccacaggcatccccgccagattttctggctctggcagcggcaccgatttcaccctgaccataagcagcctggaacctgaggacttcgccgtgtactactgccagcagagaagcaactggcccctgacctttggacagggcaccaaggtggaaatcaaactcgagatccagaaccctgatcctgccgtgtaccagctgcgggatagcaagagcagcgacaagagcgtgtgtctgttcaccgacttcgacagccagaccaacgtgtcccagagcaaggactccgacgtgtacatcaccgataagtgcgtgctggacatgcggagcatggacttcaagagcaactccgccgtggcctggtccaacaagtccgatttcgcctgcgccaacgccttcaacaacagcattatccccgaggacacattcttcccaagccccgagagcagctgcggctttaccagcgagagctaccagcagggcgtgctgagcgccaccatcctgtacgagatcctgctgggcaaggccaccctgtacgccgtgctggtgtctgccctggtgctgatggctatggtcaagcggaaggacagccggggacgcgccaagagaagcggatctggcgtgaagcagaccctgaatttcgacctgctgaagctggctggcgacgtggaatccaacccaggccctactagtatggactggatttggcgcatccttttccttgtcggcgctgctaccggcgcccattccgggcccatggaccccgacctggaaatcagagccgccttcctgcggcagagaaacacagccctgagaacagaggtggccgagctggaacaagaggtgcagcggctggaaaacgaggtgtcccagtacgagacaagatacggccctctcggaggcggaaaaggatccggcggcggaggatctggcggaggcggatctgggggcggaggctctttcgaacaagttcagctggttcagagcggagccgaagtgaagaaacctggcagcagcgtgaaggtgtcctgcaaagcaagcggcggcacctttagcacctacgccatccactgggttcgacaggcaccaggacaaggactggaatggatgggcagaatcatccccatcgagggcagagcctactacgcccagaaattccagggcagagtgaccatcaccgccgacgagtctacaagcaccgcctacatggaactgagcagcctgagaagcgaggataccgctgtgtactattgcgccagaggccggtacagctacagatattggttcgactactggggccagggcaccctggttacagtctcttctacgcgtgaggacctgaagaacgtgttcccacctgaggtggccgtgttcgagcctagcgaggccgagatcagccacacccagaaagccaccctcgtgtgcctggctaccggcttctaccccgaccatgtggaactgtcttggtgggtcaacggcaaagaggtgcacagcggcgtgtgtaccgacccccagccactgaaagaacagcccgccctgaacgacagccggtactgcctgagcagcagactgagagtgtccgccaccttctggcagaacccccggaaccacttcagatgccaggtgcagttctacggcctgagcgagaacgacgagtggacccaggacagagccaagcccgtgacccagatcgtgtctgccgaagcctggggcagagccgattgcgacgtgaagctggtggaaaagagcttcgagacagacaccaacctgaacttccagaacctgagcgtgatcggcttcagaatcctgctgctgaaagtggccggctttaacctgctgatgaccctgcggctgtggtccagc

SEQ ID NO: 39882 - DNA, 2001 bp, synthetic construct
  source 1..2001: mol_type = other DNA
atggccttaccagtgaccgccttgctcctgccgctggccttgctgctccacgccgccaggccggagatcgtgctgacacagtctcccgccacactgtcactgtctccaggcgaaagagccacactgagctgtagagccagccagagcgtgtcctcttacctggcctggtatcagcagaagcctggacaggctccccggctgctgatctacgatgccagcaatagagccacaggcatccccgccagattttctggctctggcagcggcaccgatttcaccctgaccataagcagcctggaacctgaggacttcgccgtgtactactgccagcagagaagcaactggcccctgacctttggacagggcaccaaggtggaaatcaaactcgaggacctgaagaacgtgttcccacctgaggtggccgtgttcgagcctagcgaggccgagatcagccacacccagaaagccaccctcgtgtgcctggctaccggcttctaccccgaccatgtggaactgtcttggtgggtcaacggcaaagaggtgcacagcggcgtgtgtaccgacccccagccactgaaagaacagcccgccctgaacgacagccggtactgcctgagcagcagactgagagtgtccgccaccttctggcagaacccccggaaccacttcagatgccaggtgcagttctacggcctgagcgagaacgacgagtggacccaggacagagccaagcccgtgacccagatcgtgtctgccgaagcctggggcagagccgattgcgacgtgaagctggtggaaaagagcttcgagacagacaccaacctgaacttccagaacctgagcgtgatcggcttcagaatcctgctgctgaaagtggccggctttaacctgctgatgaccctgcggctgtggtccagcagggccaagcgatctggatctggagcaacaaacttctcactactcaaacaagcaggtgacgtggaggagaatcccgggcctactagtatggactggatttggcgcatccttttccttgtcggcgctgctaccggcgcccattccgggcccgaagttgctgccctcgagaaggaggtagcagctttggaaaaagaagtcgcagcccttgagaaagaagttgcggctctggagaagggatccggcggcggaggatctggcggaggcggatctgggggcggaggctctttcgaacaagttcagctggttcagagcggagccgaagtgaagaaacctggcagcagcgtgaaggtgtcctgcaaagcaagcggcggcacctttagcacctacgccatccactgggttcgacaggcaccaggacaaggactggaatggatgggcagaatcatccccatcgagggcagagcctactacgcccagaaattccagggcagagtgaccatcaccgccgacgagtctacaagcaccgcctacatggaactgagcagcctgagaagcgaggataccgctgtgtactattgcgccagaggccggtacagctacagatattggttcgactactggggccagggcaccctggttacagtctcttctacgcgtatccagaaccctgatcctgccgtgtaccagctgcgggatagcaagagcagcgacaagagcgtgtgtctgttcaccgacttcgacagccagaccaacgtgtcccagagcaaggactccgacgtgtacatcaccgataagtgcgtgctggacatgcggagcatggacttcaagagcaactccgccgtggcctggtccaacaagtccgatttcgcctgcgccaacgccttcaacaacagcattatccccgaggacacattcttcccaagccccgagagcagctgcggctttaccagcgagagctaccagcagggcgtgctgagcgccaccatcctgtacgagatcctgctgggcaaggccaccctgtacgccgtgctggtgtctgccctggtgctgatggctatggtcaagcggaaggacagccgggga

SEQ ID NO: 39883 - DNA, 2013 bp, synthetic construct
  source 1..2013: mol_type = other DNA
atggccttaccagtgaccgccttgctcctgccgctggccttgctgctccacgccgccaggccggagatcgtgctgacacagtctcccgccacactgtcactgtctccaggcgaaagagccacactgagctgtagagccagccagagcgtgtcctcttacctggcctggtatcagcagaagcctggacaggctccccggctgctgatctacgatgccagcaatagagccacaggcatccccgccagattttctggctctggcagcggcaccgatttcaccctgaccataagcagcctggaacctgaggacttcgccgtgtactactgccagcagagaagcaactggcccctgacctttggacagggcaccaaggtggaaatcaaactcgagatccagaaccctgatcctgccgtgtaccagctgcgggatagcaagagcagcgacaagagcgtgtgtctgttcaccgacttcgacagccagaccaacgtgtcccagagcaaggactccgacgtgtacatcaccgataagtgcgtgctggacatgcggagcatggacttcaagagcaactccgccgtggcctggtccaacaagtccgatttcgcctgcgccaacgccttcaacaacagcattatccccgaggacacattcttcccaagccccgagagcagctgcggctttaccagcgagagctaccagcagggcgtgctgagcgccaccatcctgtacgagatcctgctgggcaaggccaccctgtacgccgtgctggtgtctgccctggtgctgatggctatggtcaagcggaaggacagccggggacgcgccaagagaagcggatctggcgtgaagcagaccctgaatttcgacctgctgaagctggctggcgacgtggaatccaacccaggccctactagtatggactggatttggcgcatccttttccttgtcggcgctgctaccggcgcccattccgggcccgaagttgctgccctcgagaaggaggtagcagctttggaaaaagaagtcgcagcccttgagaaagaagttgcggctctggagaagggatccggcggcggaggatctggcggaggcggatctgggggcggaggctctttcgaacaagttcagctggttcagagcggagccgaagtgaagaaacctggcagcagcgtgaaggtgtcctgcaaagcaagcggcggcacctttagcacctacgccatccactgggttcgacaggcaccaggacaaggactggaatggatgggcagaatcatccccatcgagggcagagcctactacgcccagaaattccagggcagagtgaccatcaccgccgacgagtctacaagcaccgcctacatggaactgagcagcctgagaagcgaggataccgctgtgtactattgcgccagaggccggtacagctacagatattggttcgactactggggccagggcaccctggttacagtctcttctacgcgtgaggacctgaagaacgtgttcccacctgaggtggccgtgttcgagcctagcgaggccgagatcagccacacccagaaagccaccctcgtgtgcctggctaccggcttctaccccgaccatgtggaactgtcttggtgggtcaacggcaaagaggtgcacagcggcgtgtgtaccgacccccagccactgaaagaacagcccgccctgaacgacagccggtactgcctgagcagcagactgagagtgtccgccaccttctggcagaacccccggaaccacttcagatgccaggtgcagttctacggcctgagcgagaacgacgagtggacccaggacagagccaagcccgtgacccagatcgtgtctgccgaagcctggggcagagccgattgcgacgtgaagctggtggaaaagagcttcgagacagacaccaacctgaacttccagaacctgagcgtgatcggcttcagaatcctgctgctgaaagtggccggctttaacctgctgatgaccctgcggctgtggtccagc

SEQ ID NO: 39884 - DNA, 2271 bp, synthetic construct
  source 1..2271: mol_type = other DNA
atggccttaccagtgaccgccttgctcctgccgctggccttgctgctccacgccgccaggccggagatcgtgctgacacagtctcccgccacactgtcactgtctccaggcgaaagagccacactgagctgtagagccagccagagcgtgtcctcttacctggcctggtatcagcagaagcctggacaggctccccggctgctgatctacgatgccagcaatagagccacaggcatccccgccagattttctggctctggcagcggcaccgatttcaccctgaccataagcagcctggaacctgaggacttcgccgtgtactactgccagcagagaagcaactggcccctgacctttggacagggcaccaaggtggaaatcaaactcgaggacctgaagaacgtgttcccacctgaggtggccgtgttcgagcctagcgaggccgagatcagccacacccagaaagccaccctcgtgtgcctggctaccggcttctaccccgaccatgtggaactgtcttggtgggtcaacggcaaagaggtgcacagcggcgtgtgtaccgacccccagccactgaaagaacagcccgccctgaacgacagccggtactgcctgagcagcagactgagagtgtccgccaccttctggcagaacccccggaaccacttcagatgccaggtgcagttctacggcctgagcgagaacgacgagtggacccaggacagagccaagcccgtgacccagatcgtgtctgccgaagcctggggcagagccgattgcgacgtgaagctggtggaaaagagcttcgagacagacaccaacctgaacttccagaacctgagcgtgatcggcttcagaatcctgctgctgaaagtggccggctttaacctgctgatgaccctgcggctgtggtccagcagggccaagcgatctggatctggagcaacaaacttctcactactcaaacaagcaggtgacgtggaggagaatcccgggcctactagtatggactggatttggcgcatccttttccttgtcggcgctgctaccggcgcccattccgggccccaggttcagctgcaagagtctggcggaggacttgctcaagctggcggaagcctgagactgtcttgtgccgcctctggcagaaccttcagcatgggctggtttagacaggcccctggcaaagagagagagttcgtcgccgccatcacatacagcggcggcagcccttactacgcctcttctgtcagaggccggttcaccatcagccgggacaacgccaagaacaccgtgtacctccagatgaacagcctgaagccagaggacaccgccgtgtactactgtgccgccaatccaacctacggcagcgactggaatgccgagaattggggccagggcacccaagtgacagtgtctagtggatccggcggcggaggatctggcggaggcggatctgggggcggaggctctttcgaacaagttcagctggttcagagcggagccgaagtgaagaaacctggcagcagcgtgaaggtgtcctgcaaagcaagcggcggcacctttagcacctacgccatccactgggttcgacaggcaccaggacaaggactggaatggatgggcagaatcatccccatcgagggcagagcctactacgcccagaaattccagggcagagtgaccatcaccgccgacgagtctacaagcaccgcctacatggaactgagcagcctgagaagcgaggataccgctgtgtactattgcgccagaggccggtacagctacagatattggttcgactactggggccagggcaccctggttacagtctcttctacgcgtatccagaaccctgatcctgccgtgtaccagctgcgggatagcaagagcagcgacaagagcgtgtgtctgttcaccgacttcgacagccagaccaacgtgtcccagagcaaggactccgacgtgtacatcaccgataagtgcgtgctggacatgcggagcatggacttcaagagcaactccgccgtggcctggtccaacaagtccgatttcgcctgcgccaacgccttcaacaacagcattatccccgaggacacattcttcccaagccccgagagcagctgcggctttaccagcgagagctaccagcagggcgtgctgagcgccaccatcctgtacgagatcctgctgggcaaggccaccctgtacgccgtgctggtgtctgccctggtgctgatggctatggtcaagcggaaggacagccgggga

SEQ ID NO: 39885 - DNA, 2283 bp, synthetic construct
  source 1..2283: mol_type = other DNA
atggccttaccagtgaccgccttgctcctgccgctggccttgctgctccacgccgccaggccggagatcgtgctgacacagtctcccgccacactgtcactgtctccaggcgaaagagccacactgagctgtagagccagccagagcgtgtcctcttacctggcctggtatcagcagaagcctggacaggctccccggctgctgatctacgatgccagcaatagagccacaggcatccccgccagattttctggctctggcagcggcaccgatttcaccctgaccataagcagcctggaacctgaggacttcgccgtgtactactgccagcagagaagcaactggcccctgacctttggacagggcaccaaggtggaaatcaaactcgagatccagaaccctgatcctgccgtgtaccagctgcgggatagcaagagcagcgacaagagcgtgtgtctgttcaccgacttcgacagccagaccaacgtgtcccagagcaaggactccgacgtgtacatcaccgataagtgcgtgctggacatgcggagcatggacttcaagagcaactccgccgtggcctggtccaacaagtccgatttcgcctgcgccaacgccttcaacaacagcattatccccgaggacacattcttcccaagccccgagagcagctgcggctttaccagcgagagctaccagcagggcgtgctgagcgccaccatcctgtacgagatcctgctgggcaaggccaccctgtacgccgtgctggtgtctgccctggtgctgatggctatggtcaagcggaaggacagccggggacgcgccaagagaagcggatctggcgtgaagcagaccctgaatttcgacctgctgaagctggctggcgacgtggaatccaacccaggccctactagtatggactggatttggcgcatccttttccttgtcggcgctgctaccggcgcccattccgggccccaggttcagctgcaagagtctggcggaggacttgctcaagctggcggaagcctgagactgtcttgtgccgcctctggcagaaccttcagcatgggctggtttagacaggcccctggcaaagagagagagttcgtcgccgccatcacatacagcggcggcagcccttactacgcctcttctgtcagaggccggttcaccatcagccgggacaacgccaagaacaccgtgtacctccagatgaacagcctgaagccagaggacaccgccgtgtactactgtgccgccaatccaacctacggcagcgactggaatgccgagaattggggccagggcacccaagtgacagtgtctagtggatccggcggcggaggatctggcggaggcggatctgggggcggaggctctttcgaacaagttcagctggttcagagcggagccgaagtgaagaaacctggcagcagcgtgaaggtgtcctgcaaagcaagcggcggcacctttagcacctacgccatccactgggttcgacaggcaccaggacaaggactggaatggatgggcagaatcatccccatcgagggcagagcctactacgcccagaaattccagggcagagtgaccatcaccgccgacgagtctacaagcaccgcctacatggaactgagcagcctgagaagcgaggataccgctgtgtactattgcgccagaggccggtacagctacagatattggttcgactactggggccagggcaccctggttacagtctcttctacgcgtgaggacctgaagaacgtgttcccacctgaggtggccgtgttcgagcctagcgaggccgagatcagccacacccagaaagccaccctcgtgtgcctggctaccggcttctaccccgaccatgtggaactgtcttggtgggtcaacggcaaagaggtgcacagcggcgtgtgtaccgacccccagccactgaaagaacagcccgccctgaacgacagccggtactgcctgagcagcagactgagagtgtccgccaccttctggcagaacccccggaaccacttcagatgccaggtgcagttctacggcctgagcgagaacgacgagtggacccaggacagagccaagcccgtgacccagatcgtgtctgccgaagcctggggcagagccgattgcgacgtgaagctggtggaaaagagcttcgagacagacaccaacctgaacttccagaacctgagcgtgatcggcttcagaatcctgctgctgaaagtggccggctttaacctgctgatgaccctgcggctgtggtccagc

SEQ ID NO: 39886 - DNA, 2289 bp, synthetic construct
  source 1..2289: mol_type = other DNA
atggccttaccagtgaccgccttgctcctgccgctggccttgctgctccacgccgccaggccggaagtgcaactggtggaatctggaggctctctggtgcagccagggggaagcctgagactgtcttgtgccgcttccggcttcaccttcgacgactacgccatgagctgggtgcgccaggtgccaggcaaaggcctggaatgggtgtccagcatcaactggagcggcacccacaccgattacgccgactccgtgaaaggcagattcacaatcagcagaaacaacgccaacaataccctgtacctgcagatgaactccctgaagtctgaggatacagcagtgtattattgcgccaagaactggcgggacgccggcaccacttggtttgagaaaagcggctctgccggacagggaacccaagtgacagtgtcctccggtaccggcggaggcggatctggcggcggaggtagcggtggcggaggatctgaattcgagatcgtgctgacacagtctcccgccacactgtcactgtctccaggcgaaagagccacactgagctgtagagccagccagagcgtgtcctcttacctggcctggtatcagcagaagcctggacaggctccccggctgctgatctacgatgccagcaatagagccacaggcatccccgccagattttctggctctggcagcggcaccgatttcaccctgaccataagcagcctggaacctgaggacttcgccgtgtactactgccagcagagaagcaactggcccctgacctttggacagggcaccaaggtggaaatcaaactcgaggacctgaagaacgtgttcccacctgaggtggccgtgttcgagcctagcgaggccgagatcagccacacccagaaagccaccctcgtgtgcctggctaccggcttctaccccgaccatgtggaactgtcttggtgggtcaacggcaaagaggtgcacagcggcgtgtgtaccgacccccagccactgaaagaacagcccgccctgaacgacagccggtactgcctgagcagcagactgagagtgtccgccaccttctggcagaacccccggaaccacttcagatgccaggtgcagttctacggcctgagcgagaacgacgagtggacccaggacagagccaagcccgtgacccagatcgtgtctgccgaagcctggggcagagccgattgcgacgtgaagctggtggaaaagagcttcgagacagacaccaacctgaacttccagaacctgagcgtgatcggcttcagaatcctgctgctgaaagtggccggctttaacctgctgatgaccctgcggctgtggtccagcagggccaagcgatctggatctggagcaacaaacttctcactactcaaacaagcaggtgacgtggaggagaatcccgggcctactagtatggactggatttggcgcatccttttccttgtcggcgctgctaccggcgcgcattccttcgaacaagttcagctggttcagagcggagccgaagtgaagaaacctggcagcagcgtgaaggtgtcctgcaaagcaagcggcggcacctttagcacctacgccatccactgggttcgacaggcaccaggacaaggactggaatggatgggcagaatcatccccatcgagggcagagcctactacgcccagaaattccagggcagagtgaccatcaccgccgacgagtctacaagcaccgcctacatggaactgagcagcctgagaagcgaggataccgctgtgtactattgcgccagaggccggtacagctacagatattggttcgactactggggccagggcaccctggttacagtctcttctacgcgtatccagaaccctgatcctgccgtgtaccagctgcgggatagcaagagcagcgacaagagcgtgtgtctgttcaccgacttcgacagccagaccaacgtgtcccagagcaaggactccgacgtgtacatcaccgataagtgcgtgctggacatgcggagcatggacttcaagagcaactccgccgtggcctggtccaacaagtccgatttcgcctgcgccaacgccttcaacaacagcattatccccgaggacacattcttcccaagccccgagagcagctgcggctttaccagcgagagctaccagcagggcgtgctgagcgccaccatcctgtacgagatcctgctgggcaaggccaccctgtacgccgtgctggtgtctgccctggtgctgatggctatggtcaagcggaaggacagccgggga

SEQ ID NO: 39887 - DNA, 2301 bp, synthetic construct
  source 1..2301: mol_type = other DNA
atggccttaccagtgaccgccttgctcctgccgctggccttgctgctccacgccgccaggccggaagtgcaactggtggaatctggaggctctctggtgcagccagggggaagcctgagactgtcttgtgccgcttccggcttcaccttcgacgactacgccatgagctgggtgcgccaggtgccaggcaaaggcctggaatgggtgtccagcatcaactggagcggcacccacaccgattacgccgactccgtgaaaggcagattcacaatcagcagaaacaacgccaacaataccctgtacctgcagatgaactccctgaagtctgaggatacagcagtgtattattgcgccaagaactggcgggacgccggcaccacttggtttgagaaaagcggctctgccggacagggaacccaagtgacagtgtcctccggtaccggcggaggcggatctggcggcggaggtagcggtggcggaggatctgaattcgagatcgtgctgacacagtctcccgccacactgtcactgtctccaggcgaaagagccacactgagctgtagagccagccagagcgtgtcctcttacctggcctggtatcagcagaagcctggacaggctccccggctgctgatctacgatgccagcaatagagccacaggcatccccgccagattttctggctctggcagcggcaccgatttcaccctgaccataagcagcctggaacctgaggacttcgccgtgtactactgccagcagagaagcaactggcccctgacctttggacagggcaccaaggtggaaatcaaactcgagatccagaaccctgatcctgccgtgtaccagctgcgggatagcaagagcagcgacaagagcgtgtgtctgttcaccgacttcgacagccagaccaacgtgtcccagagcaaggactccgacgtgtacatcaccgataagtgcgtgctggacatgcggagcatggacttcaagagcaactccgccgtggcctggtccaacaagtccgatttcgcctgcgccaacgccttcaacaacagcattatccccgaggacacattcttcccaagccccgagagcagctgcggctttaccagcgagagctaccagcagggcgtgctgagcgccaccatcctgtacgagatcctgctgggcaaggccaccctgtacgccgtgctggtgtctgccctggtgctgatggctatggtcaagcggaaggacagccggggacgcgccaagagaagcggatctggcgtgaagcagaccctgaatttcgacctgctgaagctggctggcgacgtggaatccaacccaggccctactagtatggactggatttggcgcatccttttccttgtcggcgctgctaccggcgcgcattccttcgaacaagttcagctggttcagagcggagccgaagtgaagaaacctggcagcagcgtgaaggtgtcctgcaaagcaagcggcggcacctttagcacctacgccatccactgggttcgacaggcaccaggacaaggactggaatggatgggcagaatcatccccatcgagggcagagcctactacgcccagaaattccagggcagagtgaccatcaccgccgacgagtctacaagcaccgcctacatggaactgagcagcctgagaagcgaggataccgctgtgtactattgcgccagaggccggtacagctacagatattggttcgactactggggccagggcaccctggttacagtctcttctacgcgtgaggacctgaagaacgtgttcccacctgaggtggccgtgttcgagcctagcgaggccgagatcagccacacccagaaagccaccctcgtgtgcctggctaccggcttctaccccgaccatgtggaactgtcttggtgggtcaacggcaaagaggtgcacagcggcgtgtgtaccgacccccagccactgaaagaacagcccgccctgaacgacagccggtactgcctgagcagcagactgagagtgtccgccaccttctggcagaacccccggaaccacttcagatgccaggtgcagttctacggcctgagcgagaacgacgagtggacccaggacagagccaagcccgtgacccagatcgtgtctgccgaagcctggggcagagccgattgcgacgtgaagctggtggaaaagagcttcgagacagacaccaacctgaacttccagaacctgagcgtgatcggcttcagaatcctgctgctgaaagtggccggctttaacctgctgatgaccctgcggctgtggtccagc

SEQ ID NO: 39888 - DNA, 2283 bp, synthetic construct
  source 1..2283: mol_type = other DNA
atggccttaccagtgaccgccttgctcctgccgctggccttgctgctccacgccgccaggccggaagttcagctgcttgagtctggcggaggactggttcaacctggcggaagcctgagactgtcttgtgccgccagcggcttcatcttcagcagctacgccatgagctgggtccgacaggctcctggaaagggccaagaatgggtttccggcgttagcggcacaggcgtgaacacctactacgccgatagcgtgaagggcagattcaccatcagccgggacaacagcaagaacaccctgtacctccagatgaacagcctgagagccgaggacaccgccgtgtactattgtgcctctggcaaaggctgggacagcggctcttggtacgaggactatagaggccagggcaccctggtcacagtttcttcaggtaccggcggaggcggatctggcggcggaggtagcggtggcggaggatctgaattcgagatcgtgctgacacagtctcccgccacactgtcactgtctccaggcgaaagagccacactgagctgtagagccagccagagcgtgtcctcttacctggcctggtatcagcagaagcctggacaggctccccggctgctgatctacgatgccagcaatagagccacaggcatccccgccagattttctggctctggcagcggcaccgatttcaccctgaccataagcagcctggaacctgaggacttcgccgtgtactactgccagcagagaagcaactggcccctgacctttggacagggcaccaaggtggaaatcaaactcgaggacctgaagaacgtgttcccacctgaggtggccgtgttcgagcctagcgaggccgagatcagccacacccagaaagccaccctcgtgtgcctggctaccggcttctaccccgaccatgtggaactgtcttggtgggtcaacggcaaagaggtgcacagcggcgtgtgtaccgacccccagccactgaaagaacagcccgccctgaacgacagccggtactgcctgagcagcagactgagagtgtccgccaccttctggcagaacccccggaaccacttcagatgccaggtgcagttctacggcctgagcgagaacgacgagtggacccaggacagagccaagcccgtgacccagatcgtgtctgccgaagcctggggcagagccgattgcgacgtgaagctggtggaaaagagcttcgagacagacaccaacctgaacttccagaacctgagcgtgatcggcttcagaatcctgctgctgaaagtggccggctttaacctgctgatgaccctgcggctgtggtccagcagggccaagcgatctggatctggagcaacaaacttctcactactcaaacaagcaggtgacgtggaggagaatcccgggcctactagtatggactggatttggcgcatccttttccttgtcggcgctgctaccggcgcgcattccttcgaacaagttcagctggttcagagcggagccgaagtgaagaaacctggcagcagcgtgaaggtgtcctgcaaagcaagcggcggcacctttagcacctacgccatccactgggttcgacaggcaccaggacaaggactggaatggatgggcagaatcatccccatcgagggcagagcctactacgcccagaaattccagggcagagtgaccatcaccgccgacgagtctacaagcaccgcctacatggaactgagcagcctgagaagcgaggataccgctgtgtactattgcgccagaggccggtacagctacagatattggttcgactactggggccagggcaccctggttacagtctcttctacgcgtatccagaaccctgatcctgccgtgtaccagctgcgggatagcaagagcagcgacaagagcgtgtgtctgttcaccgacttcgacagccagaccaacgtgtcccagagcaaggactccgacgtgtacatcaccgataagtgcgtgctggacatgcggagcatggacttcaagagcaactccgccgtggcctggtccaacaagtccgatttcgcctgcgccaacgccttcaacaacagcattatccccgaggacacattcttcccaagccccgagagcagctgcggctttaccagcgagagctaccagcagggcgtgctgagcgccaccatcctgtacgagatcctgctgggcaaggccaccctgtacgccgtgctggtgtctgccctggtgctgatggctatggtcaagcggaaggacagccgggga

SEQ ID NO: 39889 - DNA, 2295 bp, synthetic construct
  source 1..2295: mol_type = other DNA
atggccttaccagtgaccgccttgctcctgccgctggccttgctgctccacgccgccaggccggaagttcagctgcttgagtctggcggaggactggttcaacctggcggaagcctgagactgtcttgtgccgccagcggcttcatcttcagcagctacgccatgagctgggtccgacaggctcctggaaagggccaagaatgggtttccggcgttagcggcacaggcgtgaacacctactacgccgatagcgtgaagggcagattcaccatcagccgggacaacagcaagaacaccctgtacctccagatgaacagcctgagagccgaggacaccgccgtgtactattgtgcctctggcaaaggctgggacagcggctcttggtacgaggactatagaggccagggcaccctggtcacagtttcttcaggtaccggcggaggcggatctggcggcggaggtagcggtggcggaggatctgaattcgagatcgtgctgacacagtctcccgccacactgtcactgtctccaggcgaaagagccacactgagctgtagagccagccagagcgtgtcctcttacctggcctggtatcagcagaagcctggacaggctccccggctgctgatctacgatgccagcaatagagccacaggcatccccgccagattttctggctctggcagcggcaccgatttcaccctgaccataagcagcctggaacctgaggacttcgccgtgtactactgccagcagagaagcaactggcccctgacctttggacagggcaccaaggtggaaatcaaactcgagatccagaaccctgatcctgccgtgtaccagctgcgggatagcaagagcagcgacaagagcgtgtgtctgttcaccgacttcgacagccagaccaacgtgtcccagagcaaggactccgacgtgtacatcaccgataagtgcgtgctggacatgcggagcatggacttcaagagcaactccgccgtggcctggtccaacaagtccgatttcgcctgcgccaacgccttcaacaacagcattatccccgaggacacattcttcccaagccccgagagcagctgcggctttaccagcgagagctaccagcagggcgtgctgagcgccaccatcctgtacgagatcctgctgggcaaggccaccctgtacgccgtgctggtgtctgccctggtgctgatggctatggtcaagcggaaggacagccggggacgcgccaagagaagcggatctggcgtgaagcagaccctgaatttcgacctgctgaagctggctggcgacgtggaatccaacccaggccctactagtatggactggatttggcgcatccttttccttgtcggcgctgctaccggcgcgcattccttcgaacaagttcagctggttcagagcggagccgaagtgaagaaacctggcagcagcgtgaaggtgtcctgcaaagcaagcggcggcacctttagcacctacgccatccactgggttcgacaggcaccaggacaaggactggaatggatgggcagaatcatccccatcgagggcagagcctactacgcccagaaattccagggcagagtgaccatcaccgccgacgagtctacaagcaccgcctacatggaactgagcagcctgagaagcgaggataccgctgtgtactattgcgccagaggccggtacagctacagatattggttcgactactggggccagggcaccctggttacagtctcttctacgcgtgaggacctgaagaacgtgttcccacctgaggtggccgtgttcgagcctagcgaggccgagatcagccacacccagaaagccaccctcgtgtgcctggctaccggcttctaccccgaccatgtggaactgtcttggtgggtcaacggcaaagaggtgcacagcggcgtgtgtaccgacccccagccactgaaagaacagcccgccctgaacgacagccggtactgcctgagcagcagactgagagtgtccgccaccttctggcagaacccccggaaccacttcagatgccaggtgcagttctacggcctgagcgagaacgacgagtggacccaggacagagccaagcccgtgacccagatcgtgtctgccgaagcctggggcagagccgattgcgacgtgaagctggtggaaaagagcttcgagacagacaccaacctgaacttccagaacctgagcgtgatcggcttcagaatcctgctgctgaaagtggccggctttaacctgctgatgaccctgcggctgtggtccagc

SEQ ID NO: 39890 - DNA, 2187 bp, synthetic construct
  source 1..2187: mol_type = other DNA
atggccttaccagtgaccgccttgctcctgccgctggccttgctgctccacgccgccaggccgatgctgcccgctcctaagaatctggtggtgtccagaatcaccgaggacagcgccagactgtcttggacagctcctgatgccgccttcgacagcttccccatccggtacatcgagacactgatctggggcgaagccatctggctggatgtgcctggaagcgagagaagctacgacctgaccggactgaagcctggcacagagtatgccgtggtcatcaccggcgtgaaaggcggcagattctctagccctctggtggcctctttcaccaccggtaccggcggaggcggatctggcggcggaggtagcggtggcggaggatctgaattcgagatcgtgctgacacagtctcccgccacactgtcactgtctccaggcgaaagagccacactgagctgtagagccagccagagcgtgtcctcttacctggcctggtatcagcagaagcctggacaggctccccggctgctgatctacgatgccagcaatagagccacaggcatccccgccagattttctggctctggcagcggcaccgatttcaccctgaccataagcagcctggaacctgaggacttcgccgtgtactactgccagcagagaagcaactggcccctgacctttggacagggcaccaaggtggaaatcaaactcgaggacctgaagaacgtgttcccacctgaggtggccgtgttcgagcctagcgaggccgagatcagccacacccagaaagccaccctcgtgtgcctggctaccggcttctaccccgaccatgtggaactgtcttggtgggtcaacggcaaagaggtgcacagcggcgtgtgtaccgacccccagccactgaaagaacagcccgccctgaacgacagccggtactgcctgagcagcagactgagagtgtccgccaccttctggcagaacccccggaaccacttcagatgccaggtgcagttctacggcctgagcgagaacgacgagtggacccaggacagagccaagcccgtgacccagatcgtgtctgccgaagcctggggcagagccgattgcgacgtgaagctggtggaaaagagcttcgagacagacaccaacctgaacttccagaacctgagcgtgatcggcttcagaatcctgctgctgaaagtggccggctttaacctgctgatgaccctgcggctgtggtccagcagggccaagcgatctggatctggagcaacaaacttctcactactcaaacaagcaggtgacgtggaggagaatcccgggcctactagtatggactggatttggcgcatccttttccttgtcggcgctgctaccggcgcgcattccttcgaacaagttcagctggttcagagcggagccgaagtgaagaaacctggcagcagcgtgaaggtgtcctgcaaagcaagcggcggcacctttagcacctacgccatccactgggttcgacaggcaccaggacaaggactggaatggatgggcagaatcatccccatcgagggcagagcctactacgcccagaaattccagggcagagtgaccatcaccgccgacgagtctacaagcaccgcctacatggaactgagcagcctgagaagcgaggataccgctgtgtactattgcgccagaggccggtacagctacagatattggttcgactactggggccagggcaccctggttacagtctcttctacgcgtatccagaaccctgatcctgccgtgtaccagctgcgggatagcaagagcagcgacaagagcgtgtgtctgttcaccgacttcgacagccagaccaacgtgtcccagagcaaggactccgacgtgtacatcaccgataagtgcgtgctggacatgcggagcatggacttcaagagcaactccgccgtggcctggtccaacaagtccgatttcgcctgcgccaacgccttcaacaacagcattatccccgaggacacattcttcccaagccccgagagcagctgcggctttaccagcgagagctaccagcagggcgtgctgagcgccaccatcctgtacgagatcctgctgggcaaggccaccctgtacgccgtgctggtgtctgccctggtgctgatggctatggtcaagcggaaggacagccgggga

SEQ ID NO: 39891 - DNA, 2199 bp, synthetic construct
  source 1..2199: mol_type = other DNA
atggccttaccagtgaccgccttgctcctgccgctggccttgctgctccacgccgccaggccgatgctgcccgctcctaagaatctggtggtgtccagaatcaccgaggacagcgccagactgtcttggacagctcctgatgccgccttcgacagcttccccatccggtacatcgagacactgatctggggcgaagccatctggctggatgtgcctggaagcgagagaagctacgacctgaccggactgaagcctggcacagagtatgccgtggtcatcaccggcgtgaaaggcggcagattctctagccctctggtggcctctttcaccaccggtaccggcggaggcggatctggcggcggaggtagcggtggcggaggatctgaattcgagatcgtgctgacacagtctcccgccacactgtcactgtctccaggcgaaagagccacactgagctgtagagccagccagagcgtgtcctcttacctggcctggtatcagcagaagcctggacaggctccccggctgctgatctacgatgccagcaatagagccacaggcatccccgccagattttctggctctggcagcggcaccgatttcaccctgaccataagcagcctggaacctgaggacttcgccgtgtactactgccagcagagaagcaactggcccctgacctttggacagggcaccaaggtggaaatcaaactcgagatccagaaccctgatcctgccgtgtaccagctgcgggatagcaagagcagcgacaagagcgtgtgtctgttcaccgacttcgacagccagaccaacgtgtcccagagcaaggactccgacgtgtacatcaccgataagtgcgtgctggacatgcggagcatggacttcaagagcaactccgccgtggcctggtccaacaagtccgatttcgcctgcgccaacgccttcaacaacagcattatccccgaggacacattcttcccaagccccgagagcagctgcggctttaccagcgagagctaccagcagggcgtgctgagcgccaccatcctgtacgagatcctgctgggcaaggccaccctgtacgccgtgctggtgtctgccctggtgctgatggctatggtcaagcggaaggacagccggggacgcgccaagagaagcggatctggcgtgaagcagaccctgaatttcgacctgctgaagctggctggcgacgtggaatccaacccaggccctactagtatggactggatttggcgcatccttttccttgtcggcgctgctaccggcgcgcattccttcgaacaagttcagctggttcagagcggagccgaagtgaagaaacctggcagcagcgtgaaggtgtcctgcaaagcaagcggcggcacctttagcacctacgccatccactgggttcgacaggcaccaggacaaggactggaatggatgggcagaatcatccccatcgagggcagagcctactacgcccagaaattccagggcagagtgaccatcaccgccgacgagtctacaagcaccgcctacatggaactgagcagcctgagaagcgaggataccgctgtgtactattgcgccagaggccggtacagctacagatattggttcgactactggggccagggcaccctggttacagtctcttctacgcgtgaggacctgaagaacgtgttcccacctgaggtggccgtgttcgagcctagcgaggccgagatcagccacacccagaaagccaccctcgtgtgcctggctaccggcttctaccccgaccatgtggaactgtcttggtgggtcaacggcaaagaggtgcacagcggcgtgtgtaccgacccccagccactgaaagaacagcccgccctgaacgacagccggtactgcctgagcagcagactgagagtgtccgccaccttctggcagaacccccggaaccacttcagatgccaggtgcagttctacggcctgagcgagaacgacgagtggacccaggacagagccaagcccgtgacccagatcgtgtctgccgaagcctggggcagagccgattgcgacgtgaagctggtggaaaagagcttcgagacagacaccaacctgaacttccagaacctgagcgtgatcggcttcagaatcctgctgctgaaagtggccggctttaacctgctgatgaccctgcggctgtggtccagc

SEQ ID NO: 39892 - DNA, 2274 bp, synthetic construct
  source 1..2274: mol_type = other DNA
atggccttaccagtgaccgccttgctcctgccgctggccttgctgctccacgccgccaggccggaggtgcagctggttgaatctggcggaggactggttcagcctggcggatctctgagactgtcttgtgccgccagcggcttcaacatcaaggatacctgtatcggctgggttcgcagagcccctggcaaagaggaagaactggtcgccaaaatctgcaagtacagcggccacaccagatacgccgacagcgtgaagggcagattcaccatcagcgccgacaccagcaagaacaccgcctacctccagatgaacagcctgagagccgaggacaccgccgtgtactattgtgccgctgtgtccgtcagagatgggcactacaattactggggccagggcaccaccgtgaccgtttcttcaggtaccggcggaggcggatctggcggcggaggtagcggtggcggaggatctgaattcgagatcgtgctgacacagtctcccgccacactgtcactgtctccaggcgaaagagccacactgagctgtagagccagccagagcgtgtcctcttacctggcctggtatcagcagaagcctggacaggctccccggctgctgatctacgatgccagcaatagagccacaggcatccccgccagattttctggctctggcagcggcaccgatttcaccctgaccataagcagcctggaacctgaggacttcgccgtgtactactgccagcagagaagcaactggcccctgacctttggacagggcaccaaggtggaaatcaaactcgaggacctgaagaacgtgttcccacctgaggtggccgtgttcgagcctagcgaggccgagatcagccacacccagaaagccaccctcgtgtgcctggctaccggcttctaccccgaccatgtggaactgtcttggtgggtcaacggcaaagaggtgcacagcggcgtgtgtaccgacccccagccactgaaagaacagcccgccctgaacgacagccggtactgcctgagcagcagactgagagtgtccgccaccttctggcagaacccccggaaccacttcagatgccaggtgcagttctacggcctgagcgagaacgacgagtggacccaggacagagccaagcccgtgacccagatcgtgtctgccgaagcctggggcagagccgattgcgacgtgaagctggtggaaaagagcttcgagacagacaccaacctgaacttccagaacctgagcgtgatcggcttcagaatcctgctgctgaaagtggccggctttaacctgctgatgaccctgcggctgtggtccagcagggccaagcgatctggatctggagcaacaaacttctcactactcaaacaagcaggtgacgtggaggagaatcccgggcctactagtatggactggatttggcgcatccttttccttgtcggcgctgctaccggcgcgcattccttcgaacaagttcagctggttcagagcggagccgaagtgaagaaacctggcagcagcgtgaaggtgtcctgcaaagcaagcggcggcacctttagcacctacgccatccactgggttcgacaggcaccaggacaaggactggaatggatgggcagaatcatccccatcgagggcagagcctactacgcccagaaattccagggcagagtgaccatcaccgccgacgagtctacaagcaccgcctacatggaactgagcagcctgagaagcgaggataccgctgtgtactattgcgccagaggccggtacagctacagatattggttcgactactggggccagggcaccctggttacagtctcttctacgcgtatccagaaccctgatcctgccgtgtaccagctgcgggatagcaagagcagcgacaagagcgtgtgtctgttcaccgacttcgacagccagaccaacgtgtcccagagcaaggactccgacgtgtacatcaccgataagtgcgtgctggacatgcggagcatggacttcaagagcaactccgccgtggcctggtccaacaagtccgatttcgcctgcgccaacgccttcaacaacagcattatccccgaggacacattcttcccaagccccgagagcagctgcggctttaccagcgagagctaccagcagggcgtgctgagcgccaccatcctgtacgagatcctgctgggcaaggccaccctgtacgccgtgctggtgtctgccctggtgctgatggctatggtcaagcggaaggacagccgggga

SEQ ID NO: 39893 - DNA, 2286 bp, synthetic construct
  source 1..2286: mol_type = other DNA
atggccttaccagtgaccgccttgctcctgccgctggccttgctgctccacgccgccaggccggaggtgcagctggttgaatctggcggaggactggttcagcctggcggatctctgagactgtcttgtgccgccagcggcttcaacatcaaggatacctgtatcggctgggttcgcagagcccctggcaaagaggaagaactggtcgccaaaatctgcaagtacagcggccacaccagatacgccgacagcgtgaagggcagattcaccatcagcgccgacaccagcaagaacaccgcctacctccagatgaacagcctgagagccgaggacaccgccgtgtactattgtgccgctgtgtccgtcagagatgggcactacaattactggggccagggcaccaccgtgaccgtttcttcaggtaccggcggaggcggatctggcggcggaggtagcggtggcggaggatctgaattcgagatcgtgctgacacagtctcccgccacactgtcactgtctccaggcgaaagagccacactgagctgtagagccagccagagcgtgtcctcttacctggcctggtatcagcagaagcctggacaggctccccggctgctgatctacgatgccagcaatagagccacaggcatccccgccagattttctggctctggcagcggcaccgatttcaccctgaccataagcagcctggaacctgaggacttcgccgtgtactactgccagcagagaagcaactggcccctgacctttggacagggcaccaaggtggaaatcaaactcgagatccagaaccctgatcctgccgtgtaccagctgcgggatagcaagagcagcgacaagagcgtgtgtctgttcaccgacttcgacagccagaccaacgtgtcccagagcaaggactccgacgtgtacatcaccgataagtgcgtgctggacatgcggagcatggacttcaagagcaactccgccgtggcctggtccaacaagtccgatttcgcctgcgccaacgccttcaacaacagcattatccccgaggacacattcttcccaagccccgagagcagctgcggctttaccagcgagagctaccagcagggcgtgctgagcgccaccatcctgtacgagatcctgctgggcaaggccaccctgtacgccgtgctggtgtctgccctggtgctgatggctatggtcaagcggaaggacagccggggacgcgccaagagaagcggatctggcgtgaagcagaccctgaatttcgacctgctgaagctggctggcgacgtggaatccaacccaggccctactagtatggactggatttggcgcatccttttccttgtcggcgctgctaccggcgcgcattccttcgaacaagttcagctggttcagagcggagccgaagtgaagaaacctggcagcagcgtgaaggtgtcctgcaaagcaagcggcggcacctttagcacctacgccatccactgggttcgacaggcaccaggacaaggactggaatggatgggcagaatcatccccatcgagggcagagcctactacgcccagaaattccagggcagagtgaccatcaccgccgacgagtctacaagcaccgcctacatggaactgagcagcctgagaagcgaggataccgctgtgtactattgcgccagaggccggtacagctacagatattggttcgactactggggccagggcaccctggttacagtctcttctacgcgtgaggacctgaagaacgtgttcccacctgaggtggccgtgttcgagcctagcgaggccgagatcagccacacccagaaagccaccctcgtgtgcctggctaccggcttctaccccgaccatgtggaactgtcttggtgggtcaacggcaaagaggtgcacagcggcgtgtgtaccgacccccagccactgaaagaacagcccgccctgaacgacagccggtactgcctgagcagcagactgagagtgtccgccaccttctggcagaacccccggaaccacttcagatgccaggtgcagttctacggcctgagcgagaacgacgagtggacccaggacagagccaagcccgtgacccagatcgtgtctgccgaagcctggggcagagccgattgcgacgtgaagctggtggaaaagagcttcgagacagacaccaacctgaacttccagaacctgagcgtgatcggcttcagaatcctgctgctgaaagtggccggctttaacctgctgatgaccctgcggctgtggtccagc

SEQ ID NO: 39894 - DNA, 3390 bp, synthetic construct
  source 1..3390: mol_type = other DNA
atggccttaccagtgaccgccttgctcctgccgctggccttgctgctccacgccgccaggccggaagtgcagctggttgaatctggcggaggactggttcaggctggcggatctctgagactgtcttgtgccgccagcggcagaacctttagcatgggctggtttagacaggcccctggcaaagagagagagttcgtcgccgccatcacatactctggcggcagcccttactacgccgactctgtgaagggcagattcaccatcagccgggacaacgccaagaacaccgtgtacctccagatgaacagcctgaagcctgaggacaccgccgtgtactactgcgccgccaatccaacatacggcagcgactggaacgccgagaattggggccagggaacccaagtgacagtgtctagcggtaccggcggaggcggatctggcggcggaggtagcggtggcggaggatctgaattcgagatcgtgctgacacagtctcccgccacactgtcactgtctccaggcgaaagagccacactgagctgtagagccagccagagcgtgtcctcttacctggcctggtatcagcagaagcctggacaggctccccggctgctgatctacgatgccagcaatagagccacaggcatccccgccagattttctggctctggcagcggcaccgatttcaccctgaccataagcagcctggaacctgaggacttcgccgtgtactactgccagcagagaagcaactggcccctgacctttggacagggcaccaaggtggaaatcaaactcgaggacctgaagaacgtgttcccacctgaggtggccgtgttcgagcctagcgaggccgagatcagccacacccagaaagccaccctcgtgtgcctggctaccggcttctaccccgaccatgtggaactgtcttggtgggtcaacggcaaagaggtgcacagcggcgtgtgtaccgacccccagccactgaaagaacagcccgccctgaacgacagccggtactgcctgagcagcagactgagagtgtccgccaccttctggcagaacccccggaaccacttcagatgccaggtgcagttctacggcctgagcgagaacgacgagtggacccaggacagagccaagcccgtgacccagatcgtgtctgccgaagcctggggcagagccgattgcgacgtgaagctggtggaaaagagcttcgagacagacaccaacctgaacttccagaacctgagcgtgatcggcttcagaatcctgctgctgaaagtggccggctttaacctgctgatgaccctgcggctgtggtccagcagggccaagcgatctggatctggagcaacaaacttctcactactcaaacaagcaggtgacgtggaggagaatcccgggcctactagtgccaccatggactggatttggcgcatccttttccttgtcggcgctgctaccggcgcccattccgggcccgaagtgcaactggttgaatccggtggcggcctggtgcaagcaggcggatctctcagacttagctgtgccgcctccggcagaaccttcacaatgggatggtttaggcaggctccagggaaagagagagagttcgtcgccgccatctctctgtctcccacactggcctactacgccgactctgtgaaaggccggttcaccatctccagagataatgccaagaacaccgtggtgctgcaaatgaactctctgaaacccgaggatacagccctgtactattgtgccgctgaccggaagtccgtgatgagcatcagacccgattactggggacagggcacacaagtcacagtgtcctctggatccggcggcggaggatctggcggaggcggatctgggggcggaggctctttcgaacaagttcagctggttcagagcggagccgaagtgaagaaacctggcagcagcgtgaaggtgtcctgcaaagcaagcggcggcacctttagcacctacgccatccactgggttcgacaggcaccaggacaaggactggaatggatgggcagaatcatccccatcgagggcagagcctactacgcccagaaattccagggcagagtgaccatcaccgccgacgagtctacaagcaccgcctacatggaactgagcagcctgagaagcgaggataccgctgtgtactattgcgccagaggccggtacagctacagatattggttcgactactggggccagggcaccctggttacagtctcttctacgcgtatccagaaccctgatcctgccgtgtaccagctgcgggatagcaagagcagcgacaagagcgtgtgtctgttcaccgacttcgacagccagaccaacgtgtcccagagcaaggactccgacgtgtacatcaccgataagtgcgtgctggacatgcggagcatggacttcaagagcaactccgccgtggcctggtccaacaagtccgatttcgcctgcgccaacgccttcaacaacagcattatccccgaggacacattcttcccaagccccgagagcagctgcggctttaccagcgagagctaccagcagggcgtgctgagcgccaccatcctgtacgagatcctgctgggcaaggccaccctgtacgccgtgctggtgtctgccctggtgctgatggctatggtcaagcggaaggacagccggggacgcgccaagagaagcggatctggcgtgaagcagaccctgaatttcgacctgctgaagctggctggcgacgtggaatccaacccaggcccttctagaggccatatgaccgagtacaagcccacggtgcgcctcgccacccgcgacgacgtccccagggccgtacgcaccctcgccgccgcgttcgccgactaccccgccacgcgccacaccgtcgatccggaccgccacatcgagcgggtcaccgagctgcaagaactcttcctcacgcgcgtcgggctcgacatcggcaaggtgtgggtcgcggacgacggcgccgcggtggcggtctggaccacgccggagagcgtcgaagcgggggcggtgttcgccgagatcggcccgcgcatggccgagttgagcggttcccggctggccgcgcagcaacagatggaaggcctcctggcgccgcaccggcccaaggagcccgcgtggttcctggccaccgtcggcgtctcgcccgaccaccagggcaagggtctgggcagcgccgtcgtgctccccggagtggaggcggccgagcgcgccggggtgcccgccttcctggagacctccgcgccccgcaacctccccttctacgagcggctcggcttcaccgtcaccgccgacgtcgaggtgcccgaaggaccgcgcacctggtgcatgacccgcaagcccggtgcctga

SEQ ID NO: 39895 - DNA, 2304 bp, synthetic construct
  source 1..2304: mol_type = other DNA
atggccttaccagtgaccgccttgctcctgccgctggccttgctgctccacgccgccaggccggaagtgcagctggttgaatctggcggaggactggttcagcctggcggatctctgagactgtcttgtgccgcctctggcttcgccagcgactactatatcatcggctggttcagacaggcccctggcaaagagagagagggcgtcagctgtatcagcagcagatacgccaacaccaactacgccgacagcgtgaagggcagattcaccatcagccgggacaacgccaagaacaccgtgtacctccagatgaacagcctgaagcctgaggacaccgccgtgtactactgtgccgccgacaccagaagatacacctgtcctgacattgccaccatgcaccggaacttcgattcttggggccagggcacactggtcaccgtttcttctggtaccggcggaggcggatctggcggcggaggtagcggtggcggaggatctgaattcgagatcgtgctgacacagtctcccgccacactgtcactgtctccaggcgaaagagccacactgagctgtagagccagccagagcgtgtcctcttacctggcctggtatcagcagaagcctggacaggctccccggctgctgatctacgatgccagcaatagagccacaggcatccccgccagattttctggctctggcagcggcaccgatttcaccctgaccataagcagcctggaacctgaggacttcgccgtgtactactgccagcagagaagcaactggcccctgacctttggacagggcaccaaggtggaaatcaaactcgaggacctgaagaacgtgttcccacctgaggtggccgtgttcgagcctagcgaggccgagatcagccacacccagaaagccaccctcgtgtgcctggctaccggcttctaccccgaccatgtggaactgtcttggtgggtcaacggcaaagaggtgcacagcggcgtgtgtaccgacccccagccactgaaagaacagcccgccctgaacgacagccggtactgcctgagcagcagactgagagtgtccgccaccttctggcagaacccccggaaccacttcagatgccaggtgcagttctacggcctgagcgagaacgacgagtggacccaggacagagccaagcccgtgacccagatcgtgtctgccgaagcctggggcagagccgattgcgacgtgaagctggtggaaaagagcttcgagacagacaccaacctgaacttccagaacctgagcgtgatcggcttcagaatcctgctgctgaaagtggccggctttaacctgctgatgaccctgcggctgtggtccagcagggccaagcgatctggatctggagcaacaaacttctcactactcaaacaagcaggtgacgtggaggagaatcccgggcctactagtatggactggatttggcgcatccttttccttgtcggcgctgctaccggcgcgcattccttcgaacaagttcagctggttcagagcggagccgaagtgaagaaacctggcagcagcgtgaaggtgtcctgcaaagcaagcggcggcacctttagcacctacgccatccactgggttcgacaggcaccaggacaaggactggaatggatgggcagaatcatccccatcgagggcagagcctactacgcccagaaattccagggcagagtgaccatcaccgccgacgagtctacaagcaccgcctacatggaactgagcagcctgagaagcgaggataccgctgtgtactattgcgccagaggccggtacagctacagatattggttcgactactggggccagggcaccctggttacagtctcttctacgcgtatccagaaccctgatcctgccgtgtaccagctgcgggatagcaagagcagcgacaagagcgtgtgtctgttcaccgacttcgacagccagaccaacgtgtcccagagcaaggactccgacgtgtacatcaccgataagtgcgtgctggacatgcggagcatggacttcaagagcaactccgccgtggcctggtccaacaagtccgatttcgcctgcgccaacgccttcaacaacagcattatccccgaggacacattcttcccaagccccgagagcagctgcggctttaccagcgagagctaccagcagggcgtgctgagcgccaccatcctgtacgagatcctgctgggcaaggccaccctgtacgccgtgctggtgtctgccctggtgctgatggctatggtcaagcggaaggacagccggggataa

SEQ ID NO: 39896 - DNA, 2304 bp, synthetic construct
  source 1..2304: mol_type = other DNA
atggccttaccagtgaccgccttgctcctgccgctggccttgctgctccacgccgccaggccggaagtgcagctggttgaatctggcggaggactggttcagcctggcggatctctgagactgagctgtgaagccagcggcttcgccagcgacgattacatcatcggctggttcagacaggcccctggcaaagagagagagggcgtcagctgcatcagctctaagtacgccaacaccgtgtacaccgacagcgtgaagggcagattcagactgagcagaggcaccgccaagaataccgtgtacctccagatgagcgccctgaagcctgaggataccgccgtgtactactgcgctatggacagccgcagagtgacatgccctgagatcagcaccatgcaccggaacttcgattcttggggccagggcacactggtcacagtgtcatctggtaccggcggaggcggatctggcggcggaggtagcggtggcggaggatctgaattcgagatcgtgctgacacagtctcccgccacactgtcactgtctccaggcgaaagagccacactgagctgtagagccagccagagcgtgtcctcttacctggcctggtatcagcagaagcctggacaggctccccggctgctgatctacgatgccagcaatagagccacaggcatccccgccagattttctggctctggcagcggcaccgatttcaccctgaccataagcagcctggaacctgaggacttcgccgtgtactactgccagcagagaagcaactggcccctgacctttggacagggcaccaaggtggaaatcaaactcgaggacctgaagaacgtgttcccacctgaggtggccgtgttcgagcctagcgaggccgagatcagccacacccagaaagccaccctcgtgtgcctggctaccggcttctaccccgaccatgtggaactgtcttggtgggtcaacggcaaagaggtgcacagcggcgtgtgtaccgacccccagccactgaaagaacagcccgccctgaacgacagccggtactgcctgagcagcagactgagagtgtccgccaccttctggcagaacccccggaaccacttcagatgccaggtgcagttctacggcctgagcgagaacgacgagtggacccaggacagagccaagcccgtgacccagatcgtgtctgccgaagcctggggcagagccgattgcgacgtgaagctggtggaaaagagcttcgagacagacaccaacctgaacttccagaacctgagcgtgatcggcttcagaatcctgctgctgaaagtggccggctttaacctgctgatgaccctgcggctgtggtccagcagggccaagcgatctggatctggagcaacaaacttctcactactcaaacaagcaggtgacgtggaggagaatcccgggcctactagtatggactggatttggcgcatccttttccttgtcggcgctgctaccggcgcgcattccttcgaacaagttcagctggttcagagcggagccgaagtgaagaaacctggcagcagcgtgaaggtgtcctgcaaagcaagcggcggcacctttagcacctacgccatccactgggttcgacaggcaccaggacaaggactggaatggatgggcagaatcatccccatcgagggcagagcctactacgcccagaaattccagggcagagtgaccatcaccgccgacgagtctacaagcaccgcctacatggaactgagcagcctgagaagcgaggataccgctgtgtactattgcgccagaggccggtacagctacagatattggttcgactactggggccagggcaccctggttacagtctcttctacgcgtatccagaaccctgatcctgccgtgtaccagctgcgggatagcaagagcagcgacaagagcgtgtgtctgttcaccgacttcgacagccagaccaacgtgtcccagagcaaggactccgacgtgtacatcaccgataagtgcgtgctggacatgcggagcatggacttcaagagcaactccgccgtggcctggtccaacaagtccgatttcgcctgcgccaacgccttcaacaacagcattatccccgaggacacattcttcccaagccccgagagcagctgcggctttaccagcgagagctaccagcagggcgtgctgagcgccaccatcctgtacgagatcctgctgggcaaggccaccctgtacgccgtgctggtgtctgccctggtgctgatggctatggtcaagcggaaggacagccggggataa

SEQ ID NO: 39897 - DNA, 2301 bp, synthetic construct
  source 1..2301: mol_type = other DNA
atggccttaccagtgaccgccttgctcctgccgctggccttgctgctccacgccgccaggccggaagtgcagctggttgaatctggcggaggactggttcagcctggcggatctctgagactgtcttgtgccgcctctggcttcgccagcgactactatatcatcggctggttcagacaggcccctggcaaagagagagagggcgtcagctgtatcagcagcagatacgccaacaccaactacgccgacagcgtgaagggcagattcaccatcagccgggacaacgccaagaacaccgtgtacctccagatgaacagcctgaagcctgaggacaccgccgtgtactactgtgccgccgacaccagaagatacacctgtcctgacattgccaccatgcaccggaacttcgattcttggggccagggcacactggtcaccgtttcttctggtaccggcggaggcggatctggcggcggaggtagcggtggcggaggatctgaattcgagatcgtgctgacacagtctcccgccacactgtcactgtctccaggcgaaagagccacactgagctgtagagccagccagagcgtgtcctcttacctggcctggtatcagcagaagcctggacaggctccccggctgctgatctacgatgccagcaatagagccacaggcatccccgccagattttctggctctggcagcggcaccgatttcaccctgaccataagcagcctggaacctgaggacttcgccgtgtactactgccagcagagaagcaactggcccctgacctttggacagggcaccaaggtggaaatcaaactcgagatccagaaccctgatcctgccgtgtaccagctgcgggatagcaagagcagcgacaagagcgtgtgtctgttcaccgacttcgacagccagaccaacgtgtcccagagcaaggactccgacgtgtacatcaccgataagtgcgtgctggacatgcggagcatggacttcaagagcaactccgccgtggcctggtccaacaagtccgatttcgcctgcgccaacgccttcaacaacagcattatccccgaggacacattcttcccaagccccgagagcagctgcggctttaccagcgagagctaccagcagggcgtgctgagcgccaccatcctgtacgagatcctgctgggcaaggccaccctgtacgccgtgctggtgtctgccctggtgctgatggctatggtcaagcggaaggacagccggggaagggccaagcgatctggatctggagcaacaaacttctcactactcaaacaagcaggtgacgtggaggagaatcccgggcctactagtatggactggatttggcgcatccttttccttgtcggcgctgctaccggcgcgcattccttcgaacaagttcagctggttcagagcggagccgaagtgaagaaacctggcagcagcgtgaaggtgtcctgcaaagcaagcggcggcacctttagcacctacgccatccactgggttcgacaggcaccaggacaaggactggaatggatgggcagaatcatccccatcgagggcagagcctactacgcccagaaattccagggcagagtgaccatcaccgccgacgagtctacaagcaccgcctacatggaactgagcagcctgagaagcgaggataccgctgtgtactattgcgccagaggccggtacagctacagatattggttcgactactggggccagggcaccctggttacagtctcttctacgcgtgacctgaagaacgtgttcccacctgaggtggccgtgttcgagcctagcgaggccgagatcagccacacccagaaagccaccctcgtgtgcctggctaccggcttctaccccgaccatgtggaactgtcttggtgggtcaacggcaaagaggtgcacagcggcgtgtgtaccgacccccagccactgaaagaacagcccgccctgaacgacagccggtactgcctgagcagcagactgagagtgtccgccaccttctggcagaacccccggaaccacttcagatgccaggtgcagttctacggcctgagcgagaacgacgagtggacccaggacagagccaagcccgtgacccagatcgtgtctgccgaagcctggggcagagccgattgcgacgtgaagctggtggaaaagagcttcgagacagacaccaacctgaacttccagaacctgagcgtgatcggcttcagaatcctgctgctgaaagtggccggctttaacctgctgatgaccctgcggctgtggtccagc

SEQ ID NO: 39898 - DNA, 2301 bp, synthetic construct
  source 1..2301: mol_type = other DNA
atggccttaccagtgaccgccttgctcctgccgctggccttgctgctccacgccgccaggccggaagtgcagctggttgaatctggcggaggactggttcagcctggcggatctctgagactgagctgtgaagccagcggcttcgccagcgacgattacatcatcggctggttcagacaggcccctggcaaagagagagagggcgtcagctgcatcagctctaagtacgccaacaccgtgtacaccgacagcgtgaagggcagattcagactgagcagaggcaccgccaagaataccgtgtacctccagatgagcgccctgaagcctgaggataccgccgtgtactactgcgctatggacagccgcagagtgacatgccctgagatcagcaccatgcaccggaacttcgattcttggggccagggcacactggtcacagtgtcatctggtaccggcggaggcggatctggcggcggaggtagcggtggcggaggatctgaattcgagatcgtgctgacacagtctcccgccacactgtcactgtctccaggcgaaagagccacactgagctgtagagccagccagagcgtgtcctcttacctggcctggtatcagcagaagcctggacaggctccccggctgctgatctacgatgccagcaatagagccacaggcatccccgccagattttctggctctggcagcggcaccgatttcaccctgaccataagcagcctggaacctgaggacttcgccgtgtactactgccagcagagaagcaactggcccctgacctttggacagggcaccaaggtggaaatcaaactcgagatccagaaccctgatcctgccgtgtaccagctgcgggatagcaagagcagcgacaagagcgtgtgtctgttcaccgacttcgacagccagaccaacgtgtcccagagcaaggactccgacgtgtacatcaccgataagtgcgtgctggacatgcggagcatggacttcaagagcaactccgccgtggcctggtccaacaagtccgatttcgcctgcgccaacgccttcaacaacagcattatccccgaggacacattcttcccaagccccgagagcagctgcggctttaccagcgagagctaccagcagggcgtgctgagcgccaccatcctgtacgagatcctgctgggcaaggccaccctgtacgccgtgctggtgtctgccctggtgctgatggctatggtcaagcggaaggacagccggggaagggccaagcgatctggatctggagcaacaaacttctcactactcaaacaagcaggtgacgtggaggagaatcccgggcctactagtatggactggatttggcgcatccttttccttgtcggcgctgctaccggcgcgcattccttcgaacaagttcagctggttcagagcggagccgaagtgaagaaacctggcagcagcgtgaaggtgtcctgcaaagcaagcggcggcacctttagcacctacgccatccactgggttcgacaggcaccaggacaaggactggaatggatgggcagaatcatccccatcgagggcagagcctactacgcccagaaattccagggcagagtgaccatcaccgccgacgagtctacaagcaccgcctacatggaactgagcagcctgagaagcgaggataccgctgtgtactattgcgccagaggccggtacagctacagatattggttcgactactggggccagggcaccctggttacagtctcttctacgcgtgacctgaagaacgtgttcccacctgaggtggccgtgttcgagcctagcgaggccgagatcagccacacccagaaagccaccctcgtgtgcctggctaccggcttctaccccgaccatgtggaactgtcttggtgggtcaacggcaaagaggtgcacagcggcgtgtgtaccgacccccagccactgaaagaacagcccgccctgaacgacagccggtactgcctgagcagcagactgagagtgtccgccaccttctggcagaacccccggaaccacttcagatgccaggtgcagttctacggcctgagcgagaacgacgagtggacccaggacagagccaagcccgtgacccagatcgtgtctgccgaagcctggggcagagccgattgcgacgtgaagctggtggaaaagagcttcgagacagacaccaacctgaacttccagaacctgagcgtgatcggcttcagaatcctgctgctgaaagtggccggctttaacctgctgatgaccctgcggctgtggtccagc

SEQ ID NO: 39899 - DNA, 2274 bp, synthetic construct
  source 1..2274: mol_type = other DNA
atggccttaccagtgaccgccttgctcctgccgctggccttgctgctccacgccgccaggccgcaagtcaaactggaagaaagcggtggcggcctggtgcaacctggcgaatctctgagactgagctgtagcgccagcggctccatcttcaaggtgttcagagtgttcgccatgagctggtacaggcaaggccctggcaagcagagagagctggtcgcctctatcagcagcggcgagacaaccacatacgccgaatctgtgaaaggccggttcaccatcagccgggataatgccaagaataccgcctatctccagatggactccctgaagcctgaagatacagctgtgtactactgcaacgccgaccataccttcaccggcgatttttggggccagggaacccaagtgaccgtgtctagtggtaccggcggaggcggatctggcggcggaggtagcggtggcggaggatctgaattcgagatcgtgctgacacagtctcccgccacactgtcactgtctccaggcgaaagagccacactgagctgtagagccagccagagcgtgtcctcttacctggcctggtatcagcagaagcctggacaggctccccggctgctgatctacgatgccagcaatagagccacaggcatccccgccagattttctggctctggcagcggcaccgatttcaccctgaccataagcagcctggaacctgaggacttcgccgtgtactactgccagcagagaagcaactggcccctgacctttggacagggcaccaaggtggaaatcaaactcgagatccagaaccctgatcctgccgtgtaccagctgcgggatagcaagagcagcgacaagagcgtgtgtctgttcaccgacttcgacagccagaccaacgtgtcccagagcaaggactccgacgtgtacatcaccgataagtgcgtgctggacatgcggagcatggacttcaagagcaactccgccgtggcctggtccaacaagtccgatttcgcctgcgccaacgccttcaacaacagcattatccccgaggacacattcttcccaagccccgagagcagctgcggctttaccagcgagagctaccagcagggcgtgctgagcgccaccatcctgtacgagatcctgctgggcaaggccaccctgtacgccgtgctggtgtctgccctggtgctgatggctatggtcaagcggaaggacagccggggaagggccaagcgatctggatctggagcaacaaacttctcactactcaaacaagcaggtgacgtggaggagaatcccgggcctactagtatggactggatttggcgcatccttttccttgtcggcgctgctaccggcgcgcattccttcgaacaagttcagctggttcagagcggagccgaagtgaagaaacctggcagcagcgtgaaggtgtcctgcaaagcaagcggcggcacctttagcacctacgccatccactgggttcgacaggcaccaggacaaggactggaatggatgggcagaatcatccccatcgagggcagagcctactacgcccagaaattccagggcagagtgaccatcaccgccgacgagtctacaagcaccgcctacatggaactgagcagcctgagaagcgaggataccgctgtgtactattgcgccagaggccggtacagctacagatattggttcgactactggggccagggcaccctggttacagtctcttctacgcgtgacctgaagaacgtgttcccacctgaggtggccgtgttcgagcctagcgaggccgagatcagccacacccagaaagccaccctcgtgtgcctggctaccggcttctaccccgaccatgtggaactgtcttggtgggtcaacggcaaagaggtgcacagcggcgtgtgtaccgacccccagccactgaaagaacagcccgccctgaacgacagccggtactgcctgagcagcagactgagagtgtccgccaccttctggcagaacccccggaaccacttcagatgccaggtgcagttctacggcctgagcgagaacgacgagtggacccaggacagagccaagcccgtgacccagatcgtgtctgccgaagcctggggcagagccgattgcgacgtgaagctggtggaaaagagcttcgagacagacaccaacctgaacttccagaacctgagcgtgatcggcttcagaatcctgctgctgaaagtggccggctttaacctgctgatgaccctgcggctgtggtccagc

SEQ ID NO: 39900 - DNA, 2280 bp, synthetic construct
  source 1..2280: mol_type = other DNA
atggccttaccagtgaccgccttgctcctgccgctggccttgctgctccacgccgccaggccggagatcgtgctgacacagtctcccgccacactgtcactgtctccaggcgaaagagccacactgagctgtagagccagccagagcgtgtcctcttacctggcctggtatcagcagaagcctggacaggctccccggctgctgatctacgatgccagcaatagagccacaggcatccccgccagattttctggctctggcagcggcaccgatttcaccctgaccataagcagcctggaacctgaggacttcgccgtgtactactgccagcagagaagcaactggcccctgacctttggacagggcaccaaggtggaaatcaaactcgaggacctgaagaacgtgttcccacctgaggtggccgtgttcgagcctagcgaggccgagatcagccacacccagaaagccaccctcgtgtgcctggctaccggcttctaccccgaccatgtggaactgtcttggtgggtcaacggcaaagaggtgcacagcggcgtgtgtaccgacccccagccactgaaagaacagcccgccctgaacgacagccggtactgcctgagcagcagactgagagtgtccgccaccttctggcagaacccccggaaccacttcagatgccaggtgcagttctacggcctgagcgagaacgacgagtggacccaggacagagccaagcccgtgacccagatcgtgtctgccgaagcctggggcagagccgattgcgacgtgaagctggtggaaaagagcttcgagacagacaccaacctgaacttccagaacctgagcgtgatcggcttcagaatcctgctgctgaaagtggccggctttaacctgctgatgaccctgcggctgtggtccagcagggccaagcgatctggatctggagcaacaaacttctcactactcaaacaagcaggtgacgtggaggagaatcccgggcctactagtgccaccatggactggatttggcgcatccttttccttgtcggcgctgctaccggcgcccattccgggcccgaagtgcagctggttgaatctggcggaggactggttcaggctggcggatctctgagactgtcttgtgccgccagcggcagaacctttagcatgggctggtttagacaggcccctggcaaagagagagagttcgtcgccgccatcacatactctggcggcagcccttactacgccgactctgtgaagggcagattcaccatcagccgggacaacgccaagaacaccgtgtacctccagatgaacagcctgaagcctgaggacaccgccgtgtactactgcgccgccaatccaacatacggcagcgactggaacgccgagaattggggccagggaacccaagtgacagtgtctagcggatccggcggcggaggatctggcggaggcggatctgggggcggaggctctttcgaacaagttcagctggttcagagcggagccgaagtgaagaaacctggcagcagcgtgaaggtgtcctgcaaagcaagcggcggcacctttagcacctacgccatccactgggttcgacaggcaccaggacaaggactggaatggatgggcagaatcatccccatcgagggcagagcctactacgcccagaaattccagggcagagtgaccatcaccgccgacgagtctacaagcaccgcctacatggaactgagcagcctgagaagcgaggataccgctgtgtactattgcgccagaggccggtacagctacagatattggttcgactactggggccagggcaccctggttacagtctcttctacgcgtatccagaaccctgatcctgccgtgtaccagctgcgggatagcaagagcagcgacaagagcgtgtgtctgttcaccgacttcgacagccagaccaacgtgtcccagagcaaggactccgacgtgtacatcaccgataagtgcgtgctggacatgcggagcatggacttcaagagcaactccgccgtggcctggtccaacaagtccgatttcgcctgcgccaacgccttcaacaacagcattatccccgaggacacattcttcccaagccccgagagcagctgcggctttaccagcgagagctaccagcagggcgtgctgagcgccaccatcctgtacgagatcctgctgggcaaggccaccctgtacgccgtgctggtgtctgccctggtgctgatggctatggtcaagcggaaggacagccggggataa

SEQ ID NO: 39901 - DNA, 2283 bp, synthetic construct
  source 1..2283: mol_type = other DNA
atggccttaccagtgaccgccttgctcctgccgctggccttgctgctccacgccgccaggccggagatcgtgctgacacagtctcccgccacactgtcactgtctccaggcgaaagagccacactgagctgtagagccagccagagcgtgtcctcttacctggcctggtatcagcagaagcctggacaggctccccggctgctgatctacgatgccagcaatagagccacaggcatccccgccagattttctggctctggcagcggcaccgatttcaccctgaccataagcagcctggaacctgaggacttcgccgtgtactactgccagcagagaagcaactggcccctgacctttggacagggcaccaaggtggaaatcaaactcgaggacctgaagaacgtgttcccacctgaggtggccgtgttcgagcctagcgaggccgagatcagccacacccagaaagccaccctcgtgtgcctggctaccggcttctaccccgaccatgtggaactgtcttggtgggtcaacggcaaagaggtgcacagcggcgtgtgtaccgacccccagccactgaaagaacagcccgccctgaacgacagccggtactgcctgagcagcagactgagagtgtccgccaccttctggcagaacccccggaaccacttcagatgccaggtgcagttctacggcctgagcgagaacgacgagtggacccaggacagagccaagcccgtgacccagatcgtgtctgccgaagcctggggcagagccgattgcgacgtgaagctggtggaaaagagcttcgagacagacaccaacctgaacttccagaacctgagcgtgatcggcttcagaatcctgctgctgaaagtggccggctttaacctgctgatgaccctgcggctgtggtccagcagggccaagcgatctggatctggagcaacaaacttctcactactcaaacaagcaggtgacgtggaggagaatcccgggcctactagtgccaccatggactggatttggcgcatccttttccttgtcggcgctgctaccggcgcccattccgggcccgaagtgcaactggtggaatctgggggcggactggtgcagccaggcggaagtctgaggctgtcttgtgccgcctccggcagcatcttcggcttcaacgacatggcctggtatcggcaggctcccggaaaacagcgcgagctggtggctctgattagcagagtgggcgtgaccagcagcgccgactctgtgaagggcagattcacaatctccagagtgaacgccaaggatacagtgtacctccagatgaactctctgaaacctgaggatacagcagtgtactattgctacatggaccagcggctggacggcagcacactggcctactggggacagggaactcaagtgacagtgtctagcggatccggcggcggaggatctggcggaggcggatctgggggcggaggctctttcgaacaagttcagctggttcagagcggagccgaagtgaagaaacctggcagcagcgtgaaggtgtcctgcaaagcaagcggcggcacctttagcacctacgccatccactgggttcgacaggcaccaggacaaggactggaatggatgggcagaatcatccccatcgagggcagagcctactacgcccagaaattccagggcagagtgaccatcaccgccgacgagtctacaagcaccgcctacatggaactgagcagcctgagaagcgaggataccgctgtgtactattgcgccagaggccggtacagctacagatattggttcgactactggggccagggcaccctggttacagtctcttctacgcgtatccagaaccctgatcctgccgtgtaccagctgcgggatagcaagagcagcgacaagagcgtgtgtctgttcaccgacttcgacagccagaccaacgtgtcccagagcaaggactccgacgtgtacatcaccgataagtgcgtgctggacatgcggagcatggacttcaagagcaactccgccgtggcctggtccaacaagtccgatttcgcctgcgccaacgccttcaacaacagcattatccccgaggacacattcttcccaagccccgagagcagctgcggctttaccagcgagagctaccagcagggcgtgctgagcgccaccatcctgtacgagatcctgctgggcaaggccaccctgtacgccgtgctggtgtctgccctggtgctgatggctatggtcaagcggaaggacagccggggataa

SEQ ID NO: 39902 - DNA, 2271 bp, synthetic construct
  source 1..2271: mol_type = other DNA
atggccttaccagtgaccgccttgctcctgccgctggccttgctgctccacgccgccaggccggagatcgtgctgacacagtctcccgccacactgtcactgtctccaggcgaaagagccacactgagctgtagagccagccagagcgtgtcctcttacctggcctggtatcagcagaagcctggacaggctccccggctgctgatctacgatgccagcaatagagccacaggcatccccgccagattttctggctctggcagcggcaccgatttcaccctgaccataagcagcctggaacctgaggacttcgccgtgtactactgccagcagagaagcaactggcccctgacctttggacagggcaccaaggtggaaatcaaactcgaggacctgaagaacgtgttcccacctgaggtggccgtgttcgagcctagcgaggccgagatcagccacacccagaaagccaccctcgtgtgcctggctaccggcttctaccccgaccatgtggaactgtcttggtgggtcaacggcaaagaggtgcacagcggcgtgtgtaccgacccccagccactgaaagaacagcccgccctgaacgacagccggtactgcctgagcagcagactgagagtgtccgccaccttctggcagaacccccggaaccacttcagatgccaggtgcagttctacggcctgagcgagaacgacgagtggacccaggacagagccaagcccgtgacccagatcgtgtctgccgaagcctggggcagagccgattgcgacgtgaagctggtggaaaagagcttcgagacagacaccaacctgaacttccagaacctgagcgtgatcggcttcagaatcctgctgctgaaagtggccggctttaacctgctgatgaccctgcggctgtggtccagcagggccaagcgatctggatctggagcaacaaacttctcactactcaaacaagcaggtgacgtggaggagaatcccgggcctactagtgccaccatggactggatttggcgcatccttttccttgtcggcgctgctaccggcgcccattccgggcccgaggtgcagctggttgaatctggcggaggactggttcaggctggcggatctctgagactgtcttgtgccgccagcggctctgtgttcagcggcaatgtgatgggctggtacagacaggcccctggcaaagaaagagagtgggttgccgccattgccagcggcggcagcatctactacagagactctgtgaagggcagattcaccatcagccgggacaacgccaagaacaccgtgtacctccagatgaacagcctgaagcctgaggacaccgccgtgtactactgcaactctcaccctcctacactgccctattggggcctgggaacccaagtgacagtgtcctctggatccggcggcggaggatctggcggaggcggatctgggggcggaggctctttcgaacaagttcagctggttcagagcggagccgaagtgaagaaacctggcagcagcgtgaaggtgtcctgcaaagcaagcggcggcacctttagcacctacgccatccactgggttcgacaggcaccaggacaaggactggaatggatgggcagaatcatccccatcgagggcagagcctactacgcccagaaattccagggcagagtgaccatcaccgccgacgagtctacaagcaccgcctacatggaactgagcagcctgagaagcgaggataccgctgtgtactattgcgccagaggccggtacagctacagatattggttcgactactggggccagggcaccctggttacagtctcttctacgcgtatccagaaccctgatcctgccgtgtaccagctgcgggatagcaagagcagcgacaagagcgtgtgtctgttcaccgacttcgacagccagaccaacgtgtcccagagcaaggactccgacgtgtacatcaccgataagtgcgtgctggacatgcggagcatggacttcaagagcaactccgccgtggcctggtccaacaagtccgatttcgcctgcgccaacgccttcaacaacagcattatccccgaggacacattcttcccaagccccgagagcagctgcggctttaccagcgagagctaccagcagggcgtgctgagcgccaccatcctgtacgagatcctgctgggcaaggccaccctgtacgccgtgctggtgtctgccctggtgctgatggctatggtcaagcggaaggacagccggggataa

SEQ ID NO: 39903 - DNA, 2265 bp, synthetic construct
  source 1..2265: mol_type = other DNA
atggccttaccagtgaccgccttgctcctgccgctggccttgctgctccacgccgccaggccggagatcgtgctgacacagtctcccgccacactgtcactgtctccaggcgaaagagccacactgagctgtagagccagccagagcgtgtcctcttacctggcctggtatcagcagaagcctggacaggctccccggctgctgatctacgatgccagcaatagagccacaggcatccccgccagattttctggctctggcagcggcaccgatttcaccctgaccataagcagcctggaacctgaggacttcgccgtgtactactgccagcagagaagcaactggcccctgacctttggacagggcaccaaggtggaaatcaaactcgaggacctgaagaacgtgttcccacctgaggtggccgtgttcgagcctagcgaggccgagatcagccacacccagaaagccaccctcgtgtgcctggctaccggcttctaccccgaccatgtggaactgtcttggtgggtcaacggcaaagaggtgcacagcggcgtgtgtaccgacccccagccactgaaagaacagcccgccctgaacgacagccggtactgcctgagcagcagactgagagtgtccgccaccttctggcagaacccccggaaccacttcagatgccaggtgcagttctacggcctgagcgagaacgacgagtggacccaggacagagccaagcccgtgacccagatcgtgtctgccgaagcctggggcagagccgattgcgacgtgaagctggtggaaaagagcttcgagacagacaccaacctgaacttccagaacctgagcgtgatcggcttcagaatcctgctgctgaaagtggccggctttaacctgctgatgaccctgcggctgtggtccagcagggccaagcgatctggatctggagcaacaaacttctcactactcaaacaagcaggtgacgtggaggagaatcccgggcctactagtgccaccatggactggatttggcgcatccttttccttgtcggcgctgctaccggcgcccattccgggcccgaagttcagctgctggaatctggcggaggactcgttcaacctggcggctctctgagactgagctgtgccgcttctggcttcagcttctctagctacgccctgagctgggttcgacaagctcccggaaagggccttgaatgggtgtccagcatcggcgagaatgacggcaccacagactatgccgatgccgtgaaaggccggtttaccatcagcagagacaattccaagaacacgctctatctgcaaatgaactccctgcgcgtggaagatacagccgtgtattattgcgtgaaggacggcatccactggggacagggaaccctggttacagtgtctagcggatccggcggcggaggatctggcggaggcggatctgggggcggaggctctttcgaacaagttcagctggttcagagcggagccgaagtgaagaaacctggcagcagcgtgaaggtgtcctgcaaagcaagcggcggcacctttagcacctacgccatccactgggttcgacaggcaccaggacaaggactggaatggatgggcagaatcatccccatcgagggcagagcctactacgcccagaaattccagggcagagtgaccatcaccgccgacgagtctacaagcaccgcctacatggaactgagcagcctgagaagcgaggataccgctgtgtactattgcgccagaggccggtacagctacagatattggttcgactactggggccagggcaccctggttacagtctcttctacgcgtatccagaaccctgatcctgccgtgtaccagctgcgggatagcaagagcagcgacaagagcgtgtgtctgttcaccgacttcgacagccagaccaacgtgtcccagagcaaggactccgacgtgtacatcaccgataagtgcgtgctggacatgcggagcatggacttcaagagcaactccgccgtggcctggtccaacaagtccgatttcgcctgcgccaacgccttcaacaacagcattatccccgaggacacattcttcccaagccccgagagcagctgcggctttaccagcgagagctaccagcagggcgtgctgagcgccaccatcctgtacgagatcctgctgggcaaggccaccctgtacgccgtgctggtgtctgccctggtgctgatggctatggtcaagcggaaggacagccggggataa

SEQ ID NO: 39904 - DNA, 3372 bp, synthetic construct
  source 1..3372: mol_type = other DNA
atgggacccagactgctgttttgggctctgctgtgtctgctcggcacaggacctgttgaagctggcgtgacacagagccccacacacctgattaagaccagaggccagcaggccacactgagatgcagccctatcagcggccacaccagcgtgtactggtatcagcaggctctcggactgggcctccagttcctgctttggtacgacgagggcgaagagagaaaccggggcaacttccctcctcggttttccggcagacagttccccaactacagcagcgagctgaacgtgaacgccctggaactggaagatagcgccctgtacctgtgtgcctcttctcttggtggacctcgcggactggctggactgagaggggatgagcagtttttcggccctggcaccagactgaccgtgctggaaggtaccggcggaggcggatctggcggcggagaattcgagatcgtgctgacacagtctcccgccacactgtcactgtctccaggcgaaagagccacactgagctgtagagccagccagagcgtgtcctcttacctggcctggtatcagcagaagcctggacaggctccccggctgctgatctacgatgccagcaatagagccacaggcatccccgccagattttctggctctggcagcggcaccgatttcaccctgaccataagcagcctggaacctgaggacttcgccgtgtactactgccagcagagaagcaactggcccctgacctttggacagggcaccaaggtggaaatcaaactcgaggacctgaagaacgtgttcccacctgaggtggccgtgttcgagcctagcgaggccgagatcagccacacccagaaagccaccctcgtgtgcctggctaccggcttctaccccgaccatgtggaactgtcttggtgggtcaacggcaaagaggtgcacagcggcgtgtgtaccgacccccagccactgaaagaacagcccgccctgaacgacagccggtactgcctgagcagcagactgagagtgtccgccaccttctggcagaacccccggaaccacttcagatgccaggtgcagttctacggcctgagcgagaacgacgagtggacccaggacagagccaagcccgtgacccagatcgtgtctgccgaagcctggggcagagccgattgcgacgtgaagctggtggaaaagagcttcgagacagacaccaacctgaacttccagaacctgagcgtgatcggcttcagaatcctgctgctgaaagtggccggctttaacctgctgatgaccctgcggctgtggtccagcagggccaagcgatctggatctggagcaacaaacttctcactactcaaacaagcaggtgacgtggaggagaatcccgggcctactagtgccaccatggactggatttggcgcatccttttccttgtcggcgctgctaccggcgcccattccgggcccgaagtgcagctggttgaatctggcggaggactggttcaggctggcggatctctgagactgtcttgtgccgccagcggcagaacctttagcatgggctggtttagacaggcccctggcaaagagagagagttcgtcgccgccatcacatactctggcggcagcccttactacgccgactctgtgaagggcagattcaccatcagccgggacaacgccaagaacaccgtgtacctccagatgaacagcctgaagcctgaggacaccgccgtgtactactgcgccgccaatccaacatacggcagcgactggaacgccgagaattggggccagggaacccaagtgacagtgtctagcggatccggcggcggaggatctggcggaggcggatctgggggcggaggctctttcgaacaagttcagctggttcagagcggagccgaagtgaagaaacctggcagcagcgtgaaggtgtcctgcaaagcaagcggcggcacctttagcacctacgccatccactgggttcgacaggcaccaggacaaggactggaatggatgggcagaatcatccccatcgagggcagagcctactacgcccagaaattccagggcagagtgaccatcaccgccgacgagtctacaagcaccgcctacatggaactgagcagcctgagaagcgaggataccgctgtgtactattgcgccagaggccggtacagctacagatattggttcgactactggggccagggcaccctggttacagtctcttctacgcgtatccagaaccctgatcctgccgtgtaccagctgcgggatagcaagagcagcgacaagagcgtgtgtctgttcaccgacttcgacagccagaccaacgtgtcccagagcaaggactccgacgtgtacatcaccgataagtgcgtgctggacatgcggagcatggacttcaagagcaactccgccgtggcctggtccaacaagtccgatttcgcctgcgccaacgccttcaacaacagcattatccccgaggacacattcttcccaagccccgagagcagctgcggctttaccagcgagagctaccagcagggcgtgctgagcgccaccatcctgtacgagatcctgctgggcaaggccaccctgtacgccgtgctggtgtctgccctggtgctgatggctatggtcaagcggaaggacagccggggacgcgccaagagaagcggatctggcgtgaagcagaccctgaatttcgacctgctgaagctggctggcgacgtggaatccaacccaggcccttctagaggccatatgaccgagtacaagcccacggtgcgcctcgccacccgcgacgacgtccccagggccgtacgcaccctcgccgccgcgttcgccgactaccccgccacgcgccacaccgtcgatccggaccgccacatcgagcgggtcaccgagctgcaagaactcttcctcacgcgcgtcgggctcgacatcggcaaggtgtgggtcgcggacgacggcgccgcggtggcggtctggaccacgccggagagcgtcgaagcgggggcggtgttcgccgagatcggcccgcgcatggccgagttgagcggttcccggctggccgcgcagcaacagatggaaggcctcctggcgccgcaccggcccaaggagcccgcgtggttcctggccaccgtcggcgtctcgcccgaccaccagggcaagggtctgggcagcgccgtcgtgctccccggagtggaggcggccgagcgcgccggggtgcccgccttcctggagacctccgcgccccgcaacctccccttctacgagcggctcggcttcaccgtcaccgccgacgtcgaggtgcccgaaggaccgcgcacctggtgcatgacccgcaagcccggtgcctga

SEQ ID NO: 39905 - DNA, 3369 bp, synthetic construct
  source 1..3369: mol_type = other DNA
atgggacccagactgctgttttgggctctgctgtgtctgctcggcacaggacctgttgaagctggcgtgacacagagccccacacacctgattaagaccagaggccagcaggccacactgagatgcagccctatcagcggccacaccagcgtgtactggtatcagcaggctctcggactgggcctccagttcctgctttggtacgacgagggcgaagagagaaaccggggcaacttccctcctcggttttccggcagacagttccccaactacagcagcgagctgaacgtgaacgccctggaactggaagatagcgccctgtacctgtgtgccagctctctcggcggagatgaactgggagccgatggcaacgagcagttctttggccctggcaccagactgaccgtgctggaaggtaccggcggaggcggatctggcggcggaagcgaattcgagatcgtgctgacacagtctcccgccacactgtcactgtctccaggcgaaagagccacactgagctgtagagccagccagagcgtgtcctcttacctggcctggtatcagcagaagcctggacaggctccccggctgctgatctacgatgccagcaatagagccacaggcatccccgccagattttctggctctggcagcggcaccgatttcaccctgaccataagcagcctggaacctgaggacttcgccgtgtactactgccagcagagaagcaactggcccctgacctttggacagggcaccaaggtggaaatcaaactcgaggacctgaagaacgtgttcccacctgaggtggccgtgttcgagcctagcgaggccgagatcagccacacccagaaagccaccctcgtgtgcctggctaccggcttctaccccgaccatgtggaactgtcttggtgggtcaacggcaaagaggtgcacagcggcgtgtgtaccgacccccagccactgaaagaacagcccgccctgaacgacagccggtactgcctgagcagcagactgagagtgtccgccaccttctggcagaacccccggaaccacttcagatgccaggtgcagttctacggcctgagcgagaacgacgagtggacccaggacagagccaagcccgtgacccagatcgtgtctgccgaagcctggggcagagccgattgcgacgtgaagctggtggaaaagagcttcgagacagacaccaacctgaacttccagaacctgagcgtgatcggcttcagaatcctgctgctgaaagtggccggctttaacctgctgatgaccctgcggctgtggtccagcagggccaagcgatctggatctggagcaacaaacttctcactactcaaacaagcaggtgacgtggaggagaatcccgggcctactagtgccaccatggactggatttggcgcatccttttccttgtcggcgctgctaccggcgcccattccgggcccgaagtgcagctggttgaatctggcggaggactggttcaggctggcggatctctgagactgtcttgtgccgccagcggcagaacctttagcatgggctggtttagacaggcccctggcaaagagagagagttcgtcgccgccatcacatactctggcggcagcccttactacgccgactctgtgaagggcagattcaccatcagccgggacaacgccaagaacaccgtgtacctccagatgaacagcctgaagcctgaggacaccgccgtgtactactgcgccgccaatccaacatacggcagcgactggaacgccgagaattggggccagggaacccaagtgacagtgtctagcggatccggcggcggaggatctggcggaggcggatctgggggcggaggctctttcgaacaagttcagctggttcagagcggagccgaagtgaagaaacctggcagcagcgtgaaggtgtcctgcaaagcaagcggcggcacctttagcacctacgccatccactgggttcgacaggcaccaggacaaggactggaatggatgggcagaatcatccccatcgagggcagagcctactacgcccagaaattccagggcagagtgaccatcaccgccgacgagtctacaagcaccgcctacatggaactgagcagcctgagaagcgaggataccgctgtgtactattgcgccagaggccggtacagctacagatattggttcgactactggggccagggcaccctggttacagtctcttctacgcgtatccagaaccctgatcctgccgtgtaccagctgcgggatagcaagagcagcgacaagagcgtgtgtctgttcaccgacttcgacagccagaccaacgtgtcccagagcaaggactccgacgtgtacatcaccgataagtgcgtgctggacatgcggagcatggacttcaagagcaactccgccgtggcctggtccaacaagtccgatttcgcctgcgccaacgccttcaacaacagcattatccccgaggacacattcttcccaagccccgagagcagctgcggctttaccagcgagagctaccagcagggcgtgctgagcgccaccatcctgtacgagatcctgctgggcaaggccaccctgtacgccgtgctggtgtctgccctggtgctgatggctatggtcaagcggaaggacagccggggacgcgccaagagaagcggatctggcgtgaagcagaccctgaatttcgacctgctgaagctggctggcgacgtggaatccaacccaggcccttctagaggccatatgaccgagtacaagcccacggtgcgcctcgccacccgcgacgacgtccccagggccgtacgcaccctcgccgccgcgttcgccgactaccccgccacgcgccacaccgtcgatccggaccgccacatcgagcgggtcaccgagctgcaagaactcttcctcacgcgcgtcgggctcgacatcggcaaggtgtgggtcgcggacgacggcgccgcggtggcggtctggaccacgccggagagcgtcgaagcgggggcggtgttcgccgagatcggcccgcgcatggccgagttgagcggttcccggctggccgcgcagcaacagatggaaggcctcctggcgccgcaccggcccaaggagcccgcgtggttcctggccaccgtcggcgtctcgcccgaccaccagggcaagggtctgggcagcgccgtcgtgctccccggagtggaggcggccgagcgcgccggggtgcccgccttcctggagacctccgcgccccgcaacctccccttctacgagcggctcggcttcaccgtcaccgccgacgtcgaggtgcccgaaggaccgcgcacctggtgcatgacccgcaagcccggtgcctga

SEQ ID NO: 39906 - DNA, 2844 bp, synthetic construct
  source 1..2844: mol_type = other DNA
atggccttaccagtgaccgccttgctcctgccgctggccttgctgctccacgccgccaggccggagatcgtgctgacacagtctcccgccacactgtcactgtctccaggcgaaagagccacactgagctgtagagccagccagagcgtgtcctcttacctggcctggtatcagcagaagcctggacaggctccccggctgctgatctacgatgccagcaatagagccacaggcatccccgccagattttctggctctggcagcggcaccgatttcaccctgaccataagcagcctggaacctgaggacttcgccgtgtactactgccagcagagaagcaactggcccctgacctttggacagggcaccaaggtggaaatcaaactcgaggacctgaagaacgtgttcccacctgaggtggccgtgttcgagcctagcgaggccgagatcagccacacccagaaagccaccctcgtgtgcctggctaccggcttctaccccgaccatgtggaactgtcttggtgggtcaacggcaaagaggtgcacagcggcgtgtgtaccgacccccagccactgaaagaacagcccgccctgaacgacagccggtactgcctgagcagcagactgagagtgtccgccaccttctggcagaacccccggaaccacttcagatgccaggtgcagttctacggcctgagcgagaacgacgagtggacccaggacagagccaagcccgtgacccagatcgtgtctgccgaagcctggggcagagccgattgcgacgtgaagctggtggaaaagagcttcgagacagacaccaacctgaacttccagaacctgagcgtgatcggcttcagaatcctgctgctgaaagtggccggctttaacctgctgatgaccctgcggctgtggtccagcagggccaagcgatctggatctggagcaacaaacttctcactactcaaacaagcaggtgacgtggaggagaatcccgggcctactagtgccaccatggactggatttggcgcatccttttccttgtcggcgctgctaccggcgcccattccgggcccatgggaagctggcttgagttctaccacagactcaacgccattgacagcaggctgtgggcacttggcggaagcgaagctgaactcgccgcttttgaaaaagaaattgccgctttcgagtccgagcttcaggcttacaaaggcaaagggaatcctgaggtcgagagcctgagagatcacgctgcccacattagagagtggttgcaggcataccggcacaatggatccggcggcggaggatctggcggaggcggatctgggggcggaggctctttcgaacaagttcagctggttcagagcggagccgaagtgaagaaacctggcagcagcgtgaaggtgtcctgcaaagcaagcggcggcacctttagcacctacgccatccactgggttcgacaggcaccaggacaaggactggaatggatgggcagaatcatccccatcgagggcagagcctactacgcccagaaattccagggcagagtgaccatcaccgccgacgagtctacaagcaccgcctacatggaactgagcagcctgagaagcgaggataccgctgtgtactattgcgccagaggccggtacagctacagatattggttcgactactggggccagggcaccctggttacagtctcttctacgcgtatccagaaccctgatcctgccgtgtaccagctgcgggatagcaagagcagcgacaagagcgtgtgtctgttcaccgacttcgacagccagaccaacgtgtcccagagcaaggactccgacgtgtacatcaccgataagtgcgtgctggacatgcggagcatggacttcaagagcaactccgccgtggcctggtccaacaagtccgatttcgcctgcgccaacgccttcaacaacagcattatccccgaggacacattcttcccaagccccgagagcagctgcggctttaccagcgagagctaccagcagggcgtgctgagcgccaccatcctgtacgagatcctgctgggcaaggccaccctgtacgccgtgctggtgtctgccctggtgctgatggctatggtcaagcggaaggacagccggggacgcgccaagagaagcggatctggcgtgaagcagaccctgaatttcgacctgctgaagctggctggcgacgtggaatccaacccaggcccttctagaggccatatgaccgagtacaagcccacggtgcgcctcgccacccgcgacgacgtccccagggccgtacgcaccctcgccgccgcgttcgccgactaccccgccacgcgccacaccgtcgatccggaccgccacatcgagcgggtcaccgagctgcaagaactcttcctcacgcgcgtcgggctcgacatcggcaaggtgtgggtcgcggacgacggcgccgcggtggcggtctggaccacgccggagagcgtcgaagcgggggcggtgttcgccgagatcggcccgcgcatggccgagttgagcggttcccggctggccgcgcagcaacagatggaaggcctcctggcgccgcaccggcccaaggagcccgcgtggttcctggccaccgtcggcgtctcgcccgaccaccagggcaagggtctgggcagcgccgtcgtgctccccggagtggaggcggccgagcgcgccggggtgcccgccttcctggagacctccgcgccccgcaacctccccttctacgagcggctcggcttcaccgtcaccgccgacgtcgaggtgcccgaaggaccgcgcacctggtgcatgacccgcaagcccggtgcctga

SEQ ID NO: 39907 - DNA, 2844 bp, synthetic construct
  source 1..2844: mol_type = other DNA
atggccttaccagtgaccgccttgctcctgccgctggccttgctgctccacgccgccaggccggcatgcatgggcagttggttcgagttctacgaccggctgaatgccatcgacgccagactgtgggctctcggaggatctgaagctgagctggccgccttcgagaaagagatcgccgcctttgagagcgagctgcaagcctacaaaggcaagggcaaccccgaggtggaaaacctgagagtgcacgccgctgccatcagagaatggctccaggcttacagacacaacggtaccggcggaggcggatctggcggcggaggtagcggtggcggaggatctgaattcgagatcgtgctgacacagtctcccgccacactgtcactgtctccaggcgaaagagccacactgagctgtagagccagccagagcgtgtcctcttacctggcctggtatcagcagaagcctggacaggctccccggctgctgatctacgatgccagcaatagagccacaggcatccccgccagattttctggctctggcagcggcaccgatttcaccctgaccataagcagcctggaacctgaggacttcgccgtgtactactgccagcagagaagcaactggcccctgacctttggacagggcaccaaggtggaaatcaaactcgaggacctgaagaacgtgttcccacctgaggtggccgtgttcgagcctagcgaggccgagatcagccacacccagaaagccaccctcgtgtgcctggctaccggcttctaccccgaccatgtggaactgtcttggtgggtcaacggcaaagaggtgcacagcggcgtgtgtaccgacccccagccactgaaagaacagcccgccctgaacgacagccggtactgcctgagcagcagactgagagtgtccgccaccttctggcagaacccccggaaccacttcagatgccaggtgcagttctacggcctgagcgagaacgacgagtggacccaggacagagccaagcccgtgacccagatcgtgtctgccgaagcctggggcagagccgattgcgacgtgaagctggtggaaaagagcttcgagacagacaccaacctgaacttccagaacctgagcgtgatcggcttcagaatcctgctgctgaaagtggccggctttaacctgctgatgaccctgcggctgtggtccagcagggccaagcgatctggatctggagcaacaaacttctcactactcaaacaagcaggtgacgtggaggagaatcccgggcctactagtatggactggatttggcgcatccttttccttgtcggcgctgctaccggcgcgcattccttcgaacaagttcagctggttcagagcggagccgaagtgaagaaacctggcagcagcgtgaaggtgtcctgcaaagcaagcggcggcacctttagcacctacgccatccactgggttcgacaggcaccaggacaaggactggaatggatgggcagaatcatccccatcgagggcagagcctactacgcccagaaattccagggcagagtgaccatcaccgccgacgagtctacaagcaccgcctacatggaactgagcagcctgagaagcgaggataccgctgtgtactattgcgccagaggccggtacagctacagatattggttcgactactggggccagggcaccctggttacagtctcttctacgcgtatccagaaccctgatcctgccgtgtaccagctgcgggatagcaagagcagcgacaagagcgtgtgtctgttcaccgacttcgacagccagaccaacgtgtcccagagcaaggactccgacgtgtacatcaccgataagtgcgtgctggacatgcggagcatggacttcaagagcaactccgccgtggcctggtccaacaagtccgatttcgcctgcgccaacgccttcaacaacagcattatccccgaggacacattcttcccaagccccgagagcagctgcggctttaccagcgagagctaccagcagggcgtgctgagcgccaccatcctgtacgagatcctgctgggcaaggccaccctgtacgccgtgctggtgtctgccctggtgctgatggctatggtcaagcggaaggacagccggggacgcgccaagagaagcggatctggcgtgaagcagaccctgaatttcgacctgctgaagctggctggcgacgtggaatccaacccaggcccttctagaggccatatgaccgagtacaagcccacggtgcgcctcgccacccgcgacgacgtccccagggccgtacgcaccctcgccgccgcgttcgccgactaccccgccacgcgccacaccgtcgatccggaccgccacatcgagcgggtcaccgagctgcaagaactcttcctcacgcgcgtcgggctcgacatcggcaaggtgtgggtcgcggacgacggcgccgcggtggcggtctggaccacgccggagagcgtcgaagcgggggcggtgttcgccgagatcggcccgcgcatggccgagttgagcggttcccggctggccgcgcagcaacagatggaaggcctcctggcgccgcaccggcccaaggagcccgcgtggttcctggccaccgtcggcgtctcgcccgaccaccagggcaagggtctgggcagcgccgtcgtgctccccggagtggaggcggccgagcgcgccggggtgcccgccttcctggagacctccgcgccccgcaacctccccttctacgagcggctcggcttcaccgtcaccgccgacgtcgaggtgcccgaaggaccgcgcacctggtgcatgacccgcaagcccggtgcctga

SEQ ID NO: 39908 - DNA, 3195 bp, synthetic construct
  source 1..3195: mol_type = other DNA
atggccttaccagtgaccgccttgctcctgccgctggccttgctgctccacgccgccaggccggcatgcatggaccccgacctggaaatcagagccgccttcctgcggcagagaaacacagccctgagaacagaggtggccgagctggaacaagaggtgcagcggctggaaaacgaggtgtcccagtacgagacaagatacggccctctcggaggcggaaaaggtaccggcggaggcggatctggcggcggaggtagcggtggcggaggatctgaattcgagatcgtgctgacacagtctcccgccacactgtcactgtctccaggcgaaagagccacactgagctgtagagccagccagagcgtgtcctcttacctggcctggtatcagcagaagcctggacaggctccccggctgctgatctacgatgccagcaatagagccacaggcatccccgccagattttctggctctggcagcggcaccgatttcaccctgaccataagcagcctggaacctgaggacttcgccgtgtactactgccagcagagaagcaactggcccctgacctttggacagggcaccaaggtggaaatcaaactcgaggacctgaagaacgtgttcccacctgaggtggccgtgttcgagcctagcgaggccgagatcagccacacccagaaagccaccctcgtgtgcctggctaccggcttctaccccgaccatgtggaactgtcttggtgggtcaacggcaaagaggtgcacagcggcgtgtgtaccgacccccagccactgaaagaacagcccgccctgaacgacagccggtactgcctgagcagcagactgagagtgtccgccaccttctggcagaacccccggaaccacttcagatgccaggtgcagttctacggcctgagcgagaacgacgagtggacccaggacagagccaagcccgtgacccagatcgtgtctgccgaagcctggggcagagccgattgcgacgtgaagctggtggaaaagagcttcgagacagacaccaacctgaacttccagaacctgagcgtgatcggcttcagaatcctgctgctgaaagtggccggctttaacctgctgatgaccctgcggctgtggtccagcagggccaagcgatctggatctggagcaacaaacttctcactactcaaacaagcaggtgacgtggaggagaatcccgggcctactagtgccaccatggactggatttggcgcatccttttccttgtcggcgctgctaccggcgcccattccgggcccgaagtgcagctggttgaatctggcggaggactggttcaggctggcggatctctgagactgtcttgtgccgccagcggcagaacctttagcatgggctggtttagacaggcccctggcaaagagagagagttcgtcgccgccatcacatactctggcggcagcccttactacgccgactctgtgaagggcagattcaccatcagccgggacaacgccaagaacaccgtgtacctccagatgaacagcctgaagcctgaggacaccgccgtgtactactgcgccgccaatccaacatacggcagcgactggaacgccgagaattggggccagggaacccaagtgacagtgtctagcggatccggcggcggaggatctggcggaggcggatctgggggcggaggctctttcgaacaagttcagctggttcagagcggagccgaagtgaagaaacctggcagcagcgtgaaggtgtcctgcaaagcaagcggcggcacctttagcacctacgccatccactgggttcgacaggcaccaggacaaggactggaatggatgggcagaatcatccccatcgagggcagagcctactacgcccagaaattccagggcagagtgaccatcaccgccgacgagtctacaagcaccgcctacatggaactgagcagcctgagaagcgaggataccgctgtgtactattgcgccagaggccggtacagctacagatattggttcgactactggggccagggcaccctggttacagtctcttctacgcgtatccagaaccctgatcctgccgtgtaccagctgcgggatagcaagagcagcgacaagagcgtgtgtctgttcaccgacttcgacagccagaccaacgtgtcccagagcaaggactccgacgtgtacatcaccgataagtgcgtgctggacatgcggagcatggacttcaagagcaactccgccgtggcctggtccaacaagtccgatttcgcctgcgccaacgccttcaacaacagcattatccccgaggacacattcttcccaagccccgagagcagctgcggctttaccagcgagagctaccagcagggcgtgctgagcgccaccatcctgtacgagatcctgctgggcaaggccaccctgtacgccgtgctggtgtctgccctggtgctgatggctatggtcaagcggaaggacagccggggacgcgccaagagaagcggatctggcgtgaagcagaccctgaatttcgacctgctgaagctggctggcgacgtggaatccaacccaggcccttctagaggccatatgaccgagtacaagcccacggtgcgcctcgccacccgcgacgacgtccccagggccgtacgcaccctcgccgccgcgttcgccgactaccccgccacgcgccacaccgtcgatccggaccgccacatcgagcgggtcaccgagctgcaagaactcttcctcacgcgcgtcgggctcgacatcggcaaggtgtgggtcgcggacgacggcgccgcggtggcggtctggaccacgccggagagcgtcgaagcgggggcggtgttcgccgagatcggcccgcgcatggccgagttgagcggttcccggctggccgcgcagcaacagatggaaggcctcctggcgccgcaccggcccaaggagcccgcgtggttcctggccaccgtcggcgtctcgcccgaccaccagggcaagggtctgggcagcgccgtcgtgctccccggagtggaggcggccgagcgcgccggggtgcccgccttcctggagacctccgcgccccgcaacctccccttctacgagcggctcggcttcaccgtcaccgccgacgtcgaggtgcccgaaggaccgcgcacctggtgcatgacccgcaagcccggtgcctga

SEQ ID NO: 39909 - DNA, 2844 bp, synthetic construct
  source 1..2844: mol_type = other DNA
atggccttaccagtgaccgccttgctcctgccgctggccttgctgctccacgccgccaggccggagatcgtgctgacacagtctcccgccacactgtcactgtctccaggcgaaagagccacactgagctgtagagccagccagagcgtgtcctcttacctggcctggtatcagcagaagcctggacaggctccccggctgctgatctacgatgccagcaatagagccacaggcatccccgccagattttctggctctggcagcggcaccgatttcaccctgaccataagcagcctggaacctgaggacttcgccgtgtactactgccagcagagaagcaactggcccctgacctttggacagggcaccaaggtggaaatcaaactcgaggacctgaagaacgtgttcccacctgaggtggccgtgttcgagcctagcgaggccgagatcagccacacccagaaagccaccctcgtgtgcctggctaccggcttctaccccgaccatgtggaactgtcttggtgggtcaacggcaaagaggtgcacagcggcgtgtgtaccgacccccagccactgaaagaacagcccgccctgaacgacagccggtactgcctgagcagcagactgagagtgtccgccaccttctggcagaacccccggaaccacttcagatgccaggtgcagttctacggcctgagcgagaacgacgagtggacccaggacagagccaagcccgtgacccagatcgtgtctgccgaagcctggggcagagccgattgcgacgtgaagctggtggaaaagagcttcgagacagacaccaacctgaacttccagaacctgagcgtgatcggcttcagaatcctgctgctgaaagtggccggctttaacctgctgatgaccctgcggctgtggtccagcagggccaagcgatctggatctggagcaacaaacttctcactactcaaacaagcaggtgacgtggaggagaatcccgggcctactagtgccaccatggactggatttggcgcatccttttccttgtcggcgctgctaccggcgcccattccgggcccatgggatcttggagcgagttttacgatcggctgcacgccattcaccaccggctgtatgctctcggaggaagcgaagctgagctggccgcttttgaaaaagaaattgccgctttcgagtccgagcttcaggcttacaaaggcaaagggaatcctgaggtcgaggccctgagagataccgccgccttcatcagaacccggttgcaggcataccggcacaacggatccggcggcggaggatctggcggaggcggatctgggggcggaggctctttcgaacaagttcagctggttcagagcggagccgaagtgaagaaacctggcagcagcgtgaaggtgtcctgcaaagcaagcggcggcacctttagcacctacgccatccactgggttcgacaggcaccaggacaaggactggaatggatgggcagaatcatccccatcgagggcagagcctactacgcccagaaattccagggcagagtgaccatcaccgccgacgagtctacaagcaccgcctacatggaactgagcagcctgagaagcgaggataccgctgtgtactattgcgccagaggccggtacagctacagatattggttcgactactggggccagggcaccctggttacagtctcttctacgcgtatccagaaccctgatcctgccgtgtaccagctgcgggatagcaagagcagcgacaagagcgtgtgtctgttcaccgacttcgacagccagaccaacgtgtcccagagcaaggactccgacgtgtacatcaccgataagtgcgtgctggacatgcggagcatggacttcaagagcaactccgccgtggcctggtccaacaagtccgatttcgcctgcgccaacgccttcaacaacagcattatccccgaggacacattcttcccaagccccgagagcagctgcggctttaccagcgagagctaccagcagggcgtgctgagcgccaccatcctgtacgagatcctgctgggcaaggccaccctgtacgccgtgctggtgtctgccctggtgctgatggctatggtcaagcggaaggacagccggggacgcgccaagagaagcggatctggcgtgaagcagaccctgaatttcgacctgctgaagctggctggcgacgtggaatccaacccaggcccttctagaggccatatgaccgagtacaagcccacggtgcgcctcgccacccgcgacgacgtccccagggccgtacgcaccctcgccgccgcgttcgccgactaccccgccacgcgccacaccgtcgatccggaccgccacatcgagcgggtcaccgagctgcaagaactcttcctcacgcgcgtcgggctcgacatcggcaaggtgtgggtcgcggacgacggcgccgcggtggcggtctggaccacgccggagagcgtcgaagcgggggcggtgttcgccgagatcggcccgcgcatggccgagttgagcggttcccggctggccgcgcagcaacagatggaaggcctcctggcgccgcaccggcccaaggagcccgcgtggttcctggccaccgtcggcgtctcgcccgaccaccagggcaagggtctgggcagcgccgtcgtgctccccggagtggaggcggccgagcgcgccggggtgcccgccttcctggagacctccgcgccccgcaacctccccttctacgagcggctcggcttcaccgtcaccgccgacgtcgaggtgcccgaaggaccgcgcacctggtgcatgacccgcaagcccggtgcctga

SEQ ID NO: 39910 - DNA, 3474 bp, synthetic construct
  source 1..3474: mol_type = other DNA
atggccttaccagtgaccgccttgctcctgccgctggccttgctgctccacgccgccaggccggagatcgtgctgacacagtctcccgccacactgtcactgtctccaggcgaaagagccacactgagctgtagagccagccagagcgtgtcctcttacctggcctggtatcagcagaagcctggacaggctccccggctgctgatctacgatgccagcaatagagccacaggcatccccgccagattttctggctctggcagcggcaccgatttcaccctgaccataagcagcctggaacctgaggacttcgccgtgtactactgccagcagagaagcaactggcccctgacctttggacagggcaccaaggtggaaatcaaactcgaggacctgaagaacgtgttcccacctgaggtggccgtgttcgagcctagcgaggccgagatcagccacacccagaaagccaccctcgtgtgcctggctaccggcttctaccccgaccatgtggaactgtcttggtgggtcaacggcaaagaggtgcacagcggcgtgtgtaccgacccccagccactgaaagaacagcccgccctgaacgacagccggtactgcctgagcagcagactgagagtgtccgccaccttctggcagaacccccggaaccacttcagatgccaggtgcagttctacggcctgagcgagaacgacgagtggacccaggacagagccaagcccgtgacccagatcgtgtctgccgaagcctggggcagagccgattgcgacgtgaagctggtggaaaagagcttcgagacagacaccaacctgaacttccagaacctgagcgtgatcggcttcagaatcctgctgctgaaagtggccggctttaacctgctgatgaccctgcggctgtggtccagcagggccaagcgatctggatctggagcaacaaacttctcactactcaaacaagcaggtgacgtggaggagaatcccgggcctactagtaccatggactggatttggcgcatccttttccttgtcggcgctgctaccggcgcccattccctgttcaatcaagaggtgcagatccctctgaccgagagctactgtggcccctgtcctaagaactggatctgctacaagaacaactgctaccagttcttcgacgagagcaagaattggtacgagagccaggccagctgcatgagccagaatgccagcctgctgaaggtgtacagcaaagaggaccaggacctgctgaaactggtcaagagcgcccactggatgggccttgtgcacatccccaccaatggctcttggcagtgggaggacggcagcattctgagccctaacctgctgaccatcatcgagatgcagaagggcgactgcgccctgtacgccagcagctttaagggctacatcgagaattgcagcaccccgaacacctacatctgtatgcagagaaccgtttctggcggaggcggctctggaggaggcggaagtggcggcggaggcgacctctttaatcaagaagtccagattccactcaccgaatcctactgcggaccttgtccaaaaaattggatttgttataagaacaactgttatcaattctttgatgagtctaaaaattggtatgagtcccaggcttcctgcatgtctcagaacgcttctctgctgaaagtctactctaaagaagatcaggatctcctgaagctcgtcaagtctgcccattggatggggctcgtccacattcctaccaacggaagctggcaatgggaagatggctccatcctgtctccaaatctgctcacgattattgaaatgcagaaaggggattgtgctctctacgccagctccttcaagggatatattgagaactgtagcacgcccaatacttatatctgtatgcaacggaccgtgggatccggcggcggaggatctggcggaggcggatctgggggcggaggctctttcgaacaagttcagctggttcagagcggagccgaagtgaagaaacctggcagcagcgtgaaggtgtcctgcaaagcaagcggcggcacctttagcacctacgccatccactgggttcgacaggcaccaggacaaggactggaatggatgggcagaatcatccccatcgagggcagagcctactacgcccagaaattccagggcagagtgaccatcaccgccgacgagtctacaagcaccgcctacatggaactgagcagcctgagaagcgaggataccgctgtgtactattgcgccagaggccggtacagctacagatattggttcgactactggggccagggcaccctggttacagtctcttctacgcgtatccagaaccctgatcctgccgtgtaccagctgcgggatagcaagagcagcgacaagagcgtgtgtctgttcaccgacttcgacagccagaccaacgtgtcccagagcaaggactccgacgtgtacatcaccgataagtgcgtgctggacatgcggagcatggacttcaagagcaactccgccgtggcctggtccaacaagtccgatttcgcctgcgccaacgccttcaacaacagcattatccccgaggacacattcttcccaagccccgagagcagctgcggctttaccagcgagagctaccagcagggcgtgctgagcgccaccatcctgtacgagatcctgctgggcaaggccaccctgtacgccgtgctggtgtctgccctggtgctgatggctatggtcaagcggaaggacagccggggacgcgccaagagaagcggatctggcgtgaagcagaccctgaatttcgacctgctgaagctggctggcgacgtggaatccaacccaggcccttctagaggccatatgaccgagtacaagcccacggtgcgcctcgccacccgcgacgacgtccccagggccgtacgcaccctcgccgccgcgttcgccgactaccccgccacgcgccacaccgtcgatccggaccgccacatcgagcgggtcaccgagctgcaagaactcttcctcacgcgcgtcgggctcgacatcggcaaggtgtgggtcgcggacgacggcgccgcggtggcggtctggaccacgccggagagcgtcgaagcgggggcggtgttcgccgagatcggcccgcgcatggccgagttgagcggttcccggctggccgcgcagcaacagatggaaggcctcctggcgccgcaccggcccaaggagcccgcgtggttcctggccaccgtcggcgtctcgcccgaccaccagggcaagggtctgggcagcgccgtcgtgctccccggagtggaggcggccgagcgcgccggggtgcccgccttcctggagacctccgcgccccgcaacctccccttctacgagcggctcggcttcaccgtcaccgccgacgtcgaggtgcccgaaggaccgcgcacctggtgcatgacccgcaagcccggtgcctga

SEQ ID NO: 39911 - DNA, 1860 bp, synthetic construct
  source 1..1860: mol_type = other DNA
atggccttaccagtgaccgccttgctcctgccgctggccttgctgctccacgccgccaggccggagatcgtgctgacacagtctcccgccacactgtcactgtctccaggcgaaagagccacactgagctgtagagccagccagagcgtgtcctcttacctggcctggtatcagcagaagcctggacaggctccccggctgctgatctacgatgccagcaatagagccacaggcatccccgccagattttctggctctggcagcggcaccgatttcaccctgaccataagcagcctggaacctgaggacttcgccgtgtactactgccagcagagaagcaactggcccctgacctttggacagggcaccaaggtggaaatcaaactcgaggacctgaagaacgtgttcccacctgaggtggccgtgttcgagcctagcgaggccgagatcagccacacccagaaagccaccctcgtgtgcctggctaccggcttctaccccgaccatgtggaactgtcttggtgggtcaacggcaaagaggtgcacagcggcgtgtgtaccgacccccagccactgaaagaacagcccgccctgaacgacagccggtactgcctgagcagcagactgagagtgtccgccaccttctggcagaacccccggaaccacttcagatgccaggtgcagttctacggcctgagcgagaacgacgagtggacccaggacagagccaagcccgtgacccagatcgtgtctgccgaagcctggggcagagccgattgcggctttaccagcgagagctaccagcagggcgtgctgagcgccaccaacctgagcgtgatcggcttcagaatcctgctgctgaaagtggccggctttaacctgctgatgaccctgcggctgtggtccagcagggccaagcgatctggatctggagcaacaaacttctcactactcaaacaagcaggtgacgtggaggagaatcccgggcctactagtatggactggatttggcgcatccttttccttgtcggcgctgctaccggcgcgcattccttcgaacaagttcagctggttcagagcggagccgaagtgaagaaacctggcagcagcgtgaaggtgtcctgcaaagcaagcggcggcacctttagcacctacgccatccactgggttcgacaggcaccaggacaaggactggaatggatgggcagaatcatccccatcgagggcagagcctactacgcccagaaattccagggcagagtgaccatcaccgccgacgagtctacaagcaccgcctacatggaactgagcagcctgagaagcgaggataccgctgtgtactattgcgccagaggccggtacagctacagatattggttcgactactggggccagggcaccctggttacagtctcttctacgcgtatccagaaccctgatcctgccgtgtaccagctgcgggatagcaagagcagcgacaagagcgtgtgtctgttcaccgacttcgacagccagaccaacgtgtcccagagcaaggactccgacgtgtacatcaccgataagtgcgtgctggacatgcggagcatggacttcaagagcaactccgccgtggcctggtccaacaagtccgatttcgcctgcgccaacgccttcaacaacagcattatccccgaggacacattcttcccaagccccgagagcagctgcgacgtgaagctggtggaaaagagcttcgagacagacaccaacctgaacttccagatcctgtacgagatcctgctgggcaaggccaccctgtacgccgtgctggtgtctgccctggtgctgatggctatggtcaagcggaaggacagccgggga

SEQ ID NO: 39912 - DNA, 1872 bp, synthetic construct
  source 1..1872: mol_type = other DNA
atggccttaccagtgaccgccttgctcctgccgctggccttgctgctccacgccgccaggccggagatcgtgctgacacagtctcccgccacactgtcactgtctccaggcgaaagagccacactgagctgtagagccagccagagcgtgtcctcttacctggcctggtatcagcagaagcctggacaggctccccggctgctgatctacgatgccagcaatagagccacaggcatccccgccagattttctggctctggcagcggcaccgatttcaccctgaccataagcagcctggaacctgaggacttcgccgtgtactactgccagcagagaagcaactggcccctgacctttggacagggcaccaaggtggaaatcaaactcgagatccagaaccctgatcctgccgtgtaccagctgcgggatagcaagagcagcgacaagagcgtgtgtctgttcaccgacttcgacagccagaccaacgtgtcccagagcaaggactccgacgtgtacatcaccgataagtgcgtgctggacatgcggagcatggacttcaagagcaactccgccgtggcctggtccaacaagtccgatttcgcctgcgccaacgccttcaacaacagcattatccccgaggacacattcttcccaagccccgagagcagctgcgacgtgaagctggtggaaaagagcttcgagacagacaccaacctgaacttccagatcctgtacgagatcctgctgggcaaggccaccctgtacgccgtgctggtgtctgccctggtgctgatggctatggtcaagcggaaggacagccggggacgcgccaagagaagcggatctggcgtgaagcagaccctgaatttcgacctgctgaagctggctggcgacgtggaatccaacccaggccctactagtatggactggatttggcgcatccttttccttgtcggcgctgctaccggcgcgcattccttcgaacaagttcagctggttcagagcggagccgaagtgaagaaacctggcagcagcgtgaaggtgtcctgcaaagcaagcggcggcacctttagcacctacgccatccactgggttcgacaggcaccaggacaaggactggaatggatgggcagaatcatccccatcgagggcagagcctactacgcccagaaattccagggcagagtgaccatcaccgccgacgagtctacaagcaccgcctacatggaactgagcagcctgagaagcgaggataccgctgtgtactattgcgccagaggccggtacagctacagatattggttcgactactggggccagggcaccctggttacagtctcttctacgcgtgaggacctgaagaacgtgttcccacctgaggtggccgtgttcgagcctagcgaggccgagatcagccacacccagaaagccaccctcgtgtgcctggctaccggcttctaccccgaccatgtggaactgtcttggtgggtcaacggcaaagaggtgcacagcggcgtgtgtaccgacccccagccactgaaagaacagcccgccctgaacgacagccggtactgcctgagcagcagactgagagtgtccgccaccttctggcagaacccccggaaccacttcagatgccaggtgcagttctacggcctgagcgagaacgacgagtggacccaggacagagccaagcccgtgacccagatcgtgtctgccgaagcctggggcagagccgattgcggctttaccagcgagagctaccagcagggcgtgctgagcgccaccaacctgagcgtgatcggcttcagaatcctgctgctgaaagtggccggctttaacctgctgatgaccctgcggctgtggtccagc

SEQ ID NO: 39913 - DNA, 2265 bp, synthetic construct
  source 1..2265: mol_type = other DNA
atggccttaccagtgaccgccttgctcctgccgctggccttgctgctccacgccgccaggccggaagtgcagctggttgaatctggcggaggactggttcagcctggcggatctctgagactgtcttgtgccgccagcggcttcagcttcagcgacttttggatgagctgggtccgacaggcccctggcaaaggacttgaatgggtcgccacaatcagccaggccggcagcgagaaggactacgtggactctgtgaagggcagattcaccatcagccgggacaacgccaagaagtccctgtacctccagatgaacagcctgagagccgaggacaccgccgtgtactattgtgcctctggcgtgtacagcttcgactacagaggccagggcaccctggtcacagtctcttctggtaccggcggaggcggatctggcggcggaggtagcggtggcggaggatctgaattcgagatcgtgctgacacagtctcccgccacactgtcactgtctccaggcgaaagagccacactgagctgtagagccagccagagcgtgtcctcttacctggcctggtatcagcagaagcctggacaggctccccggctgctgatctacgatgccagcaatagagccacaggcatccccgccagattttctggctctggcagcggcaccgatttcaccctgaccataagcagcctggaacctgaggacttcgccgtgtactactgccagcagagaagcaactggcccctgacctttggacagggcaccaaggtggaaatcaaactcgaggacctgaagaacgtgttcccacctgaggtggccgtgttcgagcctagcgaggccgagatcagccacacccagaaagccaccctcgtgtgcctggctaccggcttctaccccgaccatgtggaactgtcttggtgggtcaacggcaaagaggtgcacagcggcgtgtgtaccgacccccagccactgaaagaacagcccgccctgaacgacagccggtactgcctgagcagcagactgagagtgtccgccaccttctggcagaacccccggaaccacttcagatgccaggtgcagttctacggcctgagcgagaacgacgagtggacccaggacagagccaagcccgtgacccagatcgtgtctgccgaagcctggggcagagccgattgcggctttaccagcgagagctaccagcagggcgtgctgagcgccaccaacctgagcgtgatcggcttcagaatcctgctgctgaaagtggccggctttaacctgctgatgaccctgcggctgtggtccagcagggccaagcgatctggatctggagcaacaaacttctcactactcaaacaagcaggtgacgtggaggagaatcccgggcctactagtatggactggatttggcgcatccttttccttgtcggcgctgctaccggcgcgcattccttcgaacaagttcagctggttcagagcggagccgaagtgaagaaacctggcagcagcgtgaaggtgtcctgcaaagcaagcggcggcacctttagcacctacgccatccactgggttcgacaggcaccaggacaaggactggaatggatgggcagaatcatccccatcgagggcagagcctactacgcccagaaattccagggcagagtgaccatcaccgccgacgagtctacaagcaccgcctacatggaactgagcagcctgagaagcgaggataccgctgtgtactattgcgccagaggccggtacagctacagatattggttcgactactggggccagggcaccctggttacagtctcttctacgcgtatccagaaccctgatcctgccgtgtaccagctgcgggatagcaagagcagcgacaagagcgtgtgtctgttcaccgacttcgacagccagaccaacgtgtcccagagcaaggactccgacgtgtacatcaccgataagtgcgtgctggacatgcggagcatggacttcaagagcaactccgccgtggcctggtccaacaagtccgatttcgcctgcgccaacgccttcaacaacagcattatccccgaggacacattcttcccaagccccgagagcagctgcgacgtgaagctggtggaaaagagcttcgagacagacaccaacctgaacttccagatcctgtacgagatcctgctgggcaaggccaccctgtacgccgtgctggtgtctgccctggtgctgatggctatggtcaagcggaaggacagccgggga

SEQ ID NO: 39914 - DNA, 2277 bp, synthetic construct
  source 1..2277: mol_type = other DNA
atggccttaccagtgaccgccttgctcctgccgctggccttgctgctccacgccgccaggccggaagtgcagctggttgaatctggcggaggactggttcagcctggcggatctctgagactgtcttgtgccgccagcggcttcagcttcagcgacttttggatgagctgggtccgacaggcccctggcaaaggacttgaatgggtcgccacaatcagccaggccggcagcgagaaggactacgtggactctgtgaagggcagattcaccatcagccgggacaacgccaagaagtccctgtacctccagatgaacagcctgagagccgaggacaccgccgtgtactattgtgcctctggcgtgtacagcttcgactacagaggccagggcaccctggtcacagtctcttctggtaccggcggaggcggatctggcggcggaggtagcggtggcggaggatctgaattcgagatcgtgctgacacagtctcccgccacactgtcactgtctccaggcgaaagagccacactgagctgtagagccagccagagcgtgtcctcttacctggcctggtatcagcagaagcctggacaggctccccggctgctgatctacgatgccagcaatagagccacaggcatccccgccagattttctggctctggcagcggcaccgatttcaccctgaccataagcagcctggaacctgaggacttcgccgtgtactactgccagcagagaagcaactggcccctgacctttggacagggcaccaaggtggaaatcaaactcgagatccagaaccctgatcctgccgtgtaccagctgcgggatagcaagagcagcgacaagagcgtgtgtctgttcaccgacttcgacagccagaccaacgtgtcccagagcaaggactccgacgtgtacatcaccgataagtgcgtgctggacatgcggagcatggacttcaagagcaactccgccgtggcctggtccaacaagtccgatttcgcctgcgccaacgccttcaacaacagcattatccccgaggacacattcttcccaagccccgagagcagctgcgacgtgaagctggtggaaaagagcttcgagacagacaccaacctgaacttccagatcctgtacgagatcctgctgggcaaggccaccctgtacgccgtgctggtgtctgccctggtgctgatggctatggtcaagcggaaggacagccggggacgcgccaagagaagcggatctggcgtgaagcagaccctgaatttcgacctgctgaagctggctggcgacgtggaatccaacccaggccctactagtatggactggatttggcgcatccttttccttgtcggcgctgctaccggcgcgcattccttcgaacaagttcagctggttcagagcggagccgaagtgaagaaacctggcagcagcgtgaaggtgtcctgcaaagcaagcggcggcacctttagcacctacgccatccactgggttcgacaggcaccaggacaaggactggaatggatgggcagaatcatccccatcgagggcagagcctactacgcccagaaattccagggcagagtgaccatcaccgccgacgagtctacaagcaccgcctacatggaactgagcagcctgagaagcgaggataccgctgtgtactattgcgccagaggccggtacagctacagatattggttcgactactggggccagggcaccctggttacagtctcttctacgcgtgaggacctgaagaacgtgttcccacctgaggtggccgtgttcgagcctagcgaggccgagatcagccacacccagaaagccaccctcgtgtgcctggctaccggcttctaccccgaccatgtggaactgtcttggtgggtcaacggcaaagaggtgcacagcggcgtgtgtaccgacccccagccactgaaagaacagcccgccctgaacgacagccggtactgcctgagcagcagactgagagtgtccgccaccttctggcagaacccccggaaccacttcagatgccaggtgcagttctacggcctgagcgagaacgacgagtggacccaggacagagccaagcccgtgacccagatcgtgtctgccgaagcctggggcagagccgattgcggctttaccagcgagagctaccagcagggcgtgctgagcgccaccaacctgagcgtgatcggcttcagaatcctgctgctgaaagtggccggctttaacctgctgatgaccctgcggctgtggtccagc

SEQ ID NO: 39915 - DNA, 2676 bp, synthetic construct
  source 1..2676: mol_type = other DNA
atggccttaccagtgaccgccttgctcctgccgctggccttgctgctccacgccgccaggccggaagtgcagctggttgaatctggcggaggactggttcagcctggcggatctctgagactgtcttgtgccgccagcggcttcagcttcagcgacttttggatgagctgggtccgacaggcccctggcaaaggacttgaatgggtcgccacaatcagccaggccggcagcgagaaggactacgtggactctgtgaagggcagattcaccatcagccgggacaacgccaagaagtccctgtacctccagatgaacagcctgagagccgaggacaccgccgtgtactattgtgcctctggcgtgtacagcttcgactacagaggccagggcaccctggtcacagtctcttctggtaccggcggaggcggatctggcggcggaggtagcggtggcggaggatctgaattcgagatcgtgctgacacagtctcccgccacactgtcactgtctccaggcgaaagagccacactgagctgtagagccagccagagcgtgtcctcttacctggcctggtatcagcagaagcctggacaggctccccggctgctgatctacgatgccagcaatagagccacaggcatccccgccagattttctggctctggcagcggcaccgatttcaccctgaccataagcagcctggaacctgaggacttcgccgtgtactactgccagcagagaagcaactggcccctgacctttggacagggcaccaaggtggaaatcaaactcgaggacctgaagaacgtgttcccacctgaggtggccgtgttcgagcctagcgaggccgagatcagccacacccagaaagccaccctcgtgtgcctggctaccggcttctaccccgaccatgtggaactgtcttggtgggtcaacggcaaagaggtgcacagcggcgtgtgtaccgacccccagccactgaaagaacagcccgccctgaacgacagccggtactgcctgagcagcagactgagagtgtccgccaccttctggcagaacccccggaaccacttcagatgccaggtgcagttctacggcctgagcgagaacgacgagtggacccaggacagagccaagcccgtgacccagatcgtgtctgccgaagcctggggcagagccgattgcggctttaccagcgagagctaccagcagggcgtgctgagcgccaccaacctgagcgtgatcggcttcagaatcctgctgctgaaagtggccggctttaacctgctgatgaccctgcggctgtggtccagcagggccaagcgatctggatctggagcaacaaacttctcactactcaaacaagcaggtgacgtggaggagaatcccgggcctactagtatggactggatttggcgcatccttttccttgtcggcgctgctaccggcgcgcattccgggccccagctccagctgcaagagtctggacctggcctggtcaagcctagcgagacactgagcctgacctgtaccgtgtccggcgatagcatcagcagcggcgattactactggggctggatcagacagcctcctggcaaaggactggaatggatcggccacatctactacagcggcgtgacctactacaaccccagcctgaagtccagagtgaccatcagcgtggacaccagccggaaccagttctccctgaagctgtctagcgtgacagccgccgataccgccgtgtactactgcaccagagaggacagcagcaactggcggagtagaggccagggaacactggtcacagttagctctggatccggcggaggcggaagtggaggcggaggatctggcggcggaggctctttcgaacaagttcagctggttcagagcggagccgaagtgaagaaacctggcagcagcgtgaaggtgtcctgcaaagcaagcggcggcacctttagcacctacgccatccactgggttcgacaggcaccaggacaaggactggaatggatgggcagaatcatccccatcgagggcagagcctactacgcccagaaattccagggcagagtgaccatcaccgccgacgagtctacaagcaccgcctacatggaactgagcagcctgagaagcgaggataccgctgtgtactattgcgccagaggccggtacagctacagatattggttcgactactggggccagggcaccctggttacagtctcttctacgcgtatccagaaccctgatcctgccgtgtaccagctgcgggatagcaagagcagcgacaagagcgtgtgtctgttcaccgacttcgacagccagaccaacgtgtcccagagcaaggactccgacgtgtacatcaccgataagtgcgtgctggacatgcggagcatggacttcaagagcaactccgccgtggcctggtccaacaagtccgatttcgcctgcgccaacgccttcaacaacagcattatccccgaggacacattcttcccaagccccgagagcagctgcgacgtgaagctggtggaaaagagcttcgagacagacaccaacctgaacttccagatcctgtacgagatcctgctgggcaaggccaccctgtacgccgtgctggtgtctgccctggtgctgatggctatggtcaagcggaaggacagccgggga

SEQ ID NO: 39916 - DNA, 2688 bp, synthetic construct
  source 1..2688: mol_type = other DNA
atggccttaccagtgaccgccttgctcctgccgctggccttgctgctccacgccgccaggccggaagtgcagctggttgaatctggcggaggactggttcagcctggcggatctctgagactgtcttgtgccgccagcggcttcagcttcagcgacttttggatgagctgggtccgacaggcccctggcaaaggacttgaatgggtcgccacaatcagccaggccggcagcgagaaggactacgtggactctgtgaagggcagattcaccatcagccgggacaacgccaagaagtccctgtacctccagatgaacagcctgagagccgaggacaccgccgtgtactattgtgcctctggcgtgtacagcttcgactacagaggccagggcaccctggtcacagtctcttctggtaccggcggaggcggatctggcggcggaggtagcggtggcggaggatctgaattcgagatcgtgctgacacagtctcccgccacactgtcactgtctccaggcgaaagagccacactgagctgtagagccagccagagcgtgtcctcttacctggcctggtatcagcagaagcctggacaggctccccggctgctgatctacgatgccagcaatagagccacaggcatccccgccagattttctggctctggcagcggcaccgatttcaccctgaccataagcagcctggaacctgaggacttcgccgtgtactactgccagcagagaagcaactggcccctgacctttggacagggcaccaaggtggaaatcaaactcgagatccagaaccctgatcctgccgtgtaccagctgcgggatagcaagagcagcgacaagagcgtgtgtctgttcaccgacttcgacagccagaccaacgtgtcccagagcaaggactccgacgtgtacatcaccgataagtgcgtgctggacatgcggagcatggacttcaagagcaactccgccgtggcctggtccaacaagtccgatttcgcctgcgccaacgccttcaacaacagcattatccccgaggacacattcttcccaagccccgagagcagctgcgacgtgaagctggtggaaaagagcttcgagacagacaccaacctgaacttccagatcctgtacgagatcctgctgggcaaggccaccctgtacgccgtgctggtgtctgccctggtgctgatggctatggtcaagcggaaggacagccggggacgcgccaagagaagcggatctggcgtgaagcagaccctgaatttcgacctgctgaagctggctggcgacgtggaatccaacccaggccctactagtatggactggatttggcgcatccttttccttgtcggcgctgctaccggcgcgcattccgggccccagctccagctgcaagagtctggacctggcctggtcaagcctagcgagacactgagcctgacctgtaccgtgtccggcgatagcatcagcagcggcgattactactggggctggatcagacagcctcctggcaaaggactggaatggatcggccacatctactacagcggcgtgacctactacaaccccagcctgaagtccagagtgaccatcagcgtggacaccagccggaaccagttctccctgaagctgtctagcgtgacagccgccgataccgccgtgtactactgcaccagagaggacagcagcaactggcggagtagaggccagggaacactggtcacagttagctctggatccggcggaggcggaagtggaggcggaggatctggcggcggaggctctttcgaacaagttcagctggttcagagcggagccgaagtgaagaaacctggcagcagcgtgaaggtgtcctgcaaagcaagcggcggcacctttagcacctacgccatccactgggttcgacaggcaccaggacaaggactggaatggatgggcagaatcatccccatcgagggcagagcctactacgcccagaaattccagggcagagtgaccatcaccgccgacgagtctacaagcaccgcctacatggaactgagcagcctgagaagcgaggataccgctgtgtactattgcgccagaggccggtacagctacagatattggttcgactactggggccagggcaccctggttacagtctcttctacgcgtgaggacctgaagaacgtgttcccacctgaggtggccgtgttcgagcctagcgaggccgagatcagccacacccagaaagccaccctcgtgtgcctggctaccggcttctaccccgaccatgtggaactgtcttggtgggtcaacggcaaagaggtgcacagcggcgtgtgtaccgacccccagccactgaaagaacagcccgccctgaacgacagccggtactgcctgagcagcagactgagagtgtccgccaccttctggcagaacccccggaaccacttcagatgccaggtgcagttctacggcctgagcgagaacgacgagtggacccaggacagagccaagcccgtgacccagatcgtgtctgccgaagcctggggcagagccgattgcggctttaccagcgagagctaccagcagggcgtgctgagcgccaccaacctgagcgtgatcggcttcagaatcctgctgctgaaagtggccggctttaacctgctgatgaccctgcggctgtggtccagc

SEQ ID NO: 39917 - DNA, 2172 bp, synthetic construct
  source 1..2172: mol_type = other DNA
atggccttaccagtgaccgccttgctcctgccgctggccttgctgctccacgccgccaggccggagatcgtgctgacacagtctcccgccacactgtcactgtctccaggcgaaagagccacactgagctgtagagccagccagagcgtgtcctcttacctggcctggtatcagcagaagcctggacaggctccccggctgctgatctacgatgccagcaatagagccacaggcatccccgccagattttctggctctggcagcggcaccgatttcaccctgaccataagcagcctggaacctgaggacttcgccgtgtactactgccagcagagaagcaactggcccctgacctttggacagggcaccaaggtggaaatcaaactcgaggacctgaagaacgtgttcccacctgaggtggccgtgttcgagcctagcgaggccgagatcagccacacccagaaagccaccctcgtgtgcctggctaccggcttctaccccgaccatgtggaactgtcttggtgggtcaacggcaaagaggtgcacagcggcgtgtgtaccgacccccagccactgaaagaacagcccgccctgaacgacagccggtactgcctgagcagcagactgagagtgtccgccaccttctggcagaacccccggaaccacttcagatgccaggtgcagttctacggcctgagcgagaacgacgagtggacccaggacagagccaagcccgtgacccagatcgtgtctgccgaagcctggggcagagccgatgatgtgattaagatccactggcaggaaaagaagtccaacaccatcctgggcagccaggaaggcaacaccatgaagaccaacgacacctacatgaagttcagctggctgaccgtgcccgagaagtccctggacaaagaacacagatgcatcgtgcggcacgaaaacaacaagaacggcgtggaccaggaaatcatcttcccacccatcaagaccgatgtgattacaatggaccccaaggacaactgctccaaggacgccaacgataccctgctgctccagctgaccaacaccagcgcctactacatgtacttgttgctgctgctgaagtccgtggtgtacttcgccatcatcacatgctgcctgctgatggctatggtcaagcggaaggacagccggggaagggccaagcgatctggatctggagcaacaaacttctcactactcaaacaagcaggtgacgtggaggagaatcccgggcctactagtatggactggatttggcgcatccttttccttgtcggcgctgctaccggcgcgcattccttcgaacaagttcagctggttcagagcggagccgaagtgaagaaacctggcagcagcgtgaaggtgtcctgcaaagcaagcggcggcacctttagcacctacgccatccactgggttcgacaggcaccaggacaaggactggaatggatgggcagaatcatccccatcgagggcagagcctactacgcccagaaattccagggcagagtgaccatcaccgccgacgagtctacaagcaccgcctacatggaactgagcagcctgagaagcgaggataccgctgtgtactattgcgccagaggccggtacagctacagatattggttcgactactggggccagggcaccctggttacagtctcttctacgcgtatccagaaccctgatcctgccgtgtaccagctgcgggatagcaagagcagcgacaagagcgtgtgtctgttcaccgacttcgacagccagaccaacgtgtcccagagcaaggactccgacgtgtacatcaccgataagtgcgtgctggacatgcggagcatggacttcaagagcaactccgccgtggcctggtccaacaagtccgatttcgcctgcgccaacgccttcaacaacagcattatccccgaggacacattcttcccaagccccgagagcagcgactccaccgaccacgtgaagcccaaagagacagagaacaccaagcagcccagcaagagctgccacaagcccaaggccatcgtgcacaccgagaaagtgaacatgatgagcctgaccgtgctgggcctgcggatgctgttcgccaaaaccgtggccgtgaacttcctgctgaccgccaagctgttcttcctcctcaccgcc

SEQ ID NO: 39918 - DNA, 2184 bp, synthetic construct
  source 1..2184: mol_type = other DNA
atggccttaccagtgaccgccttgctcctgccgctggccttgctgctccacgccgccaggccggagatcgtgctgacacagtctcccgccacactgtcactgtctccaggcgaaagagccacactgagctgtagagccagccagagcgtgtcctcttacctggcctggtatcagcagaagcctggacaggctccccggctgctgatctacgatgccagcaatagagccacaggcatccccgccagattttctggctctggcagcggcaccgatttcaccctgaccataagcagcctggaacctgaggacttcgccgtgtactactgccagcagagaagcaactggcccctgacctttggacagggcaccaaggtggaaatcaaactcgagatccagaaccctgatcctgccgtgtaccagctgcgggatagcaagagcagcgacaagagcgtgtgtctgttcaccgacttcgacagccagaccaacgtgtcccagagcaaggactccgacgtgtacatcaccgataagtgcgtgctggacatgcggagcatggacttcaagagcaactccgccgtggcctggtccaacaagtccgatttcgcctgcgccaacgccttcaacaacagcattatccccgaggacacattcttcccaagccccgagagcagcgactccaccgaccacgtgaagcccaaagagacagagaacaccaagcagcccagcaagagctgccacaagcccaaggccatcgtgcacaccgagaaagtgaacatgatgagcctgaccgtgctgggcctgcggatgctgttcgccaaaaccgtggccgtgaacttcctgctgaccgccaagctgttcttcctcctcaccgcccgcgccaagagaagcggatctggcgtgaagcagaccctgaatttcgacctgctgaagctggctggcgacgtggaatccaacccaggccctactagtatggactggatttggcgcatccttttccttgtcggcgctgctaccggcgcgcattccttcgaacaagttcagctggttcagagcggagccgaagtgaagaaacctggcagcagcgtgaaggtgtcctgcaaagcaagcggcggcacctttagcacctacgccatccactgggttcgacaggcaccaggacaaggactggaatggatgggcagaatcatccccatcgagggcagagcctactacgcccagaaattccagggcagagtgaccatcaccgccgacgagtctacaagcaccgcctacatggaactgagcagcctgagaagcgaggataccgctgtgtactattgcgccagaggccggtacagctacagatattggttcgactactggggccagggcaccctggttacagtctcttctacgcgtgaggacctgaagaacgtgttcccacctgaggtggccgtgttcgagcctagcgaggccgagatcagccacacccagaaagccaccctcgtgtgcctggctaccggcttctaccccgaccatgtggaactgtcttggtgggtcaacggcaaagaggtgcacagcggcgtgtgtaccgacccccagccactgaaagaacagcccgccctgaacgacagccggtactgcctgagcagcagactgagagtgtccgccaccttctggcagaacccccggaaccacttcagatgccaggtgcagttctacggcctgagcgagaacgacgagtggacccaggacagagccaagcccgtgacccagatcgtgtctgccgaagcctggggcagagccgatgatgtgattaagatccactggcaggaaaagaagtccaacaccatcctgggcagccaggaaggcaacaccatgaagaccaacgacacctacatgaagttcagctggctgaccgtgcccgagaagtccctggacaaagaacacagatgcatcgtgcggcacgaaaacaacaagaacggcgtggaccaggaaatcatcttcccacccatcaagaccgatgtgattacaatggaccccaaggacaactgctccaaggacgccaacgataccctgctgctccagctgaccaacaccagcgcctactacatgtacttgttgctgctgctgaagtccgtggtgtacttcgccatcatcacatgctgcctgctgatggctatggtcaagcggaaggacagccgggga

SEQ ID NO: 39919 - DNA, 2577 bp, synthetic construct
  source 1..2577: mol_type = other DNA
atggccttaccagtgaccgccttgctcctgccgctggccttgctgctccacgccgccaggccggaagtgcagctggttgaatctggcggaggactggttcagcctggcggatctctgagactgtcttgtgccgccagcggcttcagcttcagcgacttttggatgagctgggtccgacaggcccctggcaaaggacttgaatgggtcgccacaatcagccaggccggcagcgagaaggactacgtggactctgtgaagggcagattcaccatcagccgggacaacgccaagaagtccctgtacctccagatgaacagcctgagagccgaggacaccgccgtgtactattgtgcctctggcgtgtacagcttcgactacagaggccagggcaccctggtcacagtctcttctggtaccggcggaggcggatctggcggcggaggtagcggtggcggaggatctgaattcgagatcgtgctgacacagtctcccgccacactgtcactgtctccaggcgaaagagccacactgagctgtagagccagccagagcgtgtcctcttacctggcctggtatcagcagaagcctggacaggctccccggctgctgatctacgatgccagcaatagagccacaggcatccccgccagattttctggctctggcagcggcaccgatttcaccctgaccataagcagcctggaacctgaggacttcgccgtgtactactgccagcagagaagcaactggcccctgacctttggacagggcaccaaggtggaaatcaaactcgaggacctgaagaacgtgttcccacctgaggtggccgtgttcgagcctagcgaggccgagatcagccacacccagaaagccaccctcgtgtgcctggctaccggcttctaccccgaccatgtggaactgtcttggtgggtcaacggcaaagaggtgcacagcggcgtgtgtaccgacccccagccactgaaagaacagcccgccctgaacgacagccggtactgcctgagcagcagactgagagtgtccgccaccttctggcagaacccccggaaccacttcagatgccaggtgcagttctacggcctgagcgagaacgacgagtggacccaggacagagccaagcccgtgacccagatcgtgtctgccgaagcctggggcagagccgatgatgtgattaagatccactggcaggaaaagaagtccaacaccatcctgggcagccaggaaggcaacaccatgaagaccaacgacacctacatgaagttcagctggctgaccgtgcccgagaagtccctggacaaagaacacagatgcatcgtgcggcacgaaaacaacaagaacggcgtggaccaggaaatcatcttcccacccatcaagaccgatgtgattacaatggaccccaaggacaactgctccaaggacgccaacgataccctgctgctccagctgaccaacaccagcgcctactacatgtacttgttgctgctgctgaagtccgtggtgtacttcgccatcatcacatgctgcctgctgatggctatggtcaagcggaaggacagccggggaagggccaagcgatctggatctggagcaacaaacttctcactactcaaacaagcaggtgacgtggaggagaatcccgggcctactagtatggactggatttggcgcatccttttccttgtcggcgctgctaccggcgcgcattccttcgaacaagttcagctggttcagagcggagccgaagtgaagaaacctggcagcagcgtgaaggtgtcctgcaaagcaagcggcggcacctttagcacctacgccatccactgggttcgacaggcaccaggacaaggactggaatggatgggcagaatcatccccatcgagggcagagcctactacgcccagaaattccagggcagagtgaccatcaccgccgacgagtctacaagcaccgcctacatggaactgagcagcctgagaagcgaggataccgctgtgtactattgcgccagaggccggtacagctacagatattggttcgactactggggccagggcaccctggttacagtctcttctacgcgtatccagaaccctgatcctgccgtgtaccagctgcgggatagcaagagcagcgacaagagcgtgtgtctgttcaccgacttcgacagccagaccaacgtgtcccagagcaaggactccgacgtgtacatcaccgataagtgcgtgctggacatgcggagcatggacttcaagagcaactccgccgtggcctggtccaacaagtccgatttcgcctgcgccaacgccttcaacaacagcattatccccgaggacacattcttcccaagccccgagagcagcgactccaccgaccacgtgaagcccaaagagacagagaacaccaagcagcccagcaagagctgccacaagcccaaggccatcgtgcacaccgagaaagtgaacatgatgagcctgaccgtgctgggcctgcggatgctgttcgccaaaaccgtggccgtgaacttcctgctgaccgccaagctgttcttcctcctcaccgcc

SEQ ID NO: 39920 - DNA, 2589 bp, synthetic construct
  source 1..2589: mol_type = other DNA
atggccttaccagtgaccgccttgctcctgccgctggccttgctgctccacgccgccaggccggaagtgcagctggttgaatctggcggaggactggttcagcctggcggatctctgagactgtcttgtgccgccagcggcttcagcttcagcgacttttggatgagctgggtccgacaggcccctggcaaaggacttgaatgggtcgccacaatcagccaggccggcagcgagaaggactacgtggactctgtgaagggcagattcaccatcagccgggacaacgccaagaagtccctgtacctccagatgaacagcctgagagccgaggacaccgccgtgtactattgtgcctctggcgtgtacagcttcgactacagaggccagggcaccctggtcacagtctcttctggtaccggcggaggcggatctggcggcggaggtagcggtggcggaggatctgaattcgagatcgtgctgacacagtctcccgccacactgtcactgtctccaggcgaaagagccacactgagctgtagagccagccagagcgtgtcctcttacctggcctggtatcagcagaagcctggacaggctccccggctgctgatctacgatgccagcaatagagccacaggcatccccgccagattttctggctctggcagcggcaccgatttcaccctgaccataagcagcctggaacctgaggacttcgccgtgtactactgccagcagagaagcaactggcccctgacctttggacagggcaccaaggtggaaatcaaactcgagatccagaaccctgatcctgccgtgtaccagctgcgggatagcaagagcagcgacaagagcgtgtgtctgttcaccgacttcgacagccagaccaacgtgtcccagagcaaggactccgacgtgtacatcaccgataagtgcgtgctggacatgcggagcatggacttcaagagcaactccgccgtggcctggtccaacaagtccgatttcgcctgcgccaacgccttcaacaacagcattatccccgaggacacattcttcccaagccccgagagcagcgactccaccgaccacgtgaagcccaaagagacagagaacaccaagcagcccagcaagagctgccacaagcccaaggccatcgtgcacaccgagaaagtgaacatgatgagcctgaccgtgctgggcctgcggatgctgttcgccaaaaccgtggccgtgaacttcctgctgaccgccaagctgttcttcctcctcaccgcccgcgccaagagaagcggatctggcgtgaagcagaccctgaatttcgacctgctgaagctggctggcgacgtggaatccaacccaggccctactagtatggactggatttggcgcatccttttccttgtcggcgctgctaccggcgcgcattccttcgaacaagttcagctggttcagagcggagccgaagtgaagaaacctggcagcagcgtgaaggtgtcctgcaaagcaagcggcggcacctttagcacctacgccatccactgggttcgacaggcaccaggacaaggactggaatggatgggcagaatcatccccatcgagggcagagcctactacgcccagaaattccagggcagagtgaccatcaccgccgacgagtctacaagcaccgcctacatggaactgagcagcctgagaagcgaggataccgctgtgtactattgcgccagaggccggtacagctacagatattggttcgactactggggccagggcaccctggttacagtctcttctacgcgtgaggacctgaagaacgtgttcccacctgaggtggccgtgttcgagcctagcgaggccgagatcagccacacccagaaagccaccctcgtgtgcctggctaccggcttctaccccgaccatgtggaactgtcttggtgggtcaacggcaaagaggtgcacagcggcgtgtgtaccgacccccagccactgaaagaacagcccgccctgaacgacagccggtactgcctgagcagcagactgagagtgtccgccaccttctggcagaacccccggaaccacttcagatgccaggtgcagttctacggcctgagcgagaacgacgagtggacccaggacagagccaagcccgtgacccagatcgtgtctgccgaagcctggggcagagccgatgatgtgattaagatccactggcaggaaaagaagtccaacaccatcctgggcagccaggaaggcaacaccatgaagaccaacgacacctacatgaagttcagctggctgaccgtgcccgagaagtccctggacaaagaacacagatgcatcgtgcggcacgaaaacaacaagaacggcgtggaccaggaaatcatcttcccacccatcaagaccgatgtgattacaatggaccccaaggacaactgctccaaggacgccaacgataccctgctgctccagctgaccaacaccagcgcctactacatgtacttgttgctgctgctgaagtccgtggtgtacttcgccatcatcacatgctgcctgctgatggctatggtcaagcggaaggacagccgggga

SEQ ID NO: 39921 - DNA, 2988 bp, synthetic construct
  source 1..2988: mol_type = other DNA
atggccttaccagtgaccgccttgctcctgccgctggccttgctgctccacgccgccaggccggaagtgcagctggttgaatctggcggaggactggttcagcctggcggatctctgagactgtcttgtgccgccagcggcttcagcttcagcgacttttggatgagctgggtccgacaggcccctggcaaaggacttgaatgggtcgccacaatcagccaggccggcagcgagaaggactacgtggactctgtgaagggcagattcaccatcagccgggacaacgccaagaagtccctgtacctccagatgaacagcctgagagccgaggacaccgccgtgtactattgtgcctctggcgtgtacagcttcgactacagaggccagggcaccctggtcacagtctcttctggtaccggcggaggcggatctggcggcggaggtagcggtggcggaggatctgaattcgagatcgtgctgacacagtctcccgccacactgtcactgtctccaggcgaaagagccacactgagctgtagagccagccagagcgtgtcctcttacctggcctggtatcagcagaagcctggacaggctccccggctgctgatctacgatgccagcaatagagccacaggcatccccgccagattttctggctctggcagcggcaccgatttcaccctgaccataagcagcctggaacctgaggacttcgccgtgtactactgccagcagagaagcaactggcccctgacctttggacagggcaccaaggtggaaatcaaactcgaggacctgaagaacgtgttcccacctgaggtggccgtgttcgagcctagcgaggccgagatcagccacacccagaaagccaccctcgtgtgcctggctaccggcttctaccccgaccatgtggaactgtcttggtgggtcaacggcaaagaggtgcacagcggcgtgtgtaccgacccccagccactgaaagaacagcccgccctgaacgacagccggtactgcctgagcagcagactgagagtgtccgccaccttctggcagaacccccggaaccacttcagatgccaggtgcagttctacggcctgagcgagaacgacgagtggacccaggacagagccaagcccgtgacccagatcgtgtctgccgaagcctggggcagagccgatgatgtgattaagatccactggcaggaaaagaagtccaacaccatcctgggcagccaggaaggcaacaccatgaagaccaacgacacctacatgaagttcagctggctgaccgtgcccgagaagtccctggacaaagaacacagatgcatcgtgcggcacgaaaacaacaagaacggcgtggaccaggaaatcatcttcccacccatcaagaccgatgtgattacaatggaccccaaggacaactgctccaaggacgccaacgataccctgctgctccagctgaccaacaccagcgcctactacatgtacttgttgctgctgctgaagtccgtggtgtacttcgccatcatcacatgctgcctgctgatggctatggtcaagcggaaggacagccggggaagggccaagcgatctggatctggagcaacaaacttctcactactcaaacaagcaggtgacgtggaggagaatcccgggcctactagtatggactggatttggcgcatccttttccttgtcggcgctgctaccggcgcgcattccgggccccagctccagctgcaagagtctggacctggcctggtcaagcctagcgagacactgagcctgacctgtaccgtgtccggcgatagcatcagcagcggcgattactactggggctggatcagacagcctcctggcaaaggactggaatggatcggccacatctactacagcggcgtgacctactacaaccccagcctgaagtccagagtgaccatcagcgtggacaccagccggaaccagttctccctgaagctgtctagcgtgacagccgccgataccgccgtgtactactgcaccagagaggacagcagcaactggcggagtagaggccagggaacactggtcacagttagctctggatccggcggaggcggaagtggaggcggaggatctggcggcggaggctctttcgaacaagttcagctggttcagagcggagccgaagtgaagaaacctggcagcagcgtgaaggtgtcctgcaaagcaagcggcggcacctttagcacctacgccatccactgggttcgacaggcaccaggacaaggactggaatggatgggcagaatcatccccatcgagggcagagcctactacgcccagaaattccagggcagagtgaccatcaccgccgacgagtctacaagcaccgcctacatggaactgagcagcctgagaagcgaggataccgctgtgtactattgcgccagaggccggtacagctacagatattggttcgactactggggccagggcaccctggttacagtctcttctacgcgtatccagaaccctgatcctgccgtgtaccagctgcgggatagcaagagcagcgacaagagcgtgtgtctgttcaccgacttcgacagccagaccaacgtgtcccagagcaaggactccgacgtgtacatcaccgataagtgcgtgctggacatgcggagcatggacttcaagagcaactccgccgtggcctggtccaacaagtccgatttcgcctgcgccaacgccttcaacaacagcattatccccgaggacacattcttcccaagccccgagagcagcgactccaccgaccacgtgaagcccaaagagacagagaacaccaagcagcccagcaagagctgccacaagcccaaggccatcgtgcacaccgagaaagtgaacatgatgagcctgaccgtgctgggcctgcggatgctgttcgccaaaaccgtggccgtgaacttcctgctgaccgccaagctgttcttcctcctcaccgcc

SEQ ID NO: 39922 - DNA, 3000 bp, synthetic construct
  source 1..3000: mol_type = other DNA
atggccttaccagtgaccgccttgctcctgccgctggccttgctgctccacgccgccaggccggaagtgcagctggttgaatctggcggaggactggttcagcctggcggatctctgagactgtcttgtgccgccagcggcttcagcttcagcgacttttggatgagctgggtccgacaggcccctggcaaaggacttgaatgggtcgccacaatcagccaggccggcagcgagaaggactacgtggactctgtgaagggcagattcaccatcagccgggacaacgccaagaagtccctgtacctccagatgaacagcctgagagccgaggacaccgccgtgtactattgtgcctctggcgtgtacagcttcgactacagaggccagggcaccctggtcacagtctcttctggtaccggcggaggcggatctggcggcggaggtagcggtggcggaggatctgaattcgagatcgtgctgacacagtctcccgccacactgtcactgtctccaggcgaaagagccacactgagctgtagagccagccagagcgtgtcctcttacctggcctggtatcagcagaagcctggacaggctccccggctgctgatctacgatgccagcaatagagccacaggcatccccgccagattttctggctctggcagcggcaccgatttcaccctgaccataagcagcctggaacctgaggacttcgccgtgtactactgccagcagagaagcaactggcccctgacctttggacagggcaccaaggtggaaatcaaactcgagatccagaaccctgatcctgccgtgtaccagctgcgggatagcaagagcagcgacaagagcgtgtgtctgttcaccgacttcgacagccagaccaacgtgtcccagagcaaggactccgacgtgtacatcaccgataagtgcgtgctggacatgcggagcatggacttcaagagcaactccgccgtggcctggtccaacaagtccgatttcgcctgcgccaacgccttcaacaacagcattatccccgaggacacattcttcccaagccccgagagcagcgactccaccgaccacgtgaagcccaaagagacagagaacaccaagcagcccagcaagagctgccacaagcccaaggccatcgtgcacaccgagaaagtgaacatgatgagcctgaccgtgctgggcctgcggatgctgttcgccaaaaccgtggccgtgaacttcctgctgaccgccaagctgttcttcctcctcaccgcccgcgccaagagaagcggatctggcgtgaagcagaccctgaatttcgacctgctgaagctggctggcgacgtggaatccaacccaggccctactagtatggactggatttggcgcatccttttccttgtcggcgctgctaccggcgcgcattccgggccccagctccagctgcaagagtctggacctggcctggtcaagcctagcgagacactgagcctgacctgtaccgtgtccggcgatagcatcagcagcggcgattactactggggctggatcagacagcctcctggcaaaggactggaatggatcggccacatctactacagcggcgtgacctactacaaccccagcctgaagtccagagtgaccatcagcgtggacaccagccggaaccagttctccctgaagctgtctagcgtgacagccgccgataccgccgtgtactactgcaccagagaggacagcagcaactggcggagtagaggccagggaacactggtcacagttagctctggatccggcggaggcggaagtggaggcggaggatctggcggcggaggctctttcgaacaagttcagctggttcagagcggagccgaagtgaagaaacctggcagcagcgtgaaggtgtcctgcaaagcaagcggcggcacctttagcacctacgccatccactgggttcgacaggcaccaggacaaggactggaatggatgggcagaatcatccccatcgagggcagagcctactacgcccagaaattccagggcagagtgaccatcaccgccgacgagtctacaagcaccgcctacatggaactgagcagcctgagaagcgaggataccgctgtgtactattgcgccagaggccggtacagctacagatattggttcgactactggggccagggcaccctggttacagtctcttctacgcgtgaggacctgaagaacgtgttcccacctgaggtggccgtgttcgagcctagcgaggccgagatcagccacacccagaaagccaccctcgtgtgcctggctaccggcttctaccccgaccatgtggaactgtcttggtgggtcaacggcaaagaggtgcacagcggcgtgtgtaccgacccccagccactgaaagaacagcccgccctgaacgacagccggtactgcctgagcagcagactgagagtgtccgccaccttctggcagaacccccggaaccacttcagatgccaggtgcagttctacggcctgagcgagaacgacgagtggacccaggacagagccaagcccgtgacccagatcgtgtctgccgaagcctggggcagagccgatgatgtgattaagatccactggcaggaaaagaagtccaacaccatcctgggcagccaggaaggcaacaccatgaagaccaacgacacctacatgaagttcagctggctgaccgtgcccgagaagtccctggacaaagaacacagatgcatcgtgcggcacgaaaacaacaagaacggcgtggaccaggaaatcatcttcccacccatcaagaccgatgtgattacaatggaccccaaggacaactgctccaaggacgccaacgataccctgctgctccagctgaccaacaccagcgcctactacatgtacttgttgctgctgctgaagtccgtggtgtacttcgccatcatcacatgctgcctgctgatggctatggtcaagcggaaggacagccgggga

SEQ ID NO: 39923 - DNA, 2166 bp, synthetic construct
  source 1..2166: mol_type = other DNA
atggccttaccagtgaccgccttgctcctgccgctggccttgctgctccacgccgccaggccggagatcgtgctgacacagtctcccgccacactgtcactgtctccaggcgaaagagccacactgagctgtagagccagccagagcgtgtcctcttacctggcctggtatcagcagaagcctggacaggctccccggctgctgatctacgatgccagcaatagagccacaggcatccccgccagattttctggctctggcagcggcaccgatttcaccctgaccataagcagcctggaacctgaggacttcgccgtgtactactgccagcagagaagcaactggcccctgacctttggacagggcaccaaggtggaaatcaaactcgaggacctgaagaacgtgttcccacctgaggtggccgtgttcgagcctagcgaggccgagatcagccacacccagaaagccaccctcgtgtgcctggctaccggcttctaccccgaccatgtggaactgtcttggtgggtcaacggcaaagaggtgcacagcggcgtgtgtaccgacccccagccactgaaagaacagcccgccctgaacgacagccggtactgcctgagcagcagactgagagtgtccgccaccttctggcagaacccccggaaccacttcagatgccaggtgcagttctacggcctgagcgagaacgacgagtggacccaggacagagccaagcccgtgacccagatcgtgtctgccgaagcctggggcagagccgatgatgtgattaagatccactggcaggaaaagaagtccaacaccatcctgggcagccaggaaggcaacaccatgaagaccaacgacacctacatgaagttcagctggctgaccgtgcccgagaagtccctggacaaagaacacagatgcatcgtgcggcacgaaaacaacaagaacggcgtggaccaggaaatcatcttcccacccatcaagaccgatgtgattacaatggaccccaaggacaactgctccaaggacgccaacgataccctgctgctccagctgaccaacaccagcgcctactacatgtacttgttgctgctgctgaagtccgtggtgtacttcgccatcatcacatgctgcctgctgcggagaaccgccttctgctgcaacggcgagaagtctagggccaagcgatctggatctggagcaacaaacttctcactactcaaacaagcaggtgacgtggaggagaatcccgggcctactagtatggactggatttggcgcatccttttccttgtcggcgctgctaccggcgcgcattccttcgaacaagttcagctggttcagagcggagccgaagtgaagaaacctggcagcagcgtgaaggtgtcctgcaaagcaagcggcggcacctttagcacctacgccatccactgggttcgacaggcaccaggacaaggactggaatggatgggcagaatcatccccatcgagggcagagcctactacgcccagaaattccagggcagagtgaccatcaccgccgacgagtctacaagcaccgcctacatggaactgagcagcctgagaagcgaggataccgctgtgtactattgcgccagaggccggtacagctacagatattggttcgactactggggccagggcaccctggttacagtctcttctacgcgtatccagaaccctgatcctgccgtgtaccagctgcgggatagcaagagcagcgacaagagcgtgtgtctgttcaccgacttcgacagccagaccaacgtgtcccagagcaaggactccgacgtgtacatcaccgataagtgcgtgctggacatgcggagcatggacttcaagagcaactccgccgtggcctggtccaacaagtccgatttcgcctgcgccaacgccttcaacaacagcattatccccgaggacacattcttcccaagccccgagagcagcgactccaccgaccacgtgaagcccaaagagacagagaacaccaagcagcccagcaagagctgccacaagcccaaggccatcgtgcacaccgagaaagtgaacatgatgagcctgaccgtgctgggcctgcggatgctgttcgccaaaaccgtggccgtgaacttcctgctgaccgccaagctgttcttcctc

SEQ ID NO: 39924 - DNA, 2178 bp, synthetic construct
  source 1..2178: mol_type = other DNA
atggccttaccagtgaccgccttgctcctgccgctggccttgctgctccacgccgccaggccggagatcgtgctgacacagtctcccgccacactgtcactgtctccaggcgaaagagccacactgagctgtagagccagccagagcgtgtcctcttacctggcctggtatcagcagaagcctggacaggctccccggctgctgatctacgatgccagcaatagagccacaggcatccccgccagattttctggctctggcagcggcaccgatttcaccctgaccataagcagcctggaacctgaggacttcgccgtgtactactgccagcagagaagcaactggcccctgacctttggacagggcaccaaggtggaaatcaaactcgagatccagaaccctgatcctgccgtgtaccagctgcgggatagcaagagcagcgacaagagcgtgtgtctgttcaccgacttcgacagccagaccaacgtgtcccagagcaaggactccgacgtgtacatcaccgataagtgcgtgctggacatgcggagcatggacttcaagagcaactccgccgtggcctggtccaacaagtccgatttcgcctgcgccaacgccttcaacaacagcattatccccgaggacacattcttcccaagccccgagagcagcgactccaccgaccacgtgaagcccaaagagacagagaacaccaagcagcccagcaagagctgccacaagcccaaggccatcgtgcacaccgagaaagtgaacatgatgagcctgaccgtgctgggcctgcggatgctgttcgccaaaaccgtggccgtgaacttcctgctgaccgccaagctgttcttcctccgcgccaagagaagcggatctggcgtgaagcagaccctgaatttcgacctgctgaagctggctggcgacgtggaatccaacccaggccctactagtatggactggatttggcgcatccttttccttgtcggcgctgctaccggcgcgcattccttcgaacaagttcagctggttcagagcggagccgaagtgaagaaacctggcagcagcgtgaaggtgtcctgcaaagcaagcggcggcacctttagcacctacgccatccactgggttcgacaggcaccaggacaaggactggaatggatgggcagaatcatccccatcgagggcagagcctactacgcccagaaattccagggcagagtgaccatcaccgccgacgagtctacaagcaccgcctacatggaactgagcagcctgagaagcgaggataccgctgtgtactattgcgccagaggccggtacagctacagatattggttcgactactggggccagggcaccctggttacagtctcttctacgcgtgaggacctgaagaacgtgttcccacctgaggtggccgtgttcgagcctagcgaggccgagatcagccacacccagaaagccaccctcgtgtgcctggctaccggcttctaccccgaccatgtggaactgtcttggtgggtcaacggcaaagaggtgcacagcggcgtgtgtaccgacccccagccactgaaagaacagcccgccctgaacgacagccggtactgcctgagcagcagactgagagtgtccgccaccttctggcagaacccccggaaccacttcagatgccaggtgcagttctacggcctgagcgagaacgacgagtggacccaggacagagccaagcccgtgacccagatcgtgtctgccgaagcctggggcagagccgatgatgtgattaagatccactggcaggaaaagaagtccaacaccatcctgggcagccaggaaggcaacaccatgaagaccaacgacacctacatgaagttcagctggctgaccgtgcccgagaagtccctggacaaagaacacagatgcatcgtgcggcacgaaaacaacaagaacggcgtggaccaggaaatcatcttcccacccatcaagaccgatgtgattacaatggaccccaaggacaactgctccaaggacgccaacgataccctgctgctccagctgaccaacaccagcgcctactacatgtacttgttgctgctgctgaagtccgtggtgtacttcgccatcatcacatgctgcctgctgcggagaaccgccttctgctgcaacggcgagaagtct

SEQ ID NO: 39925 - DNA, 2571 bp, synthetic construct
  source 1..2571: mol_type = other DNA
atggccttaccagtgaccgccttgctcctgccgctggccttgctgctccacgccgccaggccggaagtgcagctggttgaatctggcggaggactggttcagcctggcggatctctgagactgtcttgtgccgccagcggcttcagcttcagcgacttttggatgagctgggtccgacaggcccctggcaaaggacttgaatgggtcgccacaatcagccaggccggcagcgagaaggactacgtggactctgtgaagggcagattcaccatcagccgggacaacgccaagaagtccctgtacctccagatgaacagcctgagagccgaggacaccgccgtgtactattgtgcctctggcgtgtacagcttcgactacagaggccagggcaccctggtcacagtctcttctggtaccggcggaggcggatctggcggcggaggtagcggtggcggaggatctgaattcgagatcgtgctgacacagtctcccgccacactgtcactgtctccaggcgaaagagccacactgagctgtagagccagccagagcgtgtcctcttacctggcctggtatcagcagaagcctggacaggctccccggctgctgatctacgatgccagcaatagagccacaggcatccccgccagattttctggctctggcagcggcaccgatttcaccctgaccataagcagcctggaacctgaggacttcgccgtgtactactgccagcagagaagcaactggcccctgacctttggacagggcaccaaggtggaaatcaaactcgaggacctgaagaacgtgttcccacctgaggtggccgtgttcgagcctagcgaggccgagatcagccacacccagaaagccaccctcgtgtgcctggctaccggcttctaccccgaccatgtggaactgtcttggtgggtcaacggcaaagaggtgcacagcggcgtgtgtaccgacccccagccactgaaagaacagcccgccctgaacgacagccggtactgcctgagcagcagactgagagtgtccgccaccttctggcagaacccccggaaccacttcagatgccaggtgcagttctacggcctgagcgagaacgacgagtggacccaggacagagccaagcccgtgacccagatcgtgtctgccgaagcctggggcagagccgatgatgtgattaagatccactggcaggaaaagaagtccaacaccatcctgggcagccaggaaggcaacaccatgaagaccaacgacacctacatgaagttcagctggctgaccgtgcccgagaagtccctggacaaagaacacagatgcatcgtgcggcacgaaaacaacaagaacggcgtggaccaggaaatcatcttcccacccatcaagaccgatgtgattacaatggaccccaaggacaactgctccaaggacgccaacgataccctgctgctccagctgaccaacaccagcgcctactacatgtacttgttgctgctgctgaagtccgtggtgtacttcgccatcatcacatgctgcctgctgcggagaaccgccttctgctgcaacggcgagaagtctagggccaagcgatctggatctggagcaacaaacttctcactactcaaacaagcaggtgacgtggaggagaatcccgggcctactagtatggactggatttggcgcatccttttccttgtcggcgctgctaccggcgcgcattccttcgaacaagttcagctggttcagagcggagccgaagtgaagaaacctggcagcagcgtgaaggtgtcctgcaaagcaagcggcggcacctttagcacctacgccatccactgggttcgacaggcaccaggacaaggactggaatggatgggcagaatcatccccatcgagggcagagcctactacgcccagaaattccagggcagagtgaccatcaccgccgacgagtctacaagcaccgcctacatggaactgagcagcctgagaagcgaggataccgctgtgtactattgcgccagaggccggtacagctacagatattggttcgactactggggccagggcaccctggttacagtctcttctacgcgtatccagaaccctgatcctgccgtgtaccagctgcgggatagcaagagcagcgacaagagcgtgtgtctgttcaccgacttcgacagccagaccaacgtgtcccagagcaaggactccgacgtgtacatcaccgataagtgcgtgctggacatgcggagcatggacttcaagagcaactccgccgtggcctggtccaacaagtccgatttcgcctgcgccaacgccttcaacaacagcattatccccgaggacacattcttcccaagccccgagagcagcgactccaccgaccacgtgaagcccaaagagacagagaacaccaagcagcccagcaagagctgccacaagcccaaggccatcgtgcacaccgagaaagtgaacatgatgagcctgaccgtgctgggcctgcggatgctgttcgccaaaaccgtggccgtgaacttcctgctgaccgccaagctgttcttcctc

SEQ ID NO: 39926 - DNA, 2982 bp, synthetic construct
  source 1..2982: mol_type = other DNA
atggccttaccagtgaccgccttgctcctgccgctggccttgctgctccacgccgccaggccggaagtgcagctggttgaatctggcggaggactggttcagcctggcggatctctgagactgtcttgtgccgccagcggcttcagcttcagcgacttttggatgagctgggtccgacaggcccctggcaaaggacttgaatgggtcgccacaatcagccaggccggcagcgagaaggactacgtggactctgtgaagggcagattcaccatcagccgggacaacgccaagaagtccctgtacctccagatgaacagcctgagagccgaggacaccgccgtgtactattgtgcctctggcgtgtacagcttcgactacagaggccagggcaccctggtcacagtctcttctggtaccggcggaggcggatctggcggcggaggtagcggtggcggaggatctgaattcgagatcgtgctgacacagtctcccgccacactgtcactgtctccaggcgaaagagccacactgagctgtagagccagccagagcgtgtcctcttacctggcctggtatcagcagaagcctggacaggctccccggctgctgatctacgatgccagcaatagagccacaggcatccccgccagattttctggctctggcagcggcaccgatttcaccctgaccataagcagcctggaacctgaggacttcgccgtgtactactgccagcagagaagcaactggcccctgacctttggacagggcaccaaggtggaaatcaaactcgaggacctgaagaacgtgttcccacctgaggtggccgtgttcgagcctagcgaggccgagatcagccacacccagaaagccaccctcgtgtgcctggctaccggcttctaccccgaccatgtggaactgtcttggtgggtcaacggcaaagaggtgcacagcggcgtgtgtaccgacccccagccactgaaagaacagcccgccctgaacgacagccggtactgcctgagcagcagactgagagtgtccgccaccttctggcagaacccccggaaccacttcagatgccaggtgcagttctacggcctgagcgagaacgacgagtggacccaggacagagccaagcccgtgacccagatcgtgtctgccgaagcctggggcagagccgatgatgtgattaagatccactggcaggaaaagaagtccaacaccatcctgggcagccaggaaggcaacaccatgaagaccaacgacacctacatgaagttcagctggctgaccgtgcccgagaagtccctggacaaagaacacagatgcatcgtgcggcacgaaaacaacaagaacggcgtggaccaggaaatcatcttcccacccatcaagaccgatgtgattacaatggaccccaaggacaactgctccaaggacgccaacgataccctgctgctccagctgaccaacaccagcgcctactacatgtacttgttgctgctgctgaagtccgtggtgtacttcgccatcatcacatgctgcctgctgcggagaaccgccttctgctgcaacggcgagaagtctagggccaagcgatctggatctggagcaacaaacttctcactactcaaacaagcaggtgacgtggaggagaatcccgggcctactagtatggactggatttggcgcatccttttccttgtcggcgctgctaccggcgcgcattccgggccccagctccagctgcaagagtctggacctggcctggtcaagcctagcgagacactgagcctgacctgtaccgtgtccggcgatagcatcagcagcggcgattactactggggctggatcagacagcctcctggcaaaggactggaatggatcggccacatctactacagcggcgtgacctactacaaccccagcctgaagtccagagtgaccatcagcgtggacaccagccggaaccagttctccctgaagctgtctagcgtgacagccgccgataccgccgtgtactactgcaccagagaggacagcagcaactggcggagtagaggccagggaacactggtcacagttagctctggatccggcggaggcggaagtggaggcggaggatctggcggcggaggctctttcgaacaagttcagctggttcagagcggagccgaagtgaagaaacctggcagcagcgtgaaggtgtcctgcaaagcaagcggcggcacctttagcacctacgccatccactgggttcgacaggcaccaggacaaggactggaatggatgggcagaatcatccccatcgagggcagagcctactacgcccagaaattccagggcagagtgaccatcaccgccgacgagtctacaagcaccgcctacatggaactgagcagcctgagaagcgaggataccgctgtgtactattgcgccagaggccggtacagctacagatattggttcgactactggggccagggcaccctggttacagtctcttctacgcgtatccagaaccctgatcctgccgtgtaccagctgcgggatagcaagagcagcgacaagagcgtgtgtctgttcaccgacttcgacagccagaccaacgtgtcccagagcaaggactccgacgtgtacatcaccgataagtgcgtgctggacatgcggagcatggacttcaagagcaactccgccgtggcctggtccaacaagtccgatttcgcctgcgccaacgccttcaacaacagcattatccccgaggacacattcttcccaagccccgagagcagcgactccaccgaccacgtgaagcccaaagagacagagaacaccaagcagcccagcaagagctgccacaagcccaaggccatcgtgcacaccgagaaagtgaacatgatgagcctgaccgtgctgggcctgcggatgctgttcgccaaaaccgtggccgtgaacttcctgctgaccgccaagctgttcttcctc

SEQ ID NO: 39927 - DNA, 1860 bp, synthetic construct
  source 1..1860: mol_type = other DNA
atggccttaccagtgaccgccttgctcctgccgctggccttgctgctccacgccgccaggccggagatcgtgctgacacagtctcccgccacactgtcactgtctccaggcgaaagagccacactgagctgtagagccagccagagcgtgtcctcttacctggcctggtatcagcagaagcctggacaggctccccggctgctgatctacgatgccagcaatagagccacaggcatccccgccagattttctggctctggcagcggcaccgatttcaccctgaccataagcagcctggaacctgaggacttcgccgtgtactactgccagcagagaagcaactggcccctgacctttggacagggcaccaaggtggaaatcaaactcgaggacctgaagaacgtgttcccacctgaggtggccgtgttcgagcctagcgaggccgagatcagccacacccagaaagccaccctcgtgtgcctggctaccggcttctaccccgaccatgtggaactgtcttggtgggtcaacggcaaagaggtgcacagcggcgtgtctaccgacccccagccactgaaagaacagcccgccctgaacgacagccggtactgcctgagcagcagactgagagtgtccgccaccttctggcagaacccccggaaccacttcagatgccaggtgcagttctacggcctgagcgagaacgacgagtggacccaggacagagccaagcccgtgacccagatcgtgtctgccgaagcctggggcagagccgattgcgacgtgaagctggtggaaaagagcttcgagacagacaccaacctgaacttccagaacctgagcgtgatcggcttcagaatcctgctgctgaaagtggccggctttaacctgctgatgaccctgcggctgtggtccagcagggccaagcgatctggatctggagcaacaaacttctcactactcaaacaagcaggtgacgtggaggagaatcccgggcctactagtatggactggatttggcgcatccttttccttgtcggcgctgctaccggcgcgcattccttcgaacaagttcagctggttcagagcggagccgaagtgaagaaacctggcagcagcgtgaaggtgtcctgcaaagcaagcggcggcacctttagcacctacgccatccactgggttcgacaggcaccaggacaaggactggaatggatgggcagaatcatccccatcgagggcagagcctactacgcccagaaattccagggcagagtgaccatcaccgccgacgagtctacaagcaccgcctacatggaactgagcagcctgagaagcgaggataccgctgtgtactattgcgccagaggccggtacagctacagatattggttcgactactggggccagggcaccctggttacagtctcttctacgcgtatccagaaccctgatcctgccgtgtaccagctgcgggatagcaagagcagcgacaagagcgtgtgtctgttcaccgacttcgacagccagaccaacgtgtcccagagcaaggactccgacgtgtacatcaccgataagaccgtgctggacatgcggagcatggacttcaagagcaactccgccgtggcctggtccaacaagtccgatttcgcctgcgccaacgccttcaacaacagcattatccccgaggacacattcttcccaagccccgagagcagctgcggctttaccagcgagagctaccagcagggcgtgctgagcgccaccatcctgtacgagatcctgctgggcaaggccaccctgtacgccgtgctggtgtctgccctggtgctgatggctatggtcaagcggaaggacagccgggga

SEQ ID NO: 39928 - DNA, 1860 bp, synthetic construct
  source 1..1860: mol_type = other DNA
atggccttaccagtgaccgccttgctcctgccgctggccttgctgctccacgccgccaggccggagatcgtgctgacacagtctcccgccacactgtcactgtctccaggcgaaagagccacactgagctgtagagccagccagagcgtgtcctcttacctggcctggtatcagcagaagcctggacaggctccccggctgctgatctacgatgccagcaatagagccacaggcatccccgccagattttctggctctggcagcggcaccgatttcaccctgaccataagcagcctggaacctgaggacttcgccgtgtactactgccagcagagaagcaactggcccctgacctttggacagggcaccaaggtggaaatcaaactcgaggacctgaagaacgtgttcccacctgaggtggccgtgttcgagcctagcgaggccgagatcagccacacccagaaagccaccctcgtgtgcctggctaccggcttctaccccgaccatgtggaactgtcttggtgggtcaacggcaaagaggtgcacagcggcgtgtctaccgacccccagccactgaaagaacagcccgccctgaacgacagccggtactgcctgagcagcagactgagagtgtccgccaccttctggcagaacccccggaaccacttcagatgccaggtgcagttctacggcctgagcgagaacgacgagtggacccaggacagagccaagcccgtgacccagatcgtgtctgccgaagcctggggcagagccgattgcggctttaccagcgagagctaccagcagggcgtgctgagcgccaccaacctgagcgtgatcggcttcagaatcctgctgctgaaagtggccggctttaacctgctgatgaccctgcggctgtggtccagcagggccaagcgatctggatctggagcaacaaacttctcactactcaaacaagcaggtgacgtggaggagaatcccgggcctactagtatggactggatttggcgcatccttttccttgtcggcgctgctaccggcgcgcattccttcgaacaagttcagctggttcagagcggagccgaagtgaagaaacctggcagcagcgtgaaggtgtcctgcaaagcaagcggcggcacctttagcacctacgccatccactgggttcgacaggcaccaggacaaggactggaatggatgggcagaatcatccccatcgagggcagagcctactacgcccagaaattccagggcagagtgaccatcaccgccgacgagtctacaagcaccgcctacatggaactgagcagcctgagaagcgaggataccgctgtgtactattgcgccagaggccggtacagctacagatattggttcgactactggggccagggcaccctggttacagtctcttctacgcgtatccagaaccctgatcctgccgtgtaccagctgcgggatagcaagagcagcgacaagagcgtgtgtctgttcaccgacttcgacagccagaccaacgtgtcccagagcaaggactccgacgtgtacatcaccgataagaccgtgctggacatgcggagcatggacttcaagagcaactccgccgtggcctggtccaacaagtccgatttcgcctgcgccaacgccttcaacaacagcattatccccgaggacacattcttcccaagccccgagagcagctgcgacgtgaagctggtggaaaagagcttcgagacagacaccaacctgaacttccagatcctgtacgagatcctgctgggcaaggccaccctgtacgccgtgctggtgtctgccctggtgctgatggctatggtcaagcggaaggacagccgggga

SEQ ID NO: 39929 - DNA, 2172 bp, synthetic construct
  source 1..2172: mol_type = other DNA
atggccttaccagtgaccgccttgctcctgccgctggccttgctgctccacgccgccaggccggagatcgtgctgacacagtctcccgccacactgtcactgtctccaggcgaaagagccacactgagctgtagagccagccagagcgtgtcctcttacctggcctggtatcagcagaagcctggacaggctccccggctgctgatctacgatgccagcaatagagccacaggcatccccgccagattttctggctctggcagcggcaccgatttcaccctgaccataagcagcctggaacctgaggacttcgccgtgtactactgccagcagagaagcaactggcccctgacctttggacagggcaccaaggtggaaatcaaactcgaggacctgaagaacgtgttcccacctgaggtggccgtgttcgagcctagcgaggccgagatcagccacacccagaaagccaccctcgtgtgcctggctaccggcttctaccccgaccatgtggaactgtcttggtgggtcaacggcaaagaggtgcacagcggcgtgtctaccgacccccagccactgaaagaacagcccgccctgaacgacagccggtactgcctgagcagcagactgagagtgtccgccaccttctggcagaacccccggaaccacttcagatgccaggtgcagttctacggcctgagcgagaacgacgagtggacccaggacagagccaagcccgtgacccagatcgtgtctgccgaagcctggggcagagccgatgatgtgattaagatccactggcaggaaaagaagtccaacaccatcctgggcagccaggaaggcaacaccatgaagaccaacgacacctacatgaagttcagctggctgaccgtgcccgagaagtccctggacaaagaacacagatgcatcgtgcggcacgaaaacaacaagaacggcgtggaccaggaaatcatcttcccacccatcaagaccgatgtgattacaatggaccccaaggacaactgctccaaggacgccaacgataccctgctgctccagctgaccaacaccagcgcctactacatgtacttgttgctgctgctgaagtccgtggtgtacttcgccatcatcacatgctgcctgctgatggctatggtcaagcggaaggacagccggggaagggccaagcgatctggatctggagcaacaaacttctcactactcaaacaagcaggtgacgtggaggagaatcccgggcctactagtatggactggatttggcgcatccttttccttgtcggcgctgctaccggcgcgcattccttcgaacaagttcagctggttcagagcggagccgaagtgaagaaacctggcagcagcgtgaaggtgtcctgcaaagcaagcggcggcacctttagcacctacgccatccactgggttcgacaggcaccaggacaaggactggaatggatgggcagaatcatccccatcgagggcagagcctactacgcccagaaattccagggcagagtgaccatcaccgccgacgagtctacaagcaccgcctacatggaactgagcagcctgagaagcgaggataccgctgtgtactattgcgccagaggccggtacagctacagatattggttcgactactggggccagggcaccctggttacagtctcttctacgcgtatccagaaccctgatcctgccgtgtaccagctgcgggatagcaagagcagcgacaagagcgtgtgtctgttcaccgacttcgacagccagaccaacgtgtcccagagcaaggactccgacgtgtacatcaccgataagaccgtgctggacatgcggagcatggacttcaagagcaactccgccgtggcctggtccaacaagtccgatttcgcctgcgccaacgccttcaacaacagcattatccccgaggacacattcttcccaagccccgagagcagcgactccaccgaccacgtgaagcccaaagagacagagaacaccaagcagcccagcaagagctgccacaagcccaaggccatcgtgcacaccgagaaagtgaacatgatgagcctgaccgtgctgggcctgcggatgctgttcgccaaaaccgtggccgtgaacttcctgctgaccgccaagctgttcttcctcctcaccgcc

SEQ ID NO: 39930 - DNA, 2166 bp, synthetic construct
  source 1..2166: mol_type = other DNA
atggccttaccagtgaccgccttgctcctgccgctggccttgctgctccacgccgccaggccggagatcgtgctgacacagtctcccgccacactgtcactgtctccaggcgaaagagccacactgagctgtagagccagccagagcgtgtcctcttacctggcctggtatcagcagaagcctggacaggctccccggctgctgatctacgatgccagcaatagagccacaggcatccccgccagattttctggctctggcagcggcaccgatttcaccctgaccataagcagcctggaacctgaggacttcgccgtgtactactgccagcagagaagcaactggcccctgacctttggacagggcaccaaggtggaaatcaaactcgaggacctgaagaacgtgttcccacctgaggtggccgtgttcgagcctagcgaggccgagatcagccacacccagaaagccaccctcgtgtgcctggctaccggcttctaccccgaccatgtggaactgtcttggtgggtcaacggcaaagaggtgcacagcggcgtgtctaccgacccccagccactgaaagaacagcccgccctgaacgacagccggtactgcctgagcagcagactgagagtgtccgccaccttctggcagaacccccggaaccacttcagatgccaggtgcagttctacggcctgagcgagaacgacgagtggacccaggacagagccaagcccgtgacccagatcgtgtctgccgaagcctggggcagagccgatgatgtgattaagatccactggcaggaaaagaagtccaacaccatcctgggcagccaggaaggcaacaccatgaagaccaacgacacctacatgaagttcagctggctgaccgtgcccgagaagtccctggacaaagaacacagatgcatcgtgcggcacgaaaacaacaagaacggcgtggaccaggaaatcatcttcccacccatcaagaccgatgtgattacaatggaccccaaggacaactgctccaaggacgccaacgataccctgctgctccagctgaccaacaccagcgcctactacatgtacttgttgctgctgctgaagtccgtggtgtacttcgccatcatcacatgctgcctgctgcggagaaccgccttctgctgcaacggcgagaagtctagggccaagcgatctggatctggagcaacaaacttctcactactcaaacaagcaggtgacgtggaggagaatcccgggcctactagtatggactggatttggcgcatccttttccttgtcggcgctgctaccggcgcgcattccttcgaacaagttcagctggttcagagcggagccgaagtgaagaaacctggcagcagcgtgaaggtgtcctgcaaagcaagcggcggcacctttagcacctacgccatccactgggttcgacaggcaccaggacaaggactggaatggatgggcagaatcatccccatcgagggcagagcctactacgcccagaaattccagggcagagtgaccatcaccgccgacgagtctacaagcaccgcctacatggaactgagcagcctgagaagcgaggataccgctgtgtactattgcgccagaggccggtacagctacagatattggttcgactactggggccagggcaccctggttacagtctcttctacgcgtatccagaaccctgatcctgccgtgtaccagctgcgggatagcaagagcagcgacaagagcgtgtgtctgttcaccgacttcgacagccagaccaacgtgtcccagagcaaggactccgacgtgtacatcaccgataagaccgtgctggacatgcggagcatggacttcaagagcaactccgccgtggcctggtccaacaagtccgatttcgcctgcgccaacgccttcaacaacagcattatccccgaggacacattcttcccaagccccgagagcagcgactccaccgaccacgtgaagcccaaagagacagagaacaccaagcagcccagcaagagctgccacaagcccaaggccatcgtgcacaccgagaaagtgaacatgatgagcctgaccgtgctgggcctgcggatgctgttcgccaaaaccgtggccgtgaacttcctgctgaccgccaagctgttcttcctc

SEQ ID NO: 39931 - DNA, 2598 bp, synthetic construct
  source 1..2598: mol_type = other DNA
atggccttaccagtgaccgccttgctcctgccgctggccttgctgctccacgccgccaggccgctcgaggaggacctgaagaacgtgttcccacctgaggtggccgtgttcgagcctagcgaggccgagatcagccacacccagaaagccaccctcgtgtgcctggctaccggcttctaccccgaccatgtggaactgtcttggtgggtcaacggcaaagaggtgcacagcggcgtgtgtaccgacccccagccactgaaagaacagcccgccctgaacgacagccggtactgcctgagcagcagactgagagtgtccgccaccttctggcagaacccccggaaccacttcagatgccaggtgcagttctacggcctgagcgagaacgacgagtggacccaggacagagccaagcccgtgacccagatcgtgtctgccgaagcctggggcagagccgattgcggctttaccagcgagagctaccagcagggcgtgctgagcgccaccaacctgagcgtgatcggcttcagaatcctgctgctgaaagtggccggctttaacctgctgatgaccctgcggctgtggtccagcagggccaagcgatctggatctggagcaacaaacttctcactactcaaacaagcaggtgacgtggaggagaatcccgggcctactagcatggccttaccagtgaccgccttgctcctgccgctggccttgctgctccacgccgccaggccggagatcgtgctgacacagtctcccgccacactgtcactgtctccaggcgaaagagccacactgagctgtagagccagccagagcgtgtcctcttacctggcctggtatcagcagaagcctggacaggctccccggctgctgatctacgatgccagcaatagagccacaggcatccccgccagattttctggctctggcagcggcaccgatttcaccctgaccataagcagcctggaacctgaggacttcgccgtgtactactgccagcagagaagcaactggcccctgacctttggacagggcaccaaggtggaaatcaaaggcggaggcggaagtggaggcggaggatctggcggcggaggctctcaagttcagctggttcagagcggagccgaagtgaagaaacctggcagcagcgtgaaggtgtcctgcaaagcaagcggcggcacctttagcacctacgccatccactgggttcgacaggcaccaggacaaggactggaatggatgggcagaatcatccccatcgagggcagagcctactacgcccagaaattccagggcagagtgaccatcaccgccgacgagtctacaagcaccgcctacatggaactgagcagcctgagaagcgaggataccgctgtgtactattgcgccagaggccggtacagctacagatattggttcgactactggggccagggcaccctggttacagtctcttctacgcgtatccagaaccctgatcctgccgtgtaccagctgcgggatagcaagagcagcgacaagagcgtgtgtctgttcaccgacttcgacagccagaccaacgtgtcccagagcaaggactccgacgtgtacatcaccgataagtgcgtgctggacatgcggagcatggacttcaagagcaactccgccgtggcctggtccaacaagtccgatttcgcctgcgccaacgccttcaacaacagcattatccccgaggacacattcttcccaagccccgagagcagctgcgacgtgaagctggtggaaaagagcttcgagacagacaccaacctgaacttccagatcctgtacgaggtgatcggcttcagaatcctgctgctgaaagtggccggctttaacctgctgatgaccctgcggctgtggtccagccgcgccaagagaagcggatctggcgtgaagcagaccctgaatttcgacctgctgaagctggctggcgacgtggaatccaacccaggcccttctagaggccatatgaccgagtacaagcccacggtgcgcctcgccacccgcgacgacgtccccagggccgtacgcaccctcgccgccgcgttcgccgactaccccgccacgcgccacaccgtcgatccggaccgccacatcgagcgggtcaccgagctgcaagaactcttcctcacgcgcgtcgggctcgacatcggcaaggtgtgggtcgcggacgacggcgccgcggtggcggtctggaccacgccggagagcgtcgaagcgggggcggtgttcgccgagatcggcccgcgcatggccgagttgagcggttcccggctggccgcgcagcaacagatggaaggcctcctggcgccgcaccggcccaaggagcccgcgtggttcctggccaccgtcggcgtctcgcccgaccaccagggcaagggtctgggcagcgccgtcgtgctccccggagtggaggcggccgagcgcgccggggtgcccgccttcctggagacctccgcgccccgcaacctccccttctacgagcggctcggcttcaccgtcaccgccgacgtcgaggtgcccgaaggaccgcgcacctggtgcatgacccgcaagcccggtgcctga

SEQ ID NO: 39932 - DNA, 2598 bp, synthetic construct
  source 1..2598: mol_type = other DNA
atggccttaccagtgaccgccttgctcctgccgctggccttgctgctccacgccgccaggccgctcgagatccagaaccctgatcctgccgtgtaccagctgcgggatagcaagagcagcgacaagagcgtgtgtctgttcaccgacttcgacagccagaccaacgtgtcccagagcaaggactccgacgtgtacatcaccgataagtgcgtgctggacatgcggagcatggacttcaagagcaactccgccgtggcctggtccaacaagtccgatttcgcctgcgccaacgccttcaacaacagcattatccccgaggacacattcttcccaagccccgagagcagctgcgacgtgaagctggtggaaaagagcttcgagacagacaccaacctgaacttccagatcctgtacgaggtgatcggcttcagaatcctgctgctgaaagtggccggctttaacctgctgatgaccctgcggctgtggtccagcagggccaagcgatctggatctggagcaacaaacttctcactactcaaacaagcaggtgacgtggaggagaatcccgggcctactagcatggccttaccagtgaccgccttgctcctgccgctggccttgctgctccacgccgccaggccggagatcgtgctgacacagtctcccgccacactgtcactgtctccaggcgaaagagccacactgagctgtagagccagccagagcgtgtcctcttacctggcctggtatcagcagaagcctggacaggctccccggctgctgatctacgatgccagcaatagagccacaggcatccccgccagattttctggctctggcagcggcaccgatttcaccctgaccataagcagcctggaacctgaggacttcgccgtgtactactgccagcagagaagcaactggcccctgacctttggacagggcaccaaggtggaaatcaaaggcggaggcggaagtggaggcggaggatctggcggcggaggctctcaagttcagctggttcagagcggagccgaagtgaagaaacctggcagcagcgtgaaggtgtcctgcaaagcaagcggcggcacctttagcacctacgccatccactgggttcgacaggcaccaggacaaggactggaatggatgggcagaatcatccccatcgagggcagagcctactacgcccagaaattccagggcagagtgaccatcaccgccgacgagtctacaagcaccgcctacatggaactgagcagcctgagaagcgaggataccgctgtgtactattgcgccagaggccggtacagctacagatattggttcgactactggggccagggcaccctggttacagtctcttctacgcgtgaggacctgaagaacgtgttcccacctgaggtggccgtgttcgagcctagcgaggccgagatcagccacacccagaaagccaccctcgtgtgcctggctaccggcttctaccccgaccatgtggaactgtcttggtgggtcaacggcaaagaggtgcacagcggcgtgtgtaccgacccccagccactgaaagaacagcccgccctgaacgacagccggtactgcctgagcagcagactgagagtgtccgccaccttctggcagaacccccggaaccacttcagatgccaggtgcagttctacggcctgagcgagaacgacgagtggacccaggacagagccaagcccgtgacccagatcgtgtctgccgaagcctggggcagagccgattgcggctttaccagcgagagctaccagcagggcgtgctgagcgccaccaacctgagcgtgatcggcttcagaatcctgctgctgaaagtggccggctttaacctgctgatgaccctgcggctgtggtccagccgcgccaagagaagcggatctggcgtgaagcagaccctgaatttcgacctgctgaagctggctggcgacgtggaatccaacccaggcccttctagaggccatatgaccgagtacaagcccacggtgcgcctcgccacccgcgacgacgtccccagggccgtacgcaccctcgccgccgcgttcgccgactaccccgccacgcgccacaccgtcgatccggaccgccacatcgagcgggtcaccgagctgcaagaactcttcctcacgcgcgtcgggctcgacatcggcaaggtgtgggtcgcggacgacggcgccgcggtggcggtctggaccacgccggagagcgtcgaagcgggggcggtgttcgccgagatcggcccgcgcatggccgagttgagcggttcccggctggccgcgcagcaacagatggaaggcctcctggcgccgcaccggcccaaggagcccgcgtggttcctggccaccgtcggcgtctcgcccgaccaccagggcaagggtctgggcagcgccgtcgtgctccccggagtggaggcggccgagcgcgccggggtgcccgccttcctggagacctccgcgccccgcaacctccccttctacgagcggctcggcttcaccgtcaccgccgacgtcgaggtgcccgaaggaccgcgcacctggtgcatgacccgcaagcccggtgcctga

SEQ ID NO: 39933 - DNA, 2598 bp, synthetic construct; identical to SEQ ID NO: 39931
  source 1..2598: mol_type = other DNA

SEQ ID NO: 39934 - DNA, 2922 bp, synthetic construct
  source 1..2922: mol_type = other DNA
atggccttaccagtgaccgccttgctcctgccgctggccttgctgctccacgccgccaggccgctcgaggaggacctgaagaacgtgttcccacctgaggtggccgtgttcgagcctagcgaggccgagatcagccacacccagaaagccaccctcgtgtgcctggctaccggcttctaccccgaccatgtggaactgtcttggtgggtcaacggcaaagaggtgcacagcggcgtgtctaccgacccccagccactgaaagaacagcccgccctgaacgacagccggtactgcctgagcagcagactgagagtgtccgccaccttctggcagaacccccggaaccacttcagatgccaggtgcagttctacggcctgagcgagaacgacgagtggacccaggacagagccaagcccgtgacccagatcgtgtctgccgaagcctggggcagagccgatgatgtgattaagatccactggcaggaaaagaagtccaacaccatcctgggcagccaggaaggcaacaccatgaagaccaacgacacctacatgaagttcagctggctgaccgtgcccgagaagtccctggacaaagaacacagatgcatcgtgcggcacgaaaacaacaagaacggcgtggaccaggaaatcatcttcccacccatcaagaccgatgtgattacaatggaccccaaggacaactgctccaaggacgccaacgataccctgctgctccagctgaccaacaccagcgcctactacatgtacttgttgctgctgctgaagtccgtggtgtacttcgccatcatcacatgctgcctgctgatggctatggtcaagcggaaggacagccggggaagggccaagcgatctggatctggagcaacaaacttctcactactcaaacaagcaggtgacgtggaggagaatcccgggcctactagcatggccttaccagtgaccgccttgctcctgccgctggccttgctgctccacgccgccaggccggagatcgtgctgacacagtctcccgccacactgtcactgtctccaggcgaaagagccacactgagctgtagagccagccagagcgtgtcctcttacctggcctggtatcagcagaagcctggacaggctccccggctgctgatctacgatgccagcaatagagccacaggcatccccgccagattttctggctctggcagcggcaccgatttcaccctgaccataagcagcctggaacctgaggacttcgccgtgtactactgccagcagagaagcaactggcccctgacctttggacagggcaccaaggtggaaatcaaaggcggaggcggaagtggaggcggaggatctggcggcggaggctctcaagttcagctggttcagagcggagccgaagtgaagaaacctggcagcagcgtgaaggtgtcctgcaaagcaagcggcggcacctttagcacctacgccatccactgggttcgacaggcaccaggacaaggactggaatggatgggcagaatcatccccatcgagggcagagcctactacgcccagaaattccagggcagagtgaccatcaccgccgacgagtctacaagcaccgcctacatggaactgagcagcctgagaagcgaggataccgctgtgtactattgcgccagaggccggtacagctacagatattggttcgactactggggccagggcaccctggttacagtctcttctacgcgtatccagaaccctgatcctgccgtgtaccagctgcgggatagcaagagcagcgacaagagcgtgtgtctgttcaccgacttcgacagccagaccaacgtgtcccagagcaaggactccgacgtgtacatcaccgataagaccgtgctggacatgcggagcatggacttcaagagcaactccgccgtggcctggtccaacaagtccgatttcgcctgcgccaacgccttcaacaacagcattatccccgaggacacattcttcccaagccccgagagcagcgactccaccgaccacgtgaagcccaaagagacagagaacaccaagcagcccagcaagagctgccacaagcccaaggccatcgtgcacaccgagaaagtgaacatgatgagcctgaccgtgctgggcctgcggatgctgttcgccaaaaccgtggccgtgaacttcctgctgaccgccaagctgttcttcctcctcaccgcccgcgccaagagaagcggatctggcgtgaagcagaccctgaatttcgacctgctgaagctggctggcgacgtggaatccaacccaggcccttctagaggccatatgaccgagtacaagcccacggtgcgcctcgccacccgcgacgacgtccccagggccgtacgcaccctcgccgccgcgttcgccgactaccccgccacgcgccacaccgtcgatccggaccgccacatcgagcgggtcaccgagctgcaagaactcttcctcacgcgcgtcgggctcgacatcggcaaggtgtgggtcgcggacgacggcgccgcggtggcggtctggaccacgccggagagcgtcgaagcgggggcggtgttcgccgagatcggcccgcgcatggccgagttgagcggttcccggctggccgcgcagcaacagatggaaggcctcctggcgccgcaccggcccaaggagcccgcgtggttcctggccaccgtcggcgtctcgcccgaccaccagggcaagggtctgggcagcgccgtcgtgctccccggagtggaggcggccgagcgcgccggggtgcccgccttcctggagacctccgcgccccgcaacctccccttctacgagcggctcggcttcaccgtcaccgccgacgtcgaggtgcccgaaggaccgcgcacctggtgcatgacccgcaagcccggtgcctga

SEQ ID NO: 39935 - DNA, 2922 bp, synthetic construct
  source 1..2922: mol_type = other DNA
atggccttaccagtgaccgccttgctcctgccgctggccttgctgctccacgccgccaggccgctcgagatccagaaccctgatcctgccgtgtaccagctgcgggatagcaagagcagcgacaagagcgtgtgtctgttcaccgacttcgacagccagaccaacgtgtcccagagcaaggactccgacgtgtacatcaccgataagaccgtgctggacatgcggagcatggacttcaagagcaactccgccgtggcctggtccaacaagtccgatttcgcctgcgccaacgccttcaacaacagcattatccccgaggacacattcttcccaagccccgagagcagcgactccaccgaccacgtgaagcccaaagagacagagaacaccaagcagcccagcaagagctgccacaagcccaaggccatcgtgcacaccgagaaagtgaacatgatgagcctgaccgtgctgggcctgcggatgctgttcgccaaaaccgtggccgtgaacttcctgctgaccgccaagctgttcttcctcctcaccgccagggccaagcgatctggatctggagcaacaaacttctcactactcaaacaagcaggtgacgtggaggagaatcccgggcctactagcatggccttaccagtgaccgccttgctcctgccgctggccttgctgctccacgccgccaggccggagatcgtgctgacacagtctcccgccacactgtcactgtctccaggcgaaagagccacactgagctgtagagccagccagagcgtgtcctcttacctggcctggtatcagcagaagcctggacaggctccccggctgctgatctacgatgccagcaatagagccacaggcatccccgccagattttctggctctggcagcggcaccgatttcaccctgaccataagcagcctggaacctgaggacttcgccgtgtactactgccagcagagaagcaactggcccctgacctttggacagggcaccaaggtggaaatcaaaggcggaggcggaagtggaggcggaggatctggcggcggaggctctcaagttcagctggttcagagcggagccgaagtgaagaaacctggcagcagcgtgaaggtgtcctgcaaagcaagcggcggcacctttagcacctacgccatccactgggttcgacaggcaccaggacaaggactggaatggatgggcagaatcatccccatcgagggcagagcctactacgcccagaaattccagggcagagtgaccatcaccgccgacgagtctacaagcaccgcctacatggaactgagcagcctgagaagcgaggataccgctgtgtactattgcgccagaggccggtacagctacagatattggttcgactactggggccagggcaccctggttacagtctcttctacgcgtgaggacctgaagaacgtgttcccacctgaggtggccgtgttcgagcctagcgaggccgagatcagccacacccagaaagccaccctcgtgtgcctggctaccggcttctaccccgaccatgtggaactgtcttggtgggtcaacggcaaagaggtgcacagcggcgtgtctaccgacccccagccactgaaagaacagcccgccctgaacgacagccggtactgcctgagcagcagactgagagtgtccgccaccttctggcagaacccccggaaccacttcagatgccaggtgcagttctacggcctgagcgagaacgacgagtggacccaggacagagccaagcccgtgacccagatcgtgtctgccgaagcctggggcagagccgatgatgtgattaagatccactggcaggaaaagaagtccaacaccatcctgggcagccaggaaggcaacaccatgaagaccaacgacacctacatgaagttcagctggctgaccgtgcccgagaagtccctggacaaagaacacagatgcatcgtgcggcacgaaaacaacaagaacggcgtggaccaggaaatcatcttcccacccatcaagaccgatgtgattacaatggaccccaaggacaactgctccaaggacgccaacgataccctgctgctccagctgaccaacaccagcgcctactacatgtacttgttgctgctgctgaagtccgtggtgtacttcgccatcatcacatgctgcctgctgatggctatggtcaagcggaaggacagccggggacgcgccaagagaagcggatctggcgtgaagcagaccctgaatttcgacctgctgaagctggctggcgacgtggaatccaacccaggcccttctagaggccatatgaccgagtacaagcccacggtgcgcctcgccacccgcgacgacgtccccagggccgtacgcaccctcgccgccgcgttcgccgactaccccgccacgcgccacaccgtcgatccggaccgccacatcgagcgggtcaccgagctgcaagaactcttcctcacgcgcgtcgggctcgacatcggcaaggtgtgggtcgcggacgacggcgccgcggtggcggtctggaccacgccggagagcgtcgaagcgggggcggtgttcgccgagatcggcccgcgcatggccgagttgagcggttcccggctggccgcgcagcaacagatggaaggcctcctggcgccgcaccggcccaaggagcccgcgtggttcctggccaccgtcggcgtctcgcccgaccaccagggcaagggtctgggcagcgccgtcgtgctccccggagtggaggcggccgagcgcgccggggtgcccgccttcctggagacctccgcgccccgcaacctccccttctacgagcggctcggcttcaccgtcaccgccgacgtcgaggtgcccgaaggaccgcgcacctggtgcatgacccgcaagcccggtgcctga

SEQ ID NO: 39936 - DNA, 2916 bp, synthetic construct
  source 1..2916: mol_type = other DNA
atggccttaccagtgaccgccttgctcctgccgctggccttgctgctccacgccgccaggccgctcgaggaggacctgaagaacgtgttcccacctgaggtggccgtgttcgagcctagcgaggccgagatcagccacacccagaaagccaccctcgtgtgcctggctaccggcttctaccccgaccatgtggaactgtcttggtgggtcaacggcaaagaggtgcacagcggcgtgtgtaccgacccccagccactgaaagaacagcccgccctgaacgacagccggtactgcctgagcagcagactgagagtgtccgccaccttctggcagaacccccggaaccacttcagatgccaggtgcagttctacggcctgagcgagaacgacgagtggacccaggacagagccaagcccgtgacccagatcgtgtctgccgaagcctggggcagagccgatgatgtgattaagatccactggcaggaaaagaagtccaacaccatcctgggcagccaggaaggcaacaccatgaagaccaacgacacctacatgaagttcagctggctgaccgtgcccgagaagtccctggacaaagaacacagatgcatcgtgcggcacgaaaacaacaagaacggcgtggaccaggaaatcatcttcccacccatcaagaccgatgtgattacaatggaccccaaggacaactgctccaaggacgccaacgataccctgctgctccagctgaccaacaccagcgcctactacatgtacttgttgctgctgctgaagtccgtggtgtacttcgccatcatcacatgctgcctgctgcggagaaccgccttctgctgcaacggcgagaagtctagggccaagcgatctggatctggagcaacaaacttctcactactcaaacaagcaggtgacgtggaggagaatcccgggcctactagcatggccttaccagtgaccgccttgctcctgccgctggccttgctgctccacgccgccaggccggagatcgtgctgacacagtctcccgccacactgtcactgtctccaggcgaaagagccacactgagctgtagagccagccagagcgtgtcctcttacctggcctggtatcagcagaagcctggacaggctccccggctgctgatctacgatgccagcaatagagccacaggcatccccgccagattttctggctctggcagcggcaccgatttcaccctgaccataagcagcctggaacctgaggacttcgccgtgtactactgccagcagagaagcaactggcccctgacctttggacagggcaccaaggtggaaatcaaaggcggaggcggaagtggaggcggaggatctggcggcggaggctctcaagttcagctggttcagagcggagccgaagtgaagaaacctggcagcagcgtgaaggtgtcctgcaaagcaagcggcggcacctttagcacctacgccatccactgggttcgacaggcaccaggacaaggactggaatggatgggcagaatcatccccatcgagggcagagcctactacgcccagaaattccagggcagagtgaccatcaccgccgacgagtctacaagcaccgcctacatggaactgagcagcctgagaagcgaggataccgctgtgtactattgcgccagaggccggtacagctacagatattggttcgactactggggccagggcaccctggttacagtctcttctacgcgtatccagaaccctgatcctgccgtgtaccagctgcgggatagcaagagcagcgacaagagcgtgtgtctgttcaccgacttcgacagccagaccaacgtgtcccagagcaaggactccgacgtgtacatcaccgataagtgcgtgctggacatgcggagcatggacttcaagagcaactccgccgtggcctggtccaacaagtccgatttcgcctgcgccaacgccttcaacaacagcattatccccgaggacacattcttcccaagccccgagagcagcgactccaccgaccacgtgaagcccaaagagacagagaacaccaagcagcccagcaagagctgccacaagcccaaggccatcgtgcacaccgagaaagtgaacatgatgagcctgaccgtgctgggcctgcggatgctgttcgccaaaaccgtggccgtgaacttcctgctgaccgccaagctgttcttcctccgcgccaagagaagcggatctggcgtgaagcagaccctgaatttcgacctgctgaagctggctggcgacgtggaatccaacccaggcccttctagaggccatatgaccgagtacaagcccacggtgcgcctcgccacccgcgacgacgtccccagggccgtacgcaccctcgccgccgcgttcgccgactaccccgccacgcgccacaccgtcgatccggaccgccacatcgagcgggtcaccgagctgcaagaactcttcctcacgcgcgtcgggctcgacatcggcaaggtgtgggtcgcggacgacggcgccgcggtggcggtctggaccacgccggagagcgtcgaagcgggggcggtgttcgccgagatcggcccgcgcatggccgagttgagcggttcccggctggccgcgcagcaacagatggaaggcctcctggcgccgcaccggcccaaggagcccgcgtggttcctggccaccgtcggcgtctcgcccgaccaccagggcaagggtctgggcagcgccgtcgtgctccccggagtggaggcggccgagcgcgccggggtgcccgccttcctggagacctccgcgccccgcaacctccccttctacgagcggctcggcttcaccgtcaccgccgacgtcgaggtgcccgaaggaccgcgcacctggtgcatgacccgcaagcccggtgcctga

SEQ ID NO: 39937 - DNA, 2916 bp, synthetic construct
  source 1..2916: mol_type = other DNA
atggccttaccagtgaccgccttgctcctgccgctggccttgctgctccacgccgccaggccgctcgagatccagaaccctgatcctgccgtgtaccagctgcgggatagcaagagcagcgacaagagcgtgtgtctgttcaccgacttcgacagccagaccaacgtgtcccagagcaaggactccgacgtgtacatcaccgataagtgcgtgctggacatgcggagcatggacttcaagagcaactccgccgtggcctggtccaacaagtccgatttcgcctgcgccaacgccttcaacaacagcattatccccgaggacacattcttcccaagccccgagagcagcgactccaccgaccacgtgaagcccaaagagacagagaacaccaagcagcccagcaagagctgccacaagcccaaggccatcgtgcacaccgagaaagtgaacatgatgagcctgaccgtgctgggcctgcggatgctgttcgccaaaaccgtggccgtgaacttcctgctgaccgccaagctgttcttcctcagggccaagcgatctggatctggagcaacaaacttctcactactcaaacaagcaggtgacgtggaggagaatcccgggcctactagcatggccttaccagtgaccgccttgctcctgccgctggccttgctgctccacgccgccaggccggagatcgtgctgacacagtctcccgccacactgtcactgtctccaggcgaaagagccacactgagctgtagagccagccagagcgtgtcctcttacctggcctggtatcagcagaagcctggacaggctccccggctgctgatctacgatgccagcaatagagccacaggcatccccgccagattttctggctctggcagcggcaccgatttcaccctgaccataagcagcctggaacctgaggacttcgccgtgtactactgccagcagagaagcaactggcccctgacctttggacagggcaccaaggtggaaatcaaaggcggaggcggaagtggaggcggaggatctggcggcggaggctctcaagttcagctggttcagagcggagccgaagtgaagaaacctggcagcagcgtgaaggtgtcctgcaaagcaagcggcggcacctttagcacctacgccatccactgggttcgacaggcaccaggacaaggactggaatggatgggcagaatcatccccatcgagggcagagcctactacgcccagaaattccagggcagagtgaccatcaccgccgacgagtctacaagcaccgcctacatggaactgagcagcctgagaagcgaggataccgctgtgtactattgcgccagaggccggtacagctacagatattggttcgactactggggccagggcaccctggttacagtctcttctacgcgtgaggacctgaagaacgtgttcccacctgaggtggccgtgttcgagcctagcgaggccgagatcagccacacccagaaagccaccctcgtgtgcctggctaccggcttctaccccgaccatgtggaactgtcttggtgggtcaacggcaaagaggtgcacagcggcgtgtgtaccgacccccagccactgaaagaacagcccgccctgaacgacagccggtactgcctgagcagcagactgagagtgtccgccaccttctggcagaacccccggaaccacttcagatgccaggtgcagttctacggcctgagcgagaacgacgagtggacccaggacagagccaagcccgtgacccagatcgtgtctgccgaagcctggggcagagccgatgatgtgattaagatccactggcaggaaaagaagtccaacaccatcctgggcagccaggaaggcaacaccatgaagaccaacgacacctacatgaagttcagctggctgaccgtgcccgagaagtccctggacaaagaacacagatgcatcgtgcggcacgaaaacaacaagaacggcgtggaccaggaaatcatcttcccacccatcaagaccgatgtgattacaatggaccccaaggacaactgctccaaggacgccaacgataccctgctgctccagctgaccaacaccagcgcctactacatgtacttgttgctgctgctgaagtccgtggtgtacttcgccatcatcacatgctgcctgctgcggagaaccgccttctgctgcaacggcgagaagtctcgcgccaagagaagcggatctggcgtgaagcagaccctgaatttcgacctgctgaagctggctggcgacgtggaatccaacccaggcccttctagaggccatatgaccgagtacaagcccacggtgcgcctcgccacccgcgacgacgtccccagggccgtacgcaccctcgccgccgcgttcgccgactaccccgccacgcgccacaccgtcgatccggaccgccacatcgagcgggtcaccgagctgcaagaactcttcctcacgcgcgtcgggctcgacatcggcaaggtgtgggtcgcggacgacggcgccgcggtggcggtctggaccacgccggagagcgtcgaagcgggggcggtgttcgccgagatcggcccgcgcatggccgagttgagcggttcccggctggccgcgcagcaacagatggaaggcctcctggcgccgcaccggcccaaggagcccgcgtggttcctggccaccgtcggcgtctcgcccgaccaccagggcaagggtctgggcagcgccgtcgtgctccccggagtggaggcggccgagcgcgccggggtgcccgccttcctggagacctccgcgccccgcaacctccccttctacgagcggctcggcttcaccgtcaccgccgacgtcgaggtgcccgaaggaccgcgcacctggtgcatgacccgcaagcccggtgcctga

SEQ ID NO: 39938 - DNA, 2916 bp, synthetic construct
  source 1..2916: mol_type = other DNA
atggccttaccagtgaccgccttgctcctgccgctggccttgctgctccacgccgccaggccgctcgaggaggacctgaagaacgtgttcccacctgaggtggccgtgttcgagcctagcgaggccgagatcagccacacccagaaagccaccctcgtgtgcctggctaccggcttctaccccgaccatgtggaactgtcttggtgggtcaacggcaaagaggtgcacagcggcgtgtctaccgacccccagccactgaaagaacagcccgccctgaacgacagccggtactgcctgagcagcagactgagagtgtccgccaccttctggcagaacccccggaaccacttcagatgccaggtgcagttctacggcctgagcgagaacgacgagtggacccaggacagagccaagcccgtgacccagatcgtgtctgccgaagcctggggcagagccgatgatgtgattaagatccactggcaggaaaagaagtccaacaccatcctgggcagccaggaaggcaacaccatgaagaccaacgacacctacatgaagttcagctggctgaccgtgcccgagaagtccctggacaaagaacacagatgcatcgtgcggcacgaaaacaacaagaacggcgtggaccaggaaatcatcttcccacccatcaagaccgatgtgattacaatggaccccaaggacaactgctccaaggacgccaacgataccctgctgctccagctgaccaacaccagcgcctactacatgtacttgttgctgctgctgaagtccgtggtgtacttcgccatcatcacatgctgcctgctgcggagaaccgccttctgctgcaacggcgagaagtctagggccaagcgatctggatctggagcaacaaacttctcactactcaaacaagcaggtgacgtggaggagaatcccgggcctactagcatggccttaccagtgaccgccttgctcctgccgctggccttgctgctccacgccgccaggccggagatcgtgctgacacagtctcccgccacactgtcactgtctccaggcgaaagagccacactgagctgtagagccagccagagcgtgtcctcttacctggcctggtatcagcagaagcctggacaggctccccggctgctgatctacgatgccagcaatagagccacaggcatccccgccagattttctggctctggcagcggcaccgatttcaccctgaccataagcagcctggaacctgaggacttcgccgtgtactactgccagcagagaagcaactggcccctgacctttggacagggcaccaaggtggaaatcaaaggcggaggcggaagtggaggcggaggatctggcggcggaggctctcaagttcagctggttcagagcggagccgaagtgaagaaacctggcagcagcgtgaaggtgtcctgcaaagcaagcggcggcacctttagcacctacgccatccactgggttcgacaggcaccaggacaaggactggaatggatgggcagaatcatccccatcgagggcagagcctactacgcccagaaattccagggcagagtgaccatcaccgccgacgagtctacaagcaccgcctacatggaactgagcagcctgagaagcgaggataccgctgtgtactattgcgccagaggccggtacagctacagatattggttcgactactggggccagggcaccctggttacagtctcttctacgcgtatccagaaccctgatcctgccgtgtaccagctgcgggatagcaagagcagcgacaagagcgtgtgtctgttcaccgacttcgacagccagaccaacgtgtcccagagcaaggactccgacgtgtacatcaccgataagaccgtgctggacatgcggagcatggacttcaagagcaactccgccgtggcctggtccaacaagtccgatttcgcctgcgccaacgccttcaacaacagcattatccccgaggacacattcttcccaagccccgagagcagcgactccaccgaccacgtgaagcccaaagagacagagaacaccaagcagcccagcaagagctgccacaagcccaaggccatcgtgcacaccgagaaagtgaacatgatgagcctgaccgtgctgggcctgcggatgctgttcgccaaaaccgtggccgtgaacttcctgctgaccgccaagctgttcttcctccgcgccaagagaagcggatctggcgtgaagcagaccctgaatttcgacctgctgaagctggctggcgacgtggaatccaacccaggcccttctagaggccatatgaccgagtacaagcccacggtgcgcctcgccacccgcgacgacgtccccagggccgtacgcaccctcgccgccgcgttcgccgactaccccgccacgcgccacaccgtcgatccggaccgccacatcgagcgggtcaccgagctgcaagaactcttcctcacgcgcgtcgggctcgacatcggcaaggtgtgggtcgcggacgacggcgccgcggtggcggtctggaccacgccggagagcgtcgaagcgggggcggtgttcgccgagatcggcccgcgcatggccgagttgagcggttcccggctggccgcgcagcaacagatggaaggcctcctggcgccgcaccggcccaaggagcccgcgtggttcctggccaccgtcggcgtctcgcccgaccaccagggcaagggtctgggcagcgccgtcgtgctccccggagtggaggcggccgagcgcgccggggtgcccgccttcctggagacctccgcgccccgcaacctccccttctacgagcggctcggcttcaccgtcaccgccgacgtcgaggtgcccgaaggaccgcgcacctggtgcatgacccgcaagcccggtgcctga

SEQ ID NO: 39939 - DNA, 2916 bp, synthetic construct
  source 1..2916: mol_type = other DNA
atggccttaccagtgaccgccttgctcctgccgctggccttgctgctccacgccgccaggccgctcgagatccagaaccctgatcctgccgtgtaccagctgcgggatagcaagagcagcgacaagagcgtgtgtctgttcaccgacttcgacagccagaccaacgtgtcccagagcaaggactccgacgtgtacatcaccgataagaccgtgctggacatgcggagcatggacttcaagagcaactccgccgtggcctggtccaacaagtccgatttcgcctgcgccaacgccttcaacaacagcattatccccgaggacacattcttcccaagccccgagagcagcgactccaccgaccacgtgaagcccaaagagacagagaacaccaagcagcccagcaagagctgccacaagcccaaggccatcgtgcacaccgagaaagtgaacatgatgagcctgaccgtgctgggcctgcggatgctgttcgccaaaaccgtggccgtgaacttcctgctgaccgccaagctgttcttcctcagggccaagcgatctggatctggagcaacaaacttctcactactcaaacaagcaggtgacgtggaggagaatcccgggcctactagcatggccttaccagtgaccgccttgctcctgccgctggccttgctgctccacgccgccaggccggagatcgtgctgacacagtctcccgccacactgtcactgtctccaggcgaaagagccacactgagctgtagagccagccagagcgtgtcctcttacctggcctggtatcagcagaagcctggacaggctccccggctgctgatctacgatgccagcaatagagccacaggcatccccgccagattttctggctctggcagcggcaccgatttcaccctgaccataagcagcctggaacctgaggacttcgccgtgtactactgccagcagagaagcaactggcccctgacctttggacagggcaccaaggtggaaatcaaaggcggaggcggaagtggaggcggaggatctggcggcggaggctctcaagttcagctggttcagagcggagccgaagtgaagaaacctggcagcagcgtgaaggtgtcctgcaaagcaagcggcggcacctttagcacctacgccatccactgggttcgacaggcaccaggacaaggactggaatggatgggcagaatcatccccatcgagggcagagcctactacgcccagaaattccagggcagagtgaccatcaccgccgacgagtctacaagcaccgcctacatggaactgagcagcctgagaagcgaggataccgctgtgtactattgcgccagaggccggtacagctacagatattggttcgactactggggccagggcaccctggttacagtctcttctacgcgtgaggacctgaagaacgtgttcccacctgaggtggccgtgttcgagcctagcgaggccgagatcagccacacccagaaagccaccctcgtgtgcctggctaccggcttctaccccgaccatgtggaactgtcttggtgggtcaacggcaaagaggtgcacagcggcgtgtctaccgacccccagccactgaaagaacagcccgccctgaacgacagccggtactgcctgagcagcagactgagagtgtccgccaccttctggcagaacccccggaaccacttcagatgccaggtgcagttctacggcctgagcgagaacgacgagtggacccaggacagagccaagcccgtgacccagatcgtgtctgccgaagcctggggcagagccgatgatgtgattaagatccactggcaggaaaagaagtccaacaccatcctgggcagccaggaaggcaacaccatgaagaccaacgacacctacatgaagttcagctggctgaccgtgcccgagaagtccctggacaaagaacacagatgcatcgtgcggcacgaaaacaacaagaacggcgtggaccaggaaatcatcttcccacccatcaagaccgatgtgattacaatggaccccaaggacaactgctccaaggacgccaacgataccctgctgctccagctgaccaacaccagcgcctactacatgtacttgttgctgctgctgaagtccgtggtgtacttcgccatcatcacatgctgcctgctgcggagaaccgccttctgctgcaacggcgagaagtctcgcgccaagagaagcggatctggcgtgaagcagaccctgaatttcgacctgctgaagctggctggcgacgtggaatccaacccaggcccttctagaggccatatgaccgagtacaagcccacggtgcgcctcgccacccgcgacgacgtccccagggccgtacgcaccctcgccgccgcgttcgccgactaccccgccacgcgccacaccgtcgatccggaccgccacatcgagcgggtcaccgagctgcaagaactcttcctcacgcgcgtcgggctcgacatcggcaaggtgtgggtcgcggacgacggcgccgcggtggcggtctggaccacgccggagagcgtcgaagcgggggcggtgttcgccgagatcggcccgcgcatggccgagttgagcggttcccggctggccgcgcagcaacagatggaaggcctcctggcgccgcaccggcccaaggagcccgcgtggttcctggccaccgtcggcgtctcgcccgaccaccagggcaagggtctgggcagcgccgtcgtgctccccggagtggaggcggccgagcgcgccggggtgcccgccttcctggagacctccgcgccccgcaacctccccttctacgagcggctcggcttcaccgtcaccgccgacgtcgaggtgcccgaaggaccgcgcacctggtgcatgacccgcaagcccggtgcctga

SEQ ID NO: 39940 - DNA, 2610 bp, synthetic construct
  source 1..2610: mol_type = other DNA
atggccttaccagtgaccgccttgctcctgccgctggccttgctgctccacgccgccaggccgctcgaggaggacctgaagaacgtgttcccacctgaggtggccgtgttcgagcctagcaaggccgagatcgcccacacccagaaagccaccctcgtgtgcctggctaccggcttctaccccgaccatgtggaactgtcttggtgggtcaacggcaaagaggtgcacagcggcgtgtgtaccgacccccagccactgaaagaacagcccgccctgaacgacagccggtactgcctgagcagcagactgagagtgtccgccaccttctggcagaacccccggaaccacttcagatgccaggtgcagttctacggcctgagcgagaacgacgagtggacccaggacagagccaagcccgtgacccagatcgtgtctgccgaagcctggggcagagccgattgcggcatcaccagcgccagctaccaccagggcgtgctgagcgccaccatcctgtacgagatcctgctgggcaaggccaccctgtacgccgtgctggtgtctgccctggtgctgatggctatggtcaagcggaaggacagccggggaagggccaagcgatctggatctggagcaacaaacttctcactactcaaacaagcaggtgacgtggaggagaatcccgggcctactagcatggccttaccagtgaccgccttgctcctgccgctggccttgctgctccacgccgccaggccggagatcgtgctgacacagtctcccgccacactgtcactgtctccaggcgaaagagccacactgagctgtagagccagccagagcgtgtcctcttacctggcctggtatcagcagaagcctggacaggctccccggctgctgatctacgatgccagcaatagagccacaggcatccccgccagattttctggctctggcagcggcaccgatttcaccctgaccataagcagcctggaacctgaggacttcgccgtgtactactgccagcagagaagcaactggcccctgacctttggacagggcaccaaggtggaaatcaaaggcggaggcggaagtggaggcggaggatctggcggcggaggctctcaagttcagctggttcagagcggagccgaagtgaagaaacctggcagcagcgtgaaggtgtcctgcaaagcaagcggcggcacctttagcacctacgccatccactgggttcgacaggcaccaggacaaggactggaatggatgggcagaatcatccccatcgagggcagagcctactacgcccagaaattccagggcagagtgaccatcaccgccgacgagtctacaagcaccgcctacatggaactgagcagcctgagaagcgaggataccgctgtgtactattgcgccagaggccggtacagctacagatattggttcgactactggggccagggcaccctggttacagtctcttctacgcgtatccagaaccctgatcctgccgtgtaccagctgcgggatagcaagagcagcgacaagagcgtgtgtctgttcaccgacttcgacagccagaccaacgtgtcccagagcaaggactccgacgtgtacatcaccgataagtgcgtgctggacatgcggagcatggacttcaagagcaactccgccgtggcctggtccaacaagtccgatttcgcctgcgccaacgccttcaacaacagcattatccccgaggacacattcttcccaagcagcgacgtgccctgcgacgtgaagctggtggaaaagagcttcgagacagacaccaacctgaacttccagaacctgagcgtgatcggcttcagaatcctgctgctgaaagtggccggctttaacctgctgatgaccctgcggctgtggtccagccgcgccaagagaagcggatctggcgtgaagcagaccctgaatttcgacctgctgaagctggctggcgacgtggaatccaacccaggcccttctagaggccatatgaccgagtacaagcccacggtgcgcctcgccacccgcgacgacgtccccagggccgtacgcaccctcgccgccgcgttcgccgactaccccgccacgcgccacaccgtcgatccggaccgccacatcgagcgggtcaccgagctgcaagaactcttcctcacgcgcgtcgggctcgacatcggcaaggtgtgggtcgcggacgacggcgccgcggtggcggtctggaccacgccggagagcgtcgaagcgggggcggtgttcgccgagatcggcccgcgcatggccgagttgagcggttcccggctggccgcgcagcaacagatggaaggcctcctggcgccgcaccggcccaaggagcccgcgtggttcctggccaccgtcggcgtctcgcccgaccaccagggcaagggtctgggcagcgccgtcgtgctccccggagtggaggcggccgagcgcgccggggtgcccgccttcctggagacctccgcgccccgcaacctccccttctacgagcggctcggcttcaccgtcaccgccgacgtcgaggtgcccgaaggaccgcgcacctggtgcatgacccgcaagcccggtgcctga

SEQ ID NO: 39941 - DNA, 2610 bp, synthetic construct
  source 1..2610: mol_type = other DNA
atggccttaccagtgaccgccttgctcctgccgctggccttgctgctccacgccgccaggccgctcgagatccagaaccctgatcctgccgtgtaccagctgcgggatagcaagagcagcgacaagagcgtgtgtctgttcaccgacttcgacagccagaccaacgtgtcccagagcaaggactccgacgtgtacatcaccgataagtgcgtgctggacatgcggagcatggacttcaagagcaactccgccgtggcctggtccaacaagtccgatttcgcctgcgccaacgccttcaacaacagcattatccccgaggacacattcttcccaagcagcgacgtgccctgcgacgtgaagctggtggaaaagagcttcgagacagacaccaacctgaacttccagaacctgagcgtgatcggcttcagaatcctgctgctgaaagtggccggctttaacctgctgatgaccctgcggctgtggtccagcagggccaagcgatctggatctggagcaacaaacttctcactactcaaacaagcaggtgacgtggaggagaatcccgggcctactagcatggccttaccagtgaccgccttgctcctgccgctggccttgctgctccacgccgccaggccggagatcgtgctgacacagtctcccgccacactgtcactgtctccaggcgaaagagccacactgagctgtagagccagccagagcgtgtcctcttacctggcctggtatcagcagaagcctggacaggctccccggctgctgatctacgatgccagcaatagagccacaggcatccccgccagattttctggctctggcagcggcaccgatttcaccctgaccataagcagcctggaacctgaggacttcgccgtgtactactgccagcagagaagcaactggcccctgacctttggacagggcaccaaggtggaaatcaaaggcggaggcggaagtggaggcggaggatctggcggcggaggctctcaagttcagctggttcagagcggagccgaagtgaagaaacctggcagcagcgtgaaggtgtcctgcaaagcaagcggcggcacctttagcacctacgccatccactgggttcgacaggcaccaggacaaggactggaatggatgggcagaatcatccccatcgagggcagagcctactacgcccagaaattccagggcagagtgaccatcaccgccgacgagtctacaagcaccgcctacatggaactgagcagcctgagaagcgaggataccgctgtgtactattgcgccagaggccggtacagctacagatattggttcgactactggggccagggcaccctggttacagtctcttctacgcgtgaggacctgaagaacgtgttcccacctgaggtggccgtgttcgagcctagcaaggccgagatcgcccacacccagaaagccaccctcgtgtgcctggctaccggcttctaccccgaccatgtggaactgtcttggtgggtcaacggcaaagaggtgcacagcggcgtgtgtaccgacccccagccactgaaagaacagcccgccctgaacgacagccggtactgcctgagcagcagactgagagtgtccgccaccttctggcagaacccccggaaccacttcagatgccaggtgcagttctacggcctgagcgagaacgacgagtggacccaggacagagccaagcccgtgacccagatcgtgtctgccgaagcctggggcagagccgattgcggcatcaccagcgccagctaccaccagggcgtgctgagcgccaccatcctgtacgagatcctgctgggcaaggccaccctgtacgccgtgctggtgtctgccctggtgctgatggctatggtcaagcggaaggacagccggggacgcgccaagagaagcggatctggcgtgaagcagaccctgaatttcgacctgctgaagctggctggcgacgtggaatccaacccaggcccttctagaggccatatgaccgagtacaagcccacggtgcgcctcgccacccgcgacgacgtccccagggccgtacgcaccctcgccgccgcgttcgccgactaccccgccacgcgccacaccgtcgatccggaccgccacatcgagcgggtcaccgagctgcaagaactcttcctcacgcgcgtcgggctcgacatcggcaaggtgtgggtcgcggacgacggcgccgcggtggcggtctggaccacgccggagagcgtcgaagcgggggcggtgttcgccgagatcggcccgcgcatggccgagttgagcggttcccggctggccgcgcagcaacagatggaaggcctcctggcgccgcaccggcccaaggagcccgcgtggttcctggccaccgtcggcgtctcgcccgaccaccagggcaagggtctgggcagcgccgtcgtgctccccggagtggaggcggccgagcgcgccggggtgcccgccttcctggagacctccgcgccccgcaacctccccttctacgagcggctcggcttcaccgtcaccgccgacgtcgaggtgcccgaaggaccgcgcacctggtgcatgacccgcaagcccggtgcctga

SEQ ID NO: 39942 - DNA, 2289 bp, synthetic construct
  source 1..2289: mol_type = other DNA
atggccttaccagtgaccgccttgctcctgccgctggccttgctgctccacgccgccaggccgctcgagcagagttttgggttgttggaccctaaattgtgctatctgttggacggaatcctgttcatttacggagtgatcctgaccgcattgttcctgcgggttaagttttccagatccgcagacgcacccgcttaccaacaagggcagaaccaactctacaatgaacttaatttggggcggagggaagagtacgacgttctggacaaaaggaggggacgagatcccgagatgggcggaaagcctcagcgaaggaagaatccgcaagaggggctttataacgaactccagaaagataaaatggcagaagcctatagtgagattgggatgaagggagaaaggaggaggggtaaaggtcacgatgggttgtaccaaggattgagcacagccactaaagatacctatgatgcgctccacatgcaggccctgccgccaagaagggccaagcgatctggatctggagcaacaaacttctcactactcaaacaagcaggtgacgtggaggagaatcccgggcctactagcatggccttaccagtgaccgccttgctcctgccgctggccttgctgctccacgccgccaggccggagatcgtgctgacacagtctcccgccacactgtcactgtctccaggcgaaagagccacactgagctgtagagccagccagagcgtgtcctcttacctggcctggtatcagcagaagcctggacaggctccccggctgctgatctacgatgccagcaatagagccacaggcatccccgccagattttctggctctggcagcggcaccgatttcaccctgaccataagcagcctggaacctgaggacttcgccgtgtactactgccagcagagaagcaactggcccctgacctttggacagggcaccaaggtggaaatcaaaggcggaggcggaagtggaggcggaggatctggcggcggaggctctcaagttcagctggttcagagcggagccgaagtgaagaaacctggcagcagcgtgaaggtgtcctgcaaagcaagcggcggcacctttagcacctacgccatccactgggttcgacaggcaccaggacaaggactggaatggatgggcagaatcatccccatcgagggcagagcctactacgcccagaaattccagggcagagtgaccatcaccgccgacgagtctacaagcaccgcctacatggaactgagcagcctgagaagcgaggataccgctgtgtactattgcgccagaggccggtacagctacagatattggttcgactactggggccagggcaccctggttacagtctcttctacgcgtgagctgggagagcctcagctgtgctatatcctggacgccatcctgtttctgtacggcatcgtgctgaccctgctgtactgccggctgaagatccaagtgcggaaggccgccatcaccagctacgagaaatccgacggcgtgtacaccggcctgagcaccagaaatcaagagacatacgagacactgaagcacgaaaagcctccacaacgcgccaagagaagcggatctggcgtgaagcagaccctgaatttcgacctgctgaagctggctggcgacgtggaatccaacccaggcccttctagaggccatatgaccgagtacaagcccacggtgcgcctcgccacccgcgacgacgtccccagggccgtacgcaccctcgccgccgcgttcgccgactaccccgccacgcgccacaccgtcgatccggaccgccacatcgagcgggtcaccgagctgcaagaactcttcctcacgcgcgtcgggctcgacatcggcaaggtgtgggtcgcggacgacggcgccgcggtggcggtctggaccacgccggagagcgtcgaagcgggggcggtgttcgccgagatcggcccgcgcatggccgagttgagcggttcccggctggccgcgcagcaacagatggaaggcctcctggcgccgcaccggcccaaggagcccgcgtggttcctggccaccgtcggcgtctcgcccgaccaccagggcaagggtctgggcagcgccgtcgtgctccccggagtggaggcggccgagcgcgccggggtgcccgccttcctggagacctccgcgccccgcaacctccccttctacgagcggctcggcttcaccgtcaccgccgacgtcgaggtgcccgaaggaccgcgcacctggtgcatgacccgcaagcccggtgcctga

SEQ ID NO: 39943 - DNA, 2922 bp, synthetic construct; identical to SEQ ID NO: 39934
  source 1..2922: mol_type = other DNA

SEQ ID NO: 39944 - DNA, 2922 bp, synthetic construct; identical to SEQ ID NO: 39935
  source 1..2922: mol_type = other DNA

SEQ ID NO: 39945 - DNA, 2919 bp, synthetic construct
  source 1..2919: mol_type = other DNA
atggccttaccagtgaccgccttgctcctgccgctggccttgctgctccacgccgccaggccgctcgaggaggaggacctgaagaacgtgttcccacctgaggtggccgtgttcgagcctagcgaggccgagatcagccacacccagaaagccaccctcgtgtgcctggctaccggcttctaccccgaccatgtggaactgtcttggtgggtcaacggcaaagaggtgcacagcggcgtgtgtaccgacccccagccactgaaagaacagcccgccctgaacgacagccggtactgcctgagcagcagactgagagtgtccgccaccttctggcagaacccccggaaccacttcagatgccaggtgcagttctacggcctgagcgagaacgacgagtggacccaggacagagccaagcccgtgacccagatcgtgtctgccgaagcctggggcagagccgatgatgtgattaagatccactggcaggaaaagaagtccaacaccatcctgggcagccaggaaggcaacaccatgaagaccaacgacacctacatgaagttcagctggctgaccgtgcccgagaagtccctggacaaagaacacagatgcatcgtgcggcacgaaaacaacaagaacggcgtggaccaggaaatcatcttcccacccatcaagaccgatgtgattacaatggaccccaaggacaactgctccaaggacgccaacgataccctgctgctccagctgaccaacaccagcgcctactacatgtacttgttgctgctgctgaagtccgtggtgtacttcgccatcatcacatgctgcctgctgcggagaaccgccttctgctgcaacggcgagaagtctagggccaagcgatctggatctggagcaacaaacttctcactactcaaacaagcaggtgacgtggaggagaatcccgggcctactagcatggccttaccagtgaccgccttgctcctgccgctggccttgctgctccacgccgccaggccggagatcgtgctgacacagtctcccgccacactgtcactgtctccaggcgaaagagccacactgagctgtagagccagccagagcgtgtcctcttacctggcctggtatcagcagaagcctggacaggctccccggctgctgatctacgatgccagcaatagagccacaggcatccccgccagattttctggctctggcagcggcaccgatttcaccctgaccataagcagcctggaacctgaggacttcgccgtgtactactgccagcagagaagcaactggcccctgacctttggacagggcaccaaggtggaaatcaaaggcggaggcggaagtggaggcggaggatctggcggcggaggctctcaagttcagctggttcagagcggagccgaagtgaagaaacctggcagcagcgtgaaggtgtcctgcaaagcaagcggcggcacctttagcacctacgccatccactgggttcgacaggcaccaggacaaggactggaatggatgggcagaatcatccccatcgagggcagagcctactacgcccagaaattccagggcagagtgaccatcaccgccgacgagtctacaagcaccgcctacatggaactgagcagcctgagaagcgaggataccgctgtgtactattgcgccagaggccggtacagctacagatattggttcgactactggggccagggcaccctggttacagtctcttctacgcgtatccagaaccctgatcctgccgtgtaccagctgcgggatagcaagagcagcgacaagagcgtgtgtctgttcaccgacttcgacagccagaccaacgtgtcccagagcaaggactccgacgtgtacatcaccgataagtgcgtgctggacatgcggagcatggacttcaagagcaactccgccgtggcctggtccaacaagtccgatttcgcctgcgccaacgccttcaacaacagcattatccccgaggacacattcttcccaagccccgagagcagcgactccaccgaccacgtgaagcccaaagagacagagaacaccaagcagcccagcaagagctgccacaagcccaaggccatcgtgcacaccgagaaagtgaacatgatgagcctgaccgtgctgggcctgcggatgctgttcgccaaaaccgtggccgtgaacttcctgctgaccgccaagctgttcttcctccgcgccaagagaagcggatctggcgtgaagcagaccctgaatttcgacctgctgaagctggctggcgacgtggaatccaacccaggcccttctagaggccatatgaccgagtacaagcccacggtgcgcctcgccacccgcgacgacgtccccagggccgtacgcaccctcgccgccgcgttcgccgactaccccgccacgcgccacaccgtcgatccggaccgccacatcgagcgggtcaccgagctgcaagaactcttcctcacgcgcgtcgggctcgacatcggcaaggtgtgggtcgcggacgacggcgccgcggtggcggtctggaccacgccggagagcgtcgaagcgggggcggtgttcgccgagatcggcccgcgcatggccgagttgagcggttcccggctggccgcgcagcaacagatggaaggcctcctggcgccgcaccggcccaaggagcccgcgtggttcctggccaccgtcggcgtctcgcccgaccaccagggcaagggtctgggcagcgccgtcgtgctccccggagtggaggcggccgagcgcgccggggtgcccgccttcctggagacctccgcgccccgcaacctccccttctacgagcggctcggcttcaccgtcaccgccgacgtcgaggtgcccgaaggaccgcgcacctggtgcatgacccgcaagcccggtgcctga

SEQ ID NO: 39946 - DNA, 2919 bp, synthetic construct
  source 1..2919: mol_type = other DNA
atggccttaccagtgaccgccttgctcctgccgctggccttgctgctccacgccgccaggccgctcgagatccagaaccctgatcctgccgtgtaccagctgcgggatagcaagagcagcgacaagagcgtgtgtctgttcaccgacttcgacagccagaccaacgtgtcccagagcaaggactccgacgtgtacatcaccgataagtgcgtgctggacatgcggagcatggacttcaagagcaactccgccgtggcctggtccaacaagtccgatttcgcctgcgccaacgccttcaacaacagcattatccccgaggacacattcttcccaagccccgagagcagcgactccaccgaccacgtgaagcccaaagagacagagaacaccaagcagcccagcaagagctgccacaagcccaaggccatcgtgcacaccgagaaagtgaacatgatgagcctgaccgtgctgggcctgcggatgctgttcgccaaaaccgtggccgtgaacttcctgctgaccgccaagctgttcttcctcagggccaagcgatctggatctggagcaacaaacttctcactactcaaacaagcaggtgacgtggaggagaatcccgggcctactagcatggccttaccagtgaccgccttgctcctgccgctggccttgctgctccacgccgccaggccggagatcgtgctgacacagtctcccgccacactgtcactgtctccaggcgaaagagccacactgagctgtagagccagccagagcgtgtcctcttacctggcctggtatcagcagaagcctggacaggctccccggctgctgatctacgatgccagcaatagagccacaggcatccccgccagattttctggctctggcagcggcaccgatttcaccctgaccataagcagcctggaacctgaggacttcgccgtgtactactgccagcagagaagcaactggcccctgacctttggacagggcaccaaggtggaaatcaaaggcggaggcggaagtggaggcggaggatctggcggcggaggctctcaagttcagctggttcagagcggagccgaagtgaagaaacctggcagcagcgtgaaggtgtcctgcaaagcaagcggcggcacctttagcacctacgccatccactgggttcgacaggcaccaggacaaggactggaatggatgggcagaatcatccccatcgagggcagagcctactacgcccagaaattccagggcagagtgaccatcaccgccgacgagtctacaagcaccgcctacatggaactgagcagcctgagaagcgaggataccgctgtgtactattgcgccagaggccggtacagctacagatattggttcgactactggggccagggcaccctggttacagtctcttctacgcgtgaggaggacctgaagaacgtgttcccacctgaggtggccgtgttcgagcctagcgaggccgagatcagccacacccagaaagccaccctcgtgtgcctggctaccggcttctaccccgaccatgtggaactgtcttggtgggtcaacggcaaagaggtgcacagcggcgtgtgtaccgacccccagccactgaaagaacagcccgccctgaacgacagccggtactgcctgagcagcagactgagagtgtccgccaccttctggcagaacccccggaaccacttcagatgccaggtgcagttctacggcctgagcgagaacgacgagtggacccaggacagagccaagcccgtgacccagatcgtgtctgccgaagcctggggcagagccgatgatgtgattaagatccactggcaggaaaagaagtccaacaccatcctgggcagccaggaaggcaacaccatgaagaccaacgacacctacatgaagttcagctggctgaccgtgcccgagaagtccctggacaaagaacacagatgcatcgtgcggcacgaaaacaacaagaacggcgtggaccaggaaatcatcttcccacccatcaagaccgatgtgattacaatggaccccaaggacaactgctccaaggacgccaacgataccctgctgctccagctgaccaacaccagcgcctactacatgtacttgttgctgctgctgaagtccgtggtgtacttcgccatcatcacatgctgcctgctgcggagaaccgccttctgctgcaacggcgagaagtctcgcgccaagagaagcggatctggcgtgaagcagaccctgaatttcgacctgctgaagctggctggcgacgtggaatccaacccaggcccttctagaggccatatgaccgagtacaagcccacggtgcgcctcgccacccgcgacgacgtccccagggccgtacgcaccctcgccgccgcgttcgccgactaccccgccacgcgccacaccgtcgatccggaccgccacatcgagcgggtcaccgagctgcaagaactcttcctcacgcgcgtcgggctcgacatcggcaaggtgtgggtcgcggacgacggcgccgcggtggcggtctggaccacgccggagagcgtcgaagcgggggcggtgttcgccgagatcggcccgcgcatggccgagttgagcggttcccggctggccgcgcagcaacagatggaaggcctcctggcgccgcaccggcccaaggagcccgcgtggttcctggccaccgtcggcgtctcgcccgaccaccagggcaagggtctgggcagcgccgtcgtgctccccggagtggaggcggccgagcgcgccggggtgcccgccttcctggagacctccgcgccccgcaacctccccttctacgagcggctcggcttcaccgtcaccgccgacgtcgaggtgcccgaaggaccgcgcacctggtgcatgacccgcaagcccggtgcctga

SEQ ID NO: 39947 - DNA, 2610 bp, synthetic construct
  source 1..2610: mol_type = other DNA
atggccttaccagtgaccgccttgctcctgccgctggccttgctgctccacgccgccaggccgctcgaggaggacctgaagaacgtgttcccacctgaggtggccgtgttcgagcctagcgaggccgagatcagccacacccagaaagccaccctcgtgtgcctggctaccggcttctaccccgaccatgtggaactgtcttggtgggtcaacggcaaagaggtgcacagcggcgtgtctaccgacccccagccactgaaagaacagcccgccctgaacgacagccggtactgcctgagcagcagactgagagtgtccgccaccttctggcagaacccccggaaccacttcagatgccaggtgcagttctacggcctgagcgagaacgacgagtggacccaggacagagccaagcccgtgacccagatcgtgtctgccgaagcctggggcagagccgattgcggctttaccagcgagagctaccagcagggcgtgctgagcgccaccaacctgagcgtgatcggcttcagaatcctgctgctgaaagtggccggctttaacctgctgatgaccctgcggctgtggtccagcagggccaagcgatctggatctggagcaacaaacttctcactactcaaacaagcaggtgacgtggaggagaatcccgggcctactagcatggccttaccagtgaccgccttgctcctgccgctggccttgctgctccacgccgccaggccggagatcgtgctgacacagtctcccgccacactgtcactgtctccaggcgaaagagccacactgagctgtagagccagccagagcgtgtcctcttacctggcctggtatcagcagaagcctggacaggctccccggctgctgatctacgatgccagcaatagagccacaggcatccccgccagattttctggctctggcagcggcaccgatttcaccctgaccataagcagcctggaacctgaggacttcgccgtgtactactgccagcagagaagcaactggcccctgacctttggacagggcaccaaggtggaaatcaaaggcggaggcggaagtggaggcggaggatctggcggcggaggctctcaagttcagctggttcagagcggagccgaagtgaagaaacctggcagcagcgtgaaggtgtcctgcaaagcaagcggcggcacctttagcacctacgccatccactgggttcgacaggcaccaggacaaggactggaatggatgggcagaatcatccccatcgagggcagagcctactacgcccagaaattccagggcagagtgaccatcaccgccgacgagtctacaagcaccgcctacatggaactgagcagcctgagaagcgaggataccgctgtgtactattgcgccagaggccggtacagctacagatattggttcgactactggggccagggcaccctggttacagtctcttctacgcgtatccagaaccctgatcctgccgtgtaccagctgcgggatagcaagagcagcgacaagagcgtgtgtctgttcaccgacttcgacagccagaccaacgtgtcccagagcaaggactccgacgtgtacatcaccgataagaccgtgctggacatgcggagcatggacttcaagagcaactccgccgtggcctggtccaacaagtccgatttcgcctgcgccaacgccttcaacaacagcattatccccgaggacacattcttcccaagccccgagagcagctgcgacgtgaagctggtggaaaagagcttcgagacagacaccaacctgaacttccagatcctgtacgagatcctgctgggcaaggccaccctgtacgccgtgctggtgtctgccctggtgctgatggctatggtcaagcggaaggacagccggggacgcgccaagagaagcggatctggcgtgaagcagaccctgaatttcgacctgctgaagctggctggcgacgtggaatccaacccaggcccttctagaggccatatgaccgagtacaagcccacggtgcgcctcgccacccgcgacgacgtccccagggccgtacgcaccctcgccgccgcgttcgccgactaccccgccacgcgccacaccgtcgatccggaccgccacatcgagcgggtcaccgagctgcaagaactcttcctcacgcgcgtcgggctcgacatcggcaaggtgtgggtcgcggacgacggcgccgcggtggcggtctggaccacgccggagagcgtcgaagcgggggcggtgttcgccgagatcggcccgcgcatggccgagttgagcggttcccggctggccgcgcagcaacagatggaaggcctcctggcgccgcaccggcccaaggagcccgcgtggttcctggccaccgtcggcgtctcgcccgaccaccagggcaagggtctgggcagcgccgtcgtgctccccggagtggaggcggccgagcgcgccggggtgcccgccttcctggagacctccgcgccccgcaacctccccttctacgagcggctcggcttcaccgtcaccgccgacgtcgaggtgcccgaaggaccgcgcacctggtgcatgacccgcaagcccggtgcctga

SEQ ID NO: 39948 - DNA, 2610 bp, synthetic construct
  source 1..2610: mol_type = other DNA
atggccttaccagtgaccgccttgctcctgccgctggccttgctgctccacgccgccaggccgctcgagatccagaaccctgatcctgccgtgtaccagctgcgggatagcaagagcagcgacaagagcgtgtgtctgttcaccgacttcgacagccagaccaacgtgtcccagagcaaggactccgacgtgtacatcaccgataagaccgtgctggacatgcggagcatggacttcaagagcaactccgccgtggcctggtccaacaagtccgatttcgcctgcgccaacgccttcaacaacagcattatccccgaggacacattcttcccaagccccgagagcagctgcgacgtgaagctggtggaaaagagcttcgagacagacaccaacctgaacttccagatcctgtacgagatcctgctgggcaaggccaccctgtacgccgtgctggtgtctgccctggtgctgatggctatggtcaagcggaaggacagccggggaagggccaagcgatctggatctggagcaacaaacttctcactactcaaacaagcaggtgacgtggaggagaatcccgggcctactagcatggccttaccagtgaccgccttgctcctgccgctggccttgctgctccacgccgccaggccggagatcgtgctgacacagtctcccgccacactgtcactgtctccaggcgaaagagccacactgagctgtagagccagccagagcgtgtcctcttacctggcctggtatcagcagaagcctggacaggctccccggctgctgatctacgatgccagcaatagagccacaggcatccccgccagattttctggctctggcagcggcaccgatttcaccctgaccataagcagcctggaacctgaggacttcgccgtgtactactgccagcagagaagcaactggcccctgacctttggacagggcaccaaggtggaaatcaaaggcggaggcggaagtggaggcggaggatctggcggcggaggctctcaagttcagctggttcagagcggagccgaagtgaagaaacctggcagcagcgtgaaggtgtcctgcaaagcaagcggcggcacctttagcacctacgccatccactgggttcgacaggcaccaggacaaggactggaatggatgggcagaatcatccccatcgagggcagagcctactacgcccagaaattccagggcagagtgaccatcaccgccgacgagtctacaagcaccgcctacatggaactgagcagcctgagaagcgaggataccgctgtgtactattgcgccagaggccggtacagctacagatattggttcgactactggggccagggcaccctggttacagtctcttctacgcgtgaggacctgaagaacgtgttcccacctgaggtggccgtgttcgagcctagcgaggccgagatcagccacacccagaaagccaccctcgtgtgcctggctaccggcttctaccccgaccatgtggaactgtcttggtgggtcaacggcaaagaggtgcacagcggcgtgtctaccgacccccagccactgaaagaacagcccgccctgaacgacagccggtactgcctgagcagcagactgagagtgtccgccaccttctggcagaacccccggaaccacttcagatgccaggtgcagttctacggcctgagcgagaacgacgagtggacccaggacagagccaagcccgtgacccagatcgtgtctgccgaagcctggggcagagccgattgcggctttaccagcgagagctaccagcagggcgtgctgagcgccaccaacctgagcgtgatcggcttcagaatcctgctgctgaaagtggccggctttaacctgctgatgaccctgcggctgtggtccagccgcgccaagagaagcggatctggcgtgaagcagaccctgaatttcgacctgctgaagctggctggcgacgtggaatccaacccaggcccttctagaggccatatgaccgagtacaagcccacggtgcgcctcgccacccgcgacgacgtccccagggccgtacgcaccctcgccgccgcgttcgccgactaccccgccacgcgccacaccgtcgatccggaccgccacatcgagcgggtcaccgagctgcaagaactcttcctcacgcgcgtcgggctcgacatcggcaaggtgtgggtcgcggacgacggcgccgcggtggcggtctggaccacgccggagagcgtcgaagcgggggcggtgttcgccgagatcggcccgcgcatggccgagttgagcggttcccggctggccgcgcagcaacagatggaaggcctcctggcgccgcaccggcccaaggagcccgcgtggttcctggccaccgtcggcgtctcgcccgaccaccagggcaagggtctgggcagcgccgtcgtgctccccggagtggaggcggccgagcgcgccggggtgcccgccttcctggagacctccgcgccccgcaacctccccttctacgagcggctcggcttcaccgtcaccgccgacgtcgaggtgcccgaaggaccgcgcacctggtgcatgacccgcaagcccggtgcctga

SEQ ID NO: 39949 - DNA, 2610 bp, synthetic construct
  source 1..2610: mol_type = other DNA
atggccttaccagtgaccgccttgctcctgccgctggccttgctgctccacgccgccaggccgctcgaggaggacctgaagaacgtgttcccacctgaggtggccgtgttcgagcctagcgaggccgagatcagccacacccagaaagccaccctcgtgtgcctggctaccggcttctaccccgaccatgtggaactgtcttggtgggtcaacggcaaagaggtgcacagcggcgtgtgtaccgacccccagccactgaaagaacagcccgccctgaacgacagccggtactgcctgagcagcagactgagagtgtccgccaccttctggcagaacccccggaaccacttcagatgccaggtgcagttctacggcctgagcgagaacgacgagtggacccaggacagagccaagcccgtgacccagatcgtgtctgccgaagcctggggcagagccgattgcgacgtgaagctggtggaaaagagcttcgagacagacaccaacctgaacttccagaacctgagcgtgatcggcttcagaatcctgctgctgaaagtggccggctttaacctgctgatgaccctgcggctgtggtccagcagggccaagcgatctggatctggagcaacaaacttctcactactcaaacaagcaggtgacgtggaggagaatcccgggcctactagcatggccttaccagtgaccgccttgctcctgccgctggccttgctgctccacgccgccaggccggagatcgtgctgacacagtctcccgccacactgtcactgtctccaggcgaaagagccacactgagctgtagagccagccagagcgtgtcctcttacctggcctggtatcagcagaagcctggacaggctccccggctgctgatctacgatgccagcaatagagccacaggcatccccgccagattttctggctctggcagcggcaccgatttcaccctgaccataagcagcctggaacctgaggacttcgccgtgtactactgccagcagagaagcaactggcccctgacctttggacagggcaccaaggtggaaatcaaaggcggaggcggaagtggaggcggaggatctggcggcggaggctctcaagttcagctggttcagagcggagccgaagtgaagaaacctggcagcagcgtgaaggtgtcctgcaaagcaagcggcggcacctttagcacctacgccatccactgggttcgacaggcaccaggacaaggactggaatggatgggcagaatcatccccatcgagggcagagcctactacgcccagaaattccagggcagagtgaccatcaccgccgacgagtctacaagcaccgcctacatggaactgagcagcctgagaagcgaggataccgctgtgtactattgcgccagaggccggtacagctacagatattggttcgactactggggccagggcaccctggttacagtctcttctacgcgtatccagaaccctgatcctgccgtgtaccagctgcgggatagcaagagcagcgacaagagcgtgtgtctgttcaccgacttcgacagccagaccaacgtgtcccagagcaaggactccgacgtgtacatcaccgataagtgcgtgctggacatgcggagcatggacttcaagagcaactccgccgtggcctggtccaacaagtccgatttcgcctgcgccaacgccttcaacaacagcattatccccgaggacacattcttcccaagccccgagagcagctgcggctttaccagcgagagctaccagcagggcgtgctgagcgccaccatcctgtacgagatcctgctgggcaaggccaccctgtacgccgtgctggtgtctgccctggtgctgatggctatggtcaagcggaaggacagccggggacgcgccaagagaagcggatctggcgtgaagcagaccctgaatttcgacctgctgaagctggctggcgacgtggaatccaacccaggcccttctagaggccatatgaccgagtacaagcccacggtgcgcctcgccacccgcgacgacgtccccagggccgtacgcaccctcgccgccgcgttcgccgactaccccgccacgcgccacaccgtcgatccggaccgccacatcgagcgggtcaccgagctgcaagaactcttcctcacgcgcgtcgggctcgacatcggcaaggtgtgggtcgcggacgacggcgccgcggtggcggtctggaccacgccggagagcgtcgaagcgggggcggtgttcgccgagatcggcccgcgcatggccgagttgagcggttcccggctggccgcgcagcaacagatggaaggcctcctggcgccgcaccggcccaaggagcccgcgtggttcctggccaccgtcggcgtctcgcccgaccaccagggcaagggtctgggcagcgccgtcgtgctccccggagtggaggcggccgagcgcgccggggtgcccgccttcctggagacctccgcgccccgcaacctccccttctacgagcggctcggcttcaccgtcaccgccgacgtcgaggtgcccgaaggaccgcgcacctggtgcatgacccgcaagcccggtgcctga

SEQ ID NO: 39950 - DNA, 2610 bp, synthetic construct
  source 1..2610: mol_type = other DNA
atggccttaccagtgaccgccttgctcctgccgctggccttgctgctccacgccgccaggccgctcgaggaggacctgaagaacgtgttcccacctgaggtggccgtgttcgagcctagcgaggccgagatcagccacacccagaaagccaccctcgtgtgcctggctaccggcttctaccccgaccatgtggaactgtcttggtgggtcaacggcaaagaggtgcacagcggcgtgtctaccgacccccagccactgaaagaacagcccgccctgaacgacagccggtactgcctgagcagcagactgagagtgtccgccaccttctggcagaacccccggaaccacttcagatgccaggtgcagttctacggcctgagcgagaacgacgagtggacccaggacagagccaagcccgtgacccagatcgtgtctgccgaagcctggggcagagccgattgcgacgtgaagctggtggaaaagagcttcgagacagacaccaacctgaacttccagaacctgagcgtgatcggcttcagaatcctgctgctgaaagtggccggctttaacctgctgatgaccctgcggctgtggtccagcagggccaagcgatctggatctggagcaacaaacttctcactactcaaacaagcaggtgacgtggaggagaatcccgggcctactagcatggccttaccagtgaccgccttgctcctgccgctggccttgctgctccacgccgccaggccggagatcgtgctgacacagtctcccgccacactgtcactgtctccaggcgaaagagccacactgagctgtagagccagccagagcgtgtcctcttacctggcctggtatcagcagaagcctggacaggctccccggctgctgatctacgatgccagcaatagagccacaggcatccccgccagattttctggctctggcagcggcaccgatttcaccctgaccataagcagcctggaacctgaggacttcgccgtgtactactgccagcagagaagcaactggcccctgacctttggacagggcaccaaggtggaaatcaaaggcggaggcggaagtggaggcggaggatctggcggcggaggctctcaagttcagctggttcagagcggagccgaagtgaagaaacctggcagcagcgtgaaggtgtcctgcaaagcaagcggcggcacctttagcacctacgccatccactgggttcgacaggcaccaggacaaggactggaatggatgggcagaatcatccccatcgagggcagagcctactacgcccagaaattccagggcagagtgaccatcaccgccgacgagtctacaagcaccgcctacatggaactgagcagcctgagaagcgaggataccgctgtgtactattgcgccagaggccggtacagctacagatattggttcgactactggggccagggcaccctggttacagtctcttctacgcgtatccagaaccctgatcctgccgtgtaccagctgcgggatagcaagagcagcgacaagagcgtgtgtctgttcaccgacttcgacagccagaccaacgtgtcccagagcaaggactccgacgtgtacatcaccgataagaccgtgctggacatgcggagcatggacttcaagagcaactccgccgtggcctggtccaacaagtccgatttcgcctgcgccaacgccttcaacaacagcattatccccgaggacacattcttcccaagccccgagagcagctgcggctttaccagcgagagctaccagcagggcgtgctgagcgccaccatcctgtacgagatcctgctgggcaaggccaccctgtacgccgtgctggtgtctgccctggtgctgatggctatggtcaagcggaaggacagccggggacgcgccaagagaagcggatctggcgtgaagcagaccctgaatttcgacctgctgaagctggctggcgacgtggaatccaacccaggcccttctagaggccatatgaccgagtacaagcccacggtgcgcctcgccacccgcgacgacgtccccagggccgtacgcaccctcgccgccgcgttcgccgactaccccgccacgcgccacaccgtcgatccggaccgccacatcgagcgggtcaccgagctgcaagaactcttcctcacgcgcgtcgggctcgacatcggcaaggtgtgggtcgcggacgacggcgccgcggtggcggtctggaccacgccggagagcgtcgaagcgggggcggtgttcgccgagatcggcccgcgcatggccgagttgagcggttcccggctggccgcgcagcaacagatggaaggcctcctggcgccgcaccggcccaaggagcccgcgtggttcctggccaccgtcggcgtctcgcccgaccaccagggcaagggtctgggcagcgccgtcgtgctccccggagtggaggcggccgagcgcgccggggtgcccgccttcctggagacctccgcgccccgcaacctccccttctacgagcggctcggcttcaccgtcaccgccgacgtcgaggtgcccgaaggaccgcgcacctggtgcatgacccgcaagcccggtgcctga

SEQ ID NO: 39951 - DNA, 2919 bp, synthetic construct
  source 1..2919: mol_type = other DNA
atggccttaccagtgaccgccttgctcctgccgctggccttgctgctccacgccgccaggccgctcgaggaggaggacctgaagaacgtgttcccacctgaggtggccgtgttcgagcctagcgaggccgagatcagccacacccagaaagccaccctcgtgtgcctggctaccggcttctaccccgaccatgtggaactgtcttggtgggtcaacggcaaagaggtgcacagcggcgtgtctaccgacccccagccactgaaagaacagcccgccctgaacgacagccggtactgcctgagcagcagactgagagtgtccgccaccttctggcagaacccccggaaccacttcagatgccaggtgcagttctacggcctgagcgagaacgacgagtggacccaggacagagccaagcccgtgacccagatcgtgtctgccgaagcctggggcagagccgatgatgtgattaagatccactggcaggaaaagaagtccaacaccatcctgggcagccaggaaggcaacaccatgaagaccaacgacacctacatgaagttcagctggctgaccgtgcccgagaagtccctggacaaagaacacagatgcatcgtgcggcacgaaaacaacaagaacggcgtggaccaggaaatcatcttcccacccatcaagaccgatgtgattacaatggaccccaaggacaactgctccaaggacgccaacgataccctgctgctccagctgaccaacaccagcgcctactacatgtacttgttgctgctgctgaagtccgtggtgtacttcgccatcatcacatgctgcctgctgcggagaaccgccttctgctgcaacggcgagaagtctagggccaagcgatctggatctggagcaacaaacttctcactactcaaacaagcaggtgacgtggaggagaatcccgggcctactagcatggccttaccagtgaccgccttgctcctgccgctggccttgctgctccacgccgccaggccggagatcgtgctgacacagtctcccgccacactgtcactgtctccaggcgaaagagccacactgagctgtagagccagccagagcgtgtcctcttacctggcctggtatcagcagaagcctggacaggctccccggctgctgatctacgatgccagcaatagagccacaggcatccccgccagattttctggctctggcagcggcaccgatttcaccctgaccataagcagcctggaacctgaggacttcgccgtgtactactgccagcagagaagcaactggcccctgacctttggacagggcaccaaggtggaaatcaaaggcggaggcggaagtggaggcggaggatctggcggcggaggctctcaagttcagctggttcagagcggagccgaagtgaagaaacctggcagcagcgtgaaggtgtcctgcaaagcaagcggcggcacctttagcacctacgccatccactgggttcgacaggcaccaggacaaggactggaatggatgggcagaatcatccccatcgagggcagagcctactacgcccagaaattccagggcagagtgaccatcaccgccgacgagtctacaagcaccgcctacatggaactgagcagcctgagaagcgaggataccgctgtgtactattgcgccagaggccggtacagctacagatattggttcgactactggggccagggcaccctggttacagtctcttctacgcgtatccagaaccctgatcctgccgtgtaccagctgcgggatagcaagagcagcgacaagagcgtgtgtctgttcaccgacttcgacagccagaccaacgtgtcccagagcaaggactccgacgtgtacatcaccgataagaccgtgctggacatgcggagcatggacttcaagagcaactccgccgtggcctggtccaacaagtccgatttcgcctgcgccaacgccttcaacaacagcattatccccgaggacacattcttcccaagccccgagagcagcgactccaccgaccacgtgaagcccaaagagacagagaacaccaagcagcccagcaagagctgccacaagcccaaggccatcgtgcacaccgagaaagtgaacatgatgagcctgaccgtgctgggcctgcggatgctgttcgccaaaaccgtggccgtgaacttcctgctgaccgccaagctgttcttcctccgcgccaagagaagcggatctggcgtgaagcagaccctgaatttcgacctgctgaagctggctggcgacgtggaatccaacccaggcccttctagaggccatatgaccgagtacaagcccacggtgcgcctcgccacccgcgacgacgtccccagggccgtacgcaccctcgccgccgcgttcgccgactaccccgccacgcgccacaccgtcgatccggaccgccacatcgagcgggtcaccgagctgcaagaactcttcctcacgcgcgtcgggctcgacatcggcaaggtgtgggtcgcggacgacggcgccgcggtggcggtctggaccacgccggagagcgtcgaagcgggggcggtgttcgccgagatcggcccgcgcatggccgagttgagcggttcccggctggccgcgcagcaacagatggaaggcctcctggcgccgcaccggcccaaggagcccgcgtggttcctggccaccgtcggcgtctcgcccgaccaccagggcaagggtctgggcagcgccgtcgtgctccccggagtggaggcggccgagcgcgccggggtgcccgccttcctggagacctccgcgccccgcaacctccccttctacgagcggctcggcttcaccgtcaccgccgacgtcgaggtgcccgaaggaccgcgcacctggtgcatgacccgcaagcccggtgcctga

SEQ ID NO: 39952 - DNA, 2610 bp, synthetic construct
  source 1..2610: mol_type = other DNA
atggccttaccagtgaccgccttgctcctgccgctggccttgctgctccacgccgccaggccgctcgaggaggacctgaagaacgtgttcccacctgaggtggccgtgttcgagcctagcgaggccgagatcagccacacccagaaagccaccctcgtgtgcctggctaccggcttctaccccgaccatgtggaactgtcttggtgggtcaacggcaaagaggtgcacagcggcgtgtgtaccgacccccagccactgaaagaacagcccgccctgaacgacagccggtactgcctgagcagcagactgagagtgtccgccaccttctggcagaacccccggaaccacttcagatgccaggtgcagttctacggcctgagcgagaacgacgagtggacccaggacagagccaagcccgtgacccagatcgtgtctgccgaagcctggggcagagccgattgcggctttaccagcgagagctaccagcagggcgtgctgagcgccaccaacctgagcgtgatcggcttcagaatcctgctgctgaaagtggccggctttaacctgctgatgaccctgcggctgtggtccagcagggccaagcgatctggatctggagcaacaaacttctcactactcaaacaagcaggtgacgtggaggagaatcccgggcctactagcatggccttaccagtgaccgccttgctcctgccgctggccttgctgctccacgccgccaggccggagatcgtgctgacacagtctcccgccacactgtcactgtctccaggcgaaagagccacactgagctgtagagccagccagagcgtgtcctcttacctggcctggtatcagcagaagcctggacaggctccccggctgctgatctacgatgccagcaatagagccacaggcatccccgccagattttctggctctggcagcggcaccgatttcaccctgaccataagcagcctggaacctgaggacttcgccgtgtactactgccagcagagaagcaactggcccctgacctttggacagggcaccaaggtggaaatcaaaggcggaggcggaagtggaggcggaggatctggcggcggaggctctcaagttcagctggttcagagcggagccgaagtgaagaaacctggcagcagcgtgaaggtgtcctgcaaagcaagcggcggcacctttagcacctacgccatccactgggttcgacaggcaccaggacaaggactggaatggatgggcagaatcatccccatcgagggcagagcctactacgcccagaaattccagggcagagtgaccatcaccgccgacgagtctacaagcaccgcctacatggaactgagcagcctgagaagcgaggataccgctgtgtactattgcgccagaggccggtacagctacagatattggttcgactactggggccagggcaccctggttacagtctcttctacgcgtatccagaaccctgatcctgccgtgtaccagctgcgggatagcaagagcagcgacaagagcgtgtgtctgttcaccgacttcgacagccagaccaacgtgtcccagagcaaggactccgacgtgtacatcaccgataagtgcgtgctggacatgcggagcatggacttcaagagcaactccgccgtggcctggtccaacaagtccgatttcgcctgcgccaacgccttcaacaacagcattatccccgaggacacattcttcccaagccccgagagcagctgcgacgtgaagctggtggaaaagagcttcgagacagacaccaacctgaacttccagatcctgtacgagatcctgctgggcaaggccaccctgtacgccgtgctggtgtctgccctggtgctgatggctatggtcaagcggaaggacagccggggacgcgccaagagaagcggatctggcgtgaagcagaccctgaatttcgacctgctgaagctggctggcgacgtggaatccaacccaggcccttctagaggccatatgaccgagtacaagcccacggtgcgcctcgccacccgcgacgacgtccccagggccgtacgcaccctcgccgccgcgttcgccgactaccccgccacgcgccacaccgtcgatccggaccgccacatcgagcgggtcaccgagctgcaagaactcttcctcacgcgcgtcgggctcgacatcggcaaggtgtgggtcgcggacgacggcgccgcggtggcggtctggaccacgccggagagcgtcgaagcgggggcggtgttcgccgagatcggcccgcgcatggccgagttgagcggttcccggctggccgcgcagcaacagatggaaggcctcctggcgccgcaccggcccaaggagcccgcgtggttcctggccaccgtcggcgtctcgcccgaccaccagggcaagggtctgggcagcgccgtcgtgctccccggagtggaggcggccgagcgcgccggggtgcccgccttcctggagacctccgcgccccgcaacctccccttctacgagcggctcggcttcaccgtcaccgccgacgtcgaggtgcccgaaggaccgcgcacctggtgcatgacccgcaagcccggtgcctga

SEQ ID NO: 39953 - DNA, 2697 bp, synthetic construct
  source 1..2697: mol_type = other DNA
atggccttaccagtgaccgccttgctcctgccgctggccttgctgctccacgccgccaggccgctcgaggaggaggacctgaagaacgtgttcccacctgaggtggccgtgttcgagcctagcgaggccgagatcagccacacccagaaagccaccctcgtgtgcctggctaccggcttctaccccgaccatgtggaactgtcttggtgggtcaacggcaaagaggtgcacagcggcgtgtgtaccgacccccagccactgaaagaacagcccgccctgaacgacagccggtactgcctgagcagcagactgagagtgtccgccaccttctggcagaacccccggaaccacttcagatgccaggtgcagttctacggcctgagcgagaacgacgagtggacccaggacagagccaagcccgtgacccagatcgtgtctgccgaagcctggggcagagccgattgcggctttaccagcgagagctaccagcagggcgtgctgagcgccaccaacctgagcgtgatcggcttcagaatcctgctgctgaaagtggccggctttaacctgctgatgaccctgcggctgtggtccagcagggccaagcgatctggatctggagcaacaaacttctcactactcaaacaagcaggtgacgtggaggagaatcccgggcctactagcatggccttaccagtgaccgccttgctcctgccgctggccttgctgctccacgccgccaggccggagatcgtgctgacacagtctcccgccacactgtcactgtctccaggcgaaagagccacactgagctgtagagccagccagagcgtgtcctcttacctggcctggtatcagcagaagcctggacaggctccccggctgctgatctacgatgccagcaatagagccacaggcatccccgccagattttctggctctggcagcggcaccgatttcaccctgaccataagcagcctggaacctgaggacttcgccgtgtactactgccagcagagaagcaactggcccctgacctttggacagggcaccaaggtggaaatcaaaggcggaggcggaagtggaggcggaggatctggcggcggaggctctcaagttcagctggttcagagcggagccgaagtgaagaaacctggcagcagcgtgaaggtgtcctgcaaagcaagcggcggcacctttagcacctacgccatccactgggttcgacaggcaccaggacaaggactggaatggatgggcagaatcatccccatcgagggcagagcctactacgcccagaaattccagggcagagtgaccatcaccgccgacgagtctacaagcaccgcctacatggaactgagcagcctgagaagcgaggataccgctgtgtactattgcgccagaggccggtacagctacagatattggttcgactactggggccagggcaccctggttacagtctcttctacgcgtggacagcctaaggccaatcctaccgtgacactgttccctccaagcagcgaagaactccaggccaacaaggccacacttgtgtgcctgatctccgacttctaccctggggctgtgacagtggcttggaaggccgatggatctcctgtgaaagccggcgtggaaaccaccaagccatccaagcagagcaacaacaaatacgccgccagctcctacctgagcctgacacctgagcagtggaagtcccacagatcctacagctgccaagtgacccacgaaggcagcaccgtggaaaagacagtggcccctacagagtgcagccccatcaagaccgatgtgattacaatggaccccaaggacaactgctccaaggacgccaacgataccctgctgctccagctgaccaacaccagcgcctactacatgtacttgttgctgctgctgaagtccgtggtgtacttcgccatcatcacatgctgcctgctgcggagaaccgccttctgctgcaacggcgagaagtctcgcgccaagagaagcggatctggcgtgaagcagaccctgaatttcgacctgctgaagctggctggcgacgtggaatccaacccaggcccttctagaggccatatgaccgagtacaagcccacggtgcgcctcgccacccgcgacgacgtccccagggccgtacgcaccctcgccgccgcgttcgccgactaccccgccacgcgccacaccgtcgatccggaccgccacatcgagcgggtcaccgagctgcaagaactcttcctcacgcgcgtcgggctcgacatcggcaaggtgtgggtcgcggacgacggcgccgcggtggcggtctggaccacgccggagagcgtcgaagcgggggcggtgttcgccgagatcggcccgcgcatggccgagttgagcggttcccggctggccgcgcagcaacagatggaaggcctcctggcgccgcaccggcccaaggagcccgcgtggttcctggccaccgtcggcgtctcgcccgaccaccagggcaagggtctgggcagcgccgtcgtgctccccggagtggaggcggccgagcgcgccggggtgcccgccttcctggagacctccgcgccccgcaacctccccttctacgagcggctcggcttcaccgtcaccgccgacgtcgaggtgcccgaaggaccgcgcacctggtgcatgacccgcaagcccggtgcctga

SEQ ID NO: 39954 - DNA, 2697 bp, synthetic construct
  source 1..2697: mol_type = other DNA
atggccttaccagtgaccgccttgctcctgccgctggccttgctgctccacgccgccaggccgctcgagggacagcctaaggccaatcctaccgtgacactgttccctccaagcagcgaagaactccaggccaacaaggccacacttgtgtgcctgatctccgacttctaccctggggctgtgacagtggcttggaaggccgatggatctcctgtgaaagccggcgtggaaaccaccaagccatccaagcagagcaacaacaaatacgccgccagctcctacctgagcctgacacctgagcagtggaagtcccacagatcctacagctgccaagtgacccacgaaggcagcaccgtggaaaagacagtggcccctacagagtgcagccccatcaagaccgatgtgattacaatggaccccaaggacaactgctccaaggacgccaacgataccctgctgctccagctgaccaacaccagcgcctactacatgtacttgttgctgctgctgaagtccgtggtgtacttcgccatcatcacatgctgcctgctgcggagaaccgccttctgctgcaacggcgagaagtctagggccaagcgatctggatctggagcaacaaacttctcactactcaaacaagcaggtgacgtggaggagaatcccgggcctactagcatggccttaccagtgaccgccttgctcctgccgctggccttgctgctccacgccgccaggccggagatcgtgctgacacagtctcccgccacactgtcactgtctccaggcgaaagagccacactgagctgtagagccagccagagcgtgtcctcttacctggcctggtatcagcagaagcctggacaggctccccggctgctgatctacgatgccagcaatagagccacaggcatccccgccagattttctggctctggcagcggcaccgatttcaccctgaccataagcagcctggaacctgaggacttcgccgtgtactactgccagcagagaagcaactggcccctgacctttggacagggcaccaaggtggaaatcaaaggcggaggcggaagtggaggcggaggatctggcggcggaggctctcaagttcagctggttcagagcggagccgaagtgaagaaacctggcagcagcgtgaaggtgtcctgcaaagcaagcggcggcacctttagcacctacgccatccactgggttcgacaggcaccaggacaaggactggaatggatgggcagaatcatccccatcgagggcagagcctactacgcccagaaattccagggcagagtgaccatcaccgccgacgagtctacaagcaccgcctacatggaactgagcagcctgagaagcgaggataccgctgtgtactattgcgccagaggccggtacagctacagatattggttcgactactggggccagggcaccctggttacagtctcttctacgcgtgaggaggacctgaagaacgtgttcccacctgaggtggccgtgttcgagcctagcgaggccgagatcagccacacccagaaagccaccctcgtgtgcctggctaccggcttctaccccgaccatgtggaactgtcttggtgggtcaacggcaaagaggtgcacagcggcgtgtgtaccgacccccagccactgaaagaacagcccgccctgaacgacagccggtactgcctgagcagcagactgagagtgtccgccaccttctggcagaacccccggaaccacttcagatgccaggtgcagttctacggcctgagcgagaacgacgagtggacccaggacagagccaagcccgtgacccagatcgtgtctgccgaagcctggggcagagccgattgcggctttaccagcgagagctaccagcagggcgtgctgagcgccaccaacctgagcgtgatcggcttcagaatcctgctgctgaaagtggccggctttaacctgctgatgaccctgcggctgtggtccagccgcgccaagagaagcggatctggcgtgaagcagaccctgaatttcgacctgctgaagctggctggcgacgtggaatccaacccaggcccttctagaggccatatgaccgagtacaagcccacggtgcgcctcgccacccgcgacgacgtccccagggccgtacgcaccctcgccgccgcgttcgccgactaccccgccacgcgccacaccgtcgatccggaccgccacatcgagcgggtcaccgagctgcaagaactcttcctcacgcgcgtcgggctcgacatcggcaaggtgtgggtcgcggacgacggcgccgcggtggcggtctggaccacgccggagagcgtcgaagcgggggcggtgttcgccgagatcggcccgcgcatggccgagttgagcggttcccggctggccgcgcagcaacagatggaaggcctcctggcgccgcaccggcccaaggagcccgcgtggttcctggccaccgtcggcgtctcgcccgaccaccagggcaagggtctgggcagcgccgtcgtgctccccggagtggaggcggccgagcgcgccggggtgcccgccttcctggagacctccgcgccccgcaacctccccttctacgagcggctcggcttcaccgtcaccgccgacgtcgaggtgcccgaaggaccgcgcacctggtgcatgacccgcaagcccggtgcctga

SEQ ID NO: 39955 - DNA, 2688 bp, synthetic construct
  source 1..2688: mol_type = other DNA
atggccttaccagtgaccgccttgctcctgccgctggccttgctgctccacgccgccaggccgctcgaggaggcctctacaaagggaccctccgtgtttcctctggctcccagcagcaagtctacaagcggaggaacagccgctctgggctgcctggtcaaggattactttcccgagcctgtgaccgtgtcctggaatagcggagcactgacaagcggcgtgcacacctttccagccgtgctgcaaagcagcggcctgtactctctgagcagcgtggtcacagtgcctagctctagcctgggcacccagacctacatctgcaatgtgaaccacaagcctagcaacaccaaggtggacaagagagtggaacccaagagctgtcccatcaagaccgatgtgattacaatggaccccaaggacaactgctccaaggacgccaacgataccctgctgctccagctgaccaacaccagcgcctactacatgtacttgttgctgctgctgaagtccgtggtgtacttcgccatcatcacatgctgcctgctgcggagaaccgccttctgctgcaacggcgagaagtctagggccaagcgatctggatctggagcaacaaacttctcactactcaaacaagcaggtgacgtggaggagaatcccgggcctactagcatggccttaccagtgaccgccttgctcctgccgctggccttgctgctccacgccgccaggccggagatcgtgctgacacagtctcccgccacactgtcactgtctccaggcgaaagagccacactgagctgtagagccagccagagcgtgtcctcttacctggcctggtatcagcagaagcctggacaggctccccggctgctgatctacgatgccagcaatagagccacaggcatccccgccagattttctggctctggcagcggcaccgatttcaccctgaccataagcagcctggaacctgaggacttcgccgtgtactactgccagcagagaagcaactggcccctgacctttggacagggcaccaaggtggaaatcaaaggcggaggcggaagtggaggcggaggatctggcggcggaggctctcaagttcagctggttcagagcggagccgaagtgaagaaacctggcagcagcgtgaaggtgtcctgcaaagcaagcggcggcacctttagcacctacgccatccactgggttcgacaggcaccaggacaaggactggaatggatgggcagaatcatccccatcgagggcagagcctactacgcccagaaattccagggcagagtgaccatcaccgccgacgagtctacaagcaccgcctacatggaactgagcagcctgagaagcgaggataccgctgtgtactattgcgccagaggccggtacagctacagatattggttcgactactggggccagggcaccctggttacagtctcttctacgcgtggacagcctaaggccaatcctaccgtgacactgttccctccaagcagcgaagaactccaggccaacaaggccacacttgtgtgcctgatctccgacttctaccctggggctgtgacagtggcttggaaggccgatggatctcctgtgaaagccggcgtggaaaccaccaagccatccaagcagagcaacaacaaatacgccgccagctcctacctgagcctgacacctgagcagtggaagtcccacagatcctacagctgccaagtgacccacgaaggcagcaccgtggaaaagacagtggcccctacagagtgcagcgaagtgaaaaccgactccaccgaccacgtgaagcccaaagagacagagaacaccaagcagcccagcaagagctgccacaagcccaaggccatcgtgcacaccgagaaagtgaacatgatgagcctgaccgtgctgggcctgcggatgctgttcgccaaaaccgtggccgtgaacttcctgctgaccgccaagctgttcttcctccgcgccaagagaagcggatctggcgtgaagcagaccctgaatttcgacctgctgaagctggctggcgacgtggaatccaacccaggcccttctagaggccatatgaccgagtacaagcccacggtgcgcctcgccacccgcgacgacgtccccagggccgtacgcaccctcgccgccgcgttcgccgactaccccgccacgcgccacaccgtcgatccggaccgccacatcgagcgggtcaccgagctgcaagaactcttcctcacgcgcgtcgggctcgacatcggcaaggtgtgggtcgcggacgacggcgccgcggtggcggtctggaccacgccggagagcgtcgaagcgggggcggtgttcgccgagatcggcccgcgcatggccgagttgagcggttcccggctggccgcgcagcaacagatggaaggcctcctggcgccgcaccggcccaaggagcccgcgtggttcctggccaccgtcggcgtctcgcccgaccaccagggcaagggtctgggcagcgccgtcgtgctccccggagtggaggcggccgagcgcgccggggtgcccgccttcctggagacctccgcgccccgcaacctccccttctacgagcggctcggcttcaccgtcaccgccgacgtcgaggtgcccgaaggaccgcgcacctggtgcatgacccgcaagcccggtgcctga

SEQ ID NO: 39956 - DNA, 2622 bp, synthetic construct
  source 1..2622: mol_type = other DNA
atggccttaccagtgaccgccttgctcctgccgctggccttgctgctccacgccgccaggccgctcgaggaggcctctacaaagggaccctccgtgtttcctctggctcccagcagcaagtctacaagcggaggaacagccgctctgggctgcctggtcaaggattactttcccgagcctgtgaccgtgtcctggaatagcggagcactgacaagcggcgtgcacacctttccagccgtgctgcaaagcagcggcctgtactctctgagcagcgtggtcacagtgcctagctctagcctgggcacccagacctacatctgcaatgtgaaccacaagcctagcaacaccaaggtggacaagagagtggaacccaagagctgtggcagagccgattgcggctttaccagcgagagctaccagcagggcgtgctgagcgccaccatcctgtacgagatcctgctgggcaaggccaccctgtacgccgtgctggtgtctgccctggtgctgatggctatggtcaagcggaaggacagccggggaagggccaagcgatctggatctggagcaacaaacttctcactactcaaacaagcaggtgacgtggaggagaatcccgggcctactagcatggccttaccagtgaccgccttgctcctgccgctggccttgctgctccacgccgccaggccggagatcgtgctgacacagtctcccgccacactgtcactgtctccaggcgaaagagccacactgagctgtagagccagccagagcgtgtcctcttacctggcctggtatcagcagaagcctggacaggctccccggctgctgatctacgatgccagcaatagagccacaggcatccccgccagattttctggctctggcagcggcaccgatttcaccctgaccataagcagcctggaacctgaggacttcgccgtgtactactgccagcagagaagcaactggcccctgacctttggacagggcaccaaggtggaaatcaaaggcggaggcggaagtggaggcggaggatctggcggcggaggctctcaagttcagctggttcagagcggagccgaagtgaagaaacctggcagcagcgtgaaggtgtcctgcaaagcaagcggcggcacctttagcacctacgccatccactgggttcgacaggcaccaggacaaggactggaatggatgggcagaatcatccccatcgagggcagagcctactacgcccagaaattccagggcagagtgaccatcaccgccgacgagtctacaagcaccgcctacatggaactgagcagcctgagaagcgaggataccgctgtgtactattgcgccagaggccggtacagctacagatattggttcgactactggggccagggcaccctggttacagtctcttctacgcgtggacagcctaaggccaatcctaccgtgacactgttccctccaagcagcgaagaactccaggccaacaaggccacacttgtgtgcctgatctccgacttctaccctggggctgtgacagtggcttggaaggccgatggatctcctgtgaaagccggcgtggaaaccaccaagccatccaagcagagcaacaacaaatacgccgccagctcctacctgagcctgacacctgagcagtggaagtcccacagatcctacagctgccaagtgacccacgaaggcagcaccgtggaaaagacagtggcccctacagagtgcagcatccccgaggacacattcttcccaagccccgagagcagctgcgacgtgaagctggtggaaaagagcttcgagacagacaccaacctgaacttccagaacctgagcgtgatcggcttcagaatcctgctgctgaaagtggccggctttaacctgctgatgaccctgcggctgtggtccagccgcgccaagagaagcggatctggcgtgaagcagaccctgaatttcgacctgctgaagctggctggcgacgtggaatccaacccaggcccttctagaggccatatgaccgagtacaagcccacggtgcgcctcgccacccgcgacgacgtccccagggccgtacgcaccctcgccgccgcgttcgccgactaccccgccacgcgccacaccgtcgatccggaccgccacatcgagcgggtcaccgagctgcaagaactcttcctcacgcgcgtcgggctcgacatcggcaaggtgtgggtcgcggacgacggcgccgcggtggcggtctggaccacgccggagagcgtcgaagcgggggcggtgttcgccgagatcggcccgcgcatggccgagttgagcggttcccggctggccgcgcagcaacagatggaaggcctcctggcgccgcaccggcccaaggagcccgcgtggttcctggccaccgtcggcgtctcgcccgaccaccagggcaagggtctgggcagcgccgtcgtgctccccggagtggaggcggccgagcgcgccggggtgcccgccttcctggagacctccgcgccccgcaacctccccttctacgagcggctcggcttcaccgtcaccgccgacgtcgaggtgcccgaaggaccgcgcacctggtgcatgacccgcaagcccggtgcctga

SEQ ID NO: 39957 - DNA, 2622 bp, synthetic construct
  source 1..2622: mol_type = other DNA
atggccttaccagtgaccgccttgctcctgccgctggccttgctgctccacgccgccaggccgctcgaggaggcctctacaaagggaccctccgtgtttcctctggctcccagcagcaagtctacaagcggaggaacagccgctctgggctgcctggtcaaggattactttcccgagcctgtgaccgtgtcctggaatagcggagcactgacaagcggcgtgcacacctttccagccgtgctgcaaagcagcggcctgtactctctgagcagcgtggtcacagtgcctagctctagcctgggcacccagacctacatctgcaatgtgaaccacaagcctagcaacaccaaggtggacaagagagtggaacccaagagctgtatccccgaggacacattcttcccaagccccgagagcagctgcgacgtgaagctggtggaaaagagcttcgagacagacaccaacctgaacttccagaacctgagcgtgatcggcttcagaatcctgctgctgaaagtggccggctttaacctgctgatgaccctgcggctgtggtccagcagggccaagcgatctggatctggagcaacaaacttctcactactcaaacaagcaggtgacgtggaggagaatcccgggcctactagcatggccttaccagtgaccgccttgctcctgccgctggccttgctgctccacgccgccaggccggagatcgtgctgacacagtctcccgccacactgtcactgtctccaggcgaaagagccacactgagctgtagagccagccagagcgtgtcctcttacctggcctggtatcagcagaagcctggacaggctccccggctgctgatctacgatgccagcaatagagccacaggcatccccgccagattttctggctctggcagcggcaccgatttcaccctgaccataagcagcctggaacctgaggacttcgccgtgtactactgccagcagagaagcaactggcccctgacctttggacagggcaccaaggtggaaatcaaaggcggaggcggaagtggaggcggaggatctggcggcggaggctctcaagttcagctggttcagagcggagccgaagtgaagaaacctggcagcagcgtgaaggtgtcctgcaaagcaagcggcggcacctttagcacctacgccatccactgggttcgacaggcaccaggacaaggactggaatggatgggcagaatcatccccatcgagggcagagcctactacgcccagaaattccagggcagagtgaccatcaccgccgacgagtctacaagcaccgcctacatggaactgagcagcctgagaagcgaggataccgctgtgtactattgcgccagaggccggtacagctacagatattggttcgactactggggccagggcaccctggttacagtctcttctacgcgtggacagcctaaggccaatcctaccgtgacactgttccctccaagcagcgaagaactccaggccaacaaggccacacttgtgtgcctgatctccgacttctaccctggggctgtgacagtggcttggaaggccgatggatctcctgtgaaagccggcgtggaaaccaccaagccatccaagcagagcaacaacaaatacgccgccagctcctacctgagcctgacacctgagcagtggaagtcccacagatcctacagctgccaagtgacccacgaaggcagcaccgtggaaaagacagtggcccctacagagtgcagcggcagagccgattgcggctttaccagcgagagctaccagcagggcgtgctgagcgccaccatcctgtacgagatcctgctgggcaaggccaccctgtacgccgtgctggtgtctgccctggtgctgatggctatggtcaagcggaaggacagccggggacgcgccaagagaagcggatctggcgtgaagcagaccctgaatttcgacctgctgaagctggctggcgacgtggaatccaacccaggcccttctagaggccatatgaccgagtacaagcccacggtgcgcctcgccacccgcgacgacgtccccagggccgtacgcaccctcgccgccgcgttcgccgactaccccgccacgcgccacaccgtcgatccggaccgccacatcgagcgggtcaccgagctgcaagaactcttcctcacgcgcgtcgggctcgacatcggcaaggtgtgggtcgcggacgacggcgccgcggtggcggtctggaccacgccggagagcgtcgaagcgggggcggtgttcgccgagatcggcccgcgcatggccgagttgagcggttcccggctggccgcgcagcaacagatggaaggcctcctggcgccgcaccggcccaaggagcccgcgtggttcctggccaccgtcggcgtctcgcccgaccaccagggcaagggtctgggcagcgccgtcgtgctccccggagtggaggcggccgagcgcgccggggtgcccgccttcctggagacctccgcgccccgcaacctccccttctacgagcggctcggcttcaccgtcaccgccgacgtcgaggtgcccgaaggaccgcgcacctggtgcatgacccgcaagcccggtgcctga

SEQ ID NO: 39958 - DNA, 1860 bp, synthetic construct
  source 1..1860: mol_type = other DNA
atggccttaccagtgaccgccttgctcctgccgctggccttgctgctccacgccgccaggccggagatcgtgctgacacagtctcccgccacactgtcactgtctccaggcgaaagagccacactgagctgtagagccagccagagcgtgtcctcttacctggcctggtatcagcagaagcctggacaggctccccggctgctgatctacgatgccagcaatagagccacaggcatccccgccagattttctggctctggcagcggcaccgatttcaccctgaccataagcagcctggaacctgaggacttcgccgtgtactactgccagcagagaagcaactggcccctgacctttggacagggcaccaaggtggaaatcaaactcgaggacctgaagaacgtgttcccacctgaggtggccgtgttcgagcctagcgaggccgagatcagccacacccagaaagccaccctcgtgtgcctggctaccggcttctaccccgaccatgtggaactgtcttggtgggtcaacggcaaagaggtgcacagcggcgtgtgtaccgacccccagccactgaaagaacagcccgccctgaacgacagccggtactgcctgagcagcagactgagagtgtccgccaccttctggcagaacccccggaaccacttcagatgccaggtgcagttctacggcctgagcgagaacgacgagtggacccaggacagagccaagcccgtgacccagatcgtgtctgccgaagcctggggcagagccgatagcggctttaccagcgagagctaccagcagggcgtgctgagcgccaccatcctgtacgagatcctgctgggcaaggccaccctgtacgccgtgctggtgtctgccctggtgctgatggctatggtcaagcggaaggacagccggggaagggccaagcgatctggatctggagcaacaaacttctcactactcaaacaagcaggtgacgtggaggagaatcccgggcctactagtatggactggatttggcgcatccttttccttgtcggcgctgctaccggcgcgcattccttcgaacaagttcagctggttcagagcggagccgaagtgaagaaacctggcagcagcgtgaaggtgtcctgcaaagcaagcggcggcacctttagcacctacgccatccactgggttcgacaggcaccaggacaaggactggaatggatgggcagaatcatccccatcgagggcagagcctactacgcccagaaattccagggcagagtgaccatcaccgccgacgagtctacaagcaccgcctacatggaactgagcagcctgagaagcgaggataccgctgtgtactattgcgccagaggccggtacagctacagatattggttcgactactggggccagggcaccctggttacagtctcttctacgcgtatccagaaccctgatcctgccgtgtaccagctgcgggatagcaagagcagcgacaagagcgtgtgtctgttcaccgacttcgacagccagaccaacgtgtcccagagcaaggactccgacgtgtacatcaccgataagtgcgtgctggacatgcggagcatggacttcaagagcaactccgccgtggcctggtccaacaagtccgatttcgcctgcgccaacgccttcaacaacagcattatccccgaggacacattcttcccaagccccgagagcagcagcgacgtgaagctggtggaaaagagcttcgagacagacaccaacctgaacttccagaacctgagcgtgatcggcttcagaatcctgctgctgaaagtggccggctttaacctgctgatgaccctgcggctgtggtccagc

SEQ ID NO: 39959 - DNA, 2700 bp, synthetic construct
  source 1..2700: mol_type = other DNA
atggccttaccagtgaccgccttgctcctgccgctggccttgctgctccacgccgccaggccggaggttcagctgcttgagtctggcggaggactggttcaacctggcggaagcctgagactgtcttgtgccgcctctggcagaaccttcagcatgggctggtatagacaggcccctggcaagggcctcgaatttgtgtctgccatcacatacagcggcggcagcccttactacgccgattctgtgaagggcagattcaccatcagccgggacaacagcaagaacaccgtgtacctccagatgaacagcctgagagccgaggacaccgccgtgtactactgtgccgccaatccaacctacggcagcgactggaatgccgagaattggggccagggcacactggtcacagtgtctagtggtaccggcggaggcggatctggcggcggaggtagcggtggcggaggatctgaattcgagatcgtgctgacacagtctcccgccacactgtcactgtctccaggcgaaagagccacactgagctgtagagccagccagagcgtgtcctcttacctggcctggtatcagcagaagcctggacaggctccccggctgctgatctacgatgccagcaatagagccacaggcatccccgccagattttctggctctggcagcggcaccgatttcaccctgaccataagcagcctggaacctgaggacttcgccgtgtactactgccagcagagaagcaactggcccctgacctttggacagggcaccaaggtggaaatcaaactcgagatccagaaccctgatcctgccgtgtaccagctgcgggatagcaagagcagcgacaagagcgtgtgtctgttcaccgacttcgacagccagaccaacgtgtcccagagcaaggactccgacgtgtacatcaccgataagtgcgtgctggacatgcggagcatggacttcaagagcaactccgccgtggcctggtccaacaagtccgatttcgcctgcgccaacgccttcaacaacagcattatccccgaggacacattcttcccaagcagcgacgtgccctgcgacgtgaagctggtggaaaagagcttcgagacagacaccaacctgaacttccagaacctgagcgtgatcggcttcagaatcctgctgctgaaagtggccggctttaacctgctgatgaccctgcggctgtggtccagccgcgccaagagaagcggatctggcgtgaagcagaccctgaatttcgacctgctgaagctggctggcgacgtggaatccaacccaggccctactagtaccatggactggatttggcgcatccttttccttgtcggcgctgctaccggcacccattccgggcccgaagtgcaactggttgaatccggtggcggcctggtgcaacccggcggatctctcagacttagctgtgccgcctccggcagaaccttcacaatgggatggtacaggcaggctccagggaaagagagagagttcgtcgccgccatctctctgtctcccacactggcctactacgccgactctgtgaaaggccggttcaccatctccagagataatagcaagaacaccgtggtgctgcaaatgaactctctgagagccgaggatacagccctgtactattgtgccgctgaccggaagtccgtgatgagcatcagacccgattactggggacagggcacactggtcacagtgtctagtggatccggcggcggaggatctggcggaggcggatctgggggcggaggctctttcgaacaagttcagctggttcagagcggagccgaagtgaagaaacctggcagcagcgtgaaggtgtcctgcaaagcaagcggcggcacctttagcacctacgccatccactgggttcgacaggcaccaggacaaggactggaatggatgggcagaatcatccccatcgagggcagagcctactacgcccagaaattccagggcagagtgaccatcaccgccgacgagtctacaagcaccgcctacatggaactgagcagcctgagaagcgaggataccgctgtgtactattgcgccagaggccggtacagctacagatattggttcgactactggggccagggcaccctggttacagtctcttctacgcgtgaggacctgaagaacgtgttcccacctgaggtggccgtgttcgagcctagcaaggccgagatcgcccacacccagaaagccaccctcgtgtgcctggctaccggcttctaccccgaccatgtggaactgtcttggtgggtcaacggcaaagaggtgcacagcggcgtgtgtaccgacccccagccactgaaagaacagcccgccctgaacgacagccggtactgcctgagcagcagactgagagtgtccgccaccttctggcagaacccccggaaccacttcagatgccaggtgcagttctacggcctgagcgagaacgacgagtggacccaggacagagccaagcccgtgacccagatcgtgtctgccgaagcctggggcagagccgattgcggcatcaccagcgccagctaccaccagggcgtgctgagcgccaccatcctgtacgagatcctgctgggcaaggccaccctgtacgccgtgctggtgtctgccctggtgctgatggctatggtcaagcggaaggacagccggggataa

SEQ ID NO: 39960 - DNA, 2700 bp, synthetic construct
  source 1..2700: mol_type = other DNA
atggccttaccagtgaccgccttgctcctgccgctggccttgctgctccacgccgccaggccggaagtgcagctggttgaatctggcggaggactggttcaggctggcggatctctgagactgtcttgtgccgccagcggcagaacctttagcatgggctggtttagacaggcccctggcaaagagagagagttcgtcgccgccatcacatactctggcggcagcccttactacgccgactctgtgaagggcagattcaccatcagccgggacaacgccaagaacaccgtgtacctccagatgaacagcctgaagcctgaggacaccgccgtgtactactgcgccgccaatccaacatacggcagcgactggaacgccgagaattggggccagggaacccaagtgacagtgtctagcggtaccggcggaggcggatctggcggcggaggtagcggtggcggaggatctgaattcgagatcgtgctgacacagtctcccgccacactgtcactgtctccaggcgaaagagccacactgagctgtagagccagccagagcgtgtcctcttacctggcctggtatcagcagaagcctggacaggctccccggctgctgatctacgatgccagcaatagagccacaggcatccccgccagattttctggctctggcagcggcaccgatttcaccctgaccataagcagcctggaacctgaggacttcgccgtgtactactgccagcagagaagcaactggcccctgacctttggacagggcaccaaggtggaaatcaaactcgagatccagaaccctgatcctgccgtgtaccagctgcgggatagcaagagcagcgacaagagcgtgtgtctgttcaccgacttcgacagccagaccaacgtgtcccagagcaaggactccgacgtgtacatcaccgataagtgcgtgctggacatgcggagcatggacttcaagagcaactccgccgtggcctggtccaacaagtccgatttcgcctgcgccaacgccttcaacaacagcattatccccgaggacacattcttcccaagcagcgacgtgccctgcgacgtgaagctggtggaaaagagcttcgagacagacaccaacctgaacttccagaacctgagcgtgatcggcttcagaatcctgctgctgaaagtggccggctttaacctgctgatgaccctgcggctgtggtccagccgcgccaagagaagcggatctggcgtgaagcagaccctgaatttcgacctgctgaagctggctggcgacgtggaatccaacccaggccctactagtaccatggactggatttggcgcatccttttccttgtcggcgctgctaccggcgcccattccgggcccgaagtgcaactggttgaatccggtggcggcctggtgcaacccggcggatctctcagacttagctgtgccgcctccggcagaaccttcacaatgggatggtacaggcaggctccagggaaagagagagagttcgtcgccgccatctctctgtctcccacactggcctactacgccgactctgtgaaaggccggttcaccatctccagagataatagcaagaacaccgtggtgctgcaaatgaactctctgagagccgaggatacagccctgtactattgtgccgctgaccggaagtccgtgatgagcatcagacccgattactggggacagggcacactggtcacagtgtctagtggatccggcggcggaggatctggcggaggcggatctgggggcggaggctctttcgaacaagttcagctggttcagagcggagccgaagtgaagaaacctggcagcagcgtgaaggtgtcctgcaaagcaagcggcggcacctttagcacctacgccatccactgggttcgacaggcaccaggacaaggactggaatggatgggcagaatcatccccatcgagggcagagcctactacgcccagaaattccagggcagagtgaccatcaccgccgacgagtctacaagcaccgcctacatggaactgagcagcctgagaagcgaggataccgctgtgtactattgcgccagaggccggtacagctacagatattggttcgactactggggccagggcaccctggttacagtctcttctacgcgtgaggacctgaagaacgtgttcccacctgaggtggccgtgttcgagcctagcaaggccgagatcgcccacacccagaaagccaccctcgtgtgcctggctaccggcttctaccccgaccatgtggaactgtcttggtgggtcaacggcaaagaggtgcacagcggcgtgtgtaccgacccccagccactgaaagaacagcccgccctgaacgacagccggtactgcctgagcagcagactgagagtgtccgccaccttctggcagaacccccggaaccacttcagatgccaggtgcagttctacggcctgagcgagaacgacgagtggacccaggacagagccaagcccgtgacccagatcgtgtctgccgaagcctggggcagagccgattgcggcatcaccagcgccagctaccaccagggcgtgctgagcgccaccatcctgtacgagatcctgctgggcaaggccaccctgtacgccgtgctggtgtctgccctggtgctgatggctatggtcaagcggaaggacagccggggataa

SEQ ID NO: 39961 - DNA, 2691 bp, synthetic construct
  source 1..2691: mol_type = other DNA
atggccttaccagtgaccgccttgctcctgccgctggccttgctgctccacgccgccaggccggaagtgcagctggttgaatctggcggaggactggttcaggctggcggatctctgagactgtcttgtgccgccagcggcagaacctttagcatgggctggtttagacaggcccctggcaaagagagagagttcgtcgccgccatcacatactctggcggcagcccttactacgccgactctgtgaagggcagattcaccatcagccgggacaacgccaagaacaccgtgtacctccagatgaacagcctgaagcctgaggacaccgccgtgtactactgcgccgccaatccaacatacggcagcgactggaacgccgagaattggggccagggaacccaagtgacagtgtctagcggtaccggcggaggcggatctggcggcggaggtagcggtggcggaggatctgaattcgagatcgtgctgacacagtctcccgccacactgtcactgtctccaggcgaaagagccacactgagctgtagagccagccagagcgtgtcctcttacctggcctggtatcagcagaagcctggacaggctccccggctgctgatctacgatgccagcaatagagccacaggcatccccgccagattttctggctctggcagcggcaccgatttcaccctgaccataagcagcctggaacctgaggacttcgccgtgtactactgccagcagagaagcaactggcccctgacctttggacagggcaccaaggtggaaatcaaactcgaggacctgaagaacgtgttcccacctgaggtggccgtgttcgagcctagcgaggccgagatcagccacacccagaaagccaccctcgtgtgcctggctaccggcttctaccccgaccatgtggaactgtcttggtgggtcaacggcaaagaggtgcacagcggcgtgtgtaccgacccccagccactgaaagaacagcccgccctgaacgacagccggtactgcctgagcagcagactgagagtgtccgccaccttctggcagaacccccggaaccacttcagatgccaggtgcagttctacggcctgagcgagaacgacgagtggacccaggacagagccaagcccgtgacccagatcgtgtctgccgaagcctggggcagagccgattgcggctttaccagcgagagctaccagcagggcgtgctgagcgccaccatcctgtacgagatcctgctgggcaaggccaccctgtacgccgtgctggtgtctgccctggtgctgatggctatggtcaagcggaaggacagccggggaagggccaagcgatctggatctggagcaacaaacttctcactactcaaacaagcaggtgacgtggaggagaatcccgggcctactagtgccaccatggactggatttggcgcatccttttccttgtcggcgctgctaccggcgcccattccgggcccgaagtgcaactggttgaatccggtggcggcctggtgcaagcaggcggatctctcagacttagctgtgccgcctccggcagaaccttcacaatgggatggtttaggcaggctccagggaaagagagagagttcgtcgccgccatctctctgtctcccacactggcctactacgccgactctgtgaaaggccggttcaccatctccagagataatgccaagaacaccgtggtgctgcaaatgaactctctgaaacccgaggatacagccctgtactattgtgccgctgaccggaagtccgtgatgagcatcagacccgattactggggacagggcacacaagtcacagtgtcctctggatccggcggcggaggatctggcggaggcggatctgggggcggaggctctttcgaacaagttcagctggttcagagcggagccgaagtgaagaaacctggcagcagcgtgaaggtgtcctgcaaagcaagcggcggcacctttagcacctacgccatccactgggttcgacaggcaccaggacaaggactggaatggatgggcagaatcatccccatcgagggcagagcctactacgcccagaaattccagggcagagtgaccatcaccgccgacgagtctacaagcaccgcctacatggaactgagcagcctgagaagcgaggataccgctgtgtactattgcgccagaggccggtacagctacagatattggttcgactactggggccagggcaccctggttacagtctcttctacgcgtatccagaaccctgatcctgccgtgtaccagctgcgggatagcaagagcagcgacaagagcgtgtgtctgttcaccgacttcgacagccagaccaacgtgtcccagagcaaggactccgacgtgtacatcaccgataagtgcgtgctggacatgcggagcatggacttcaagagcaactccgccgtggcctggtccaacaagtccgatttcgcctgcgccaacgccttcaacaacagcattatccccgaggacacattcttcccaagccccgagagcagctgcgacgtgaagctggtggaaaagagcttcgagacagacaccaacctgaacttccagaacctgagcgtgatcggcttcagaatcctgctgctgaaagtggccggctttaacctgctgatgaccctgcggctgtggtccagctaa

SEQ ID NO: 39962 - DNA, 2304 bp, synthetic construct
  source 1..2304: mol_type = other DNA
atggccttaccagtgaccgccttgctcctgccgctggccttgctgctccacgccgccaggccggaagtgcagctggttgaatctggcggaggactggttcagcctggcggatctctgagactgagctgtgaagccagcggcttcgccagcgacgattacatcatcggctggttcagacaggcccctggcaaagagagagagggcgtcagctgcatcagctctaagtacgccaacaccgtgtacaccgacagcgtgaagggcagattcagactgagcagaggcaccgccaagaataccgtgtacctccagatgagcgccctgaagcctgaggataccgccgtgtactactgcgctatggacagccgcagagtgacatgccctgagatcagcaccatgcaccggaacttcgattcttggggccagggcacactggtcacagtgtcatctggtaccggcggaggcggatctggcggcggaggtagcggtggcggaggatctgaattcgagatcgtgctgacacagtctcccgccacactgtcactgtctccaggcgaaagagccacactgagctgtagagccagccagagcgtgtcctcttacctggcctggtatcagcagaagcctggacaggctccccggctgctgatctacgatgccagcaatagagccacaggcatccccgccagattttctggctctggcagcggcaccgatttcaccctgaccataagcagcctggaacctgaggacttcgccgtgtactactgccagcagagaagcaactggcccctgacctttggacagggcaccaaggtggaaatcaaactcgaggacctgaagaacgtgttcccacctgaggtggccgtgttcgagcctagcaaggccgagatcgcccacacccagaaagccaccctcgtgtgcctggctaccggcttctaccccgaccatgtggaactgtcttggtgggtcaacggcaaagaggtgcacagcggcgtgtgtaccgacccccagccactgaaagaacagcccgccctgaacgacagccggtactgcctgagcagcagactgagagtgtccgccaccttctggcagaacccccggaaccacttcagatgccaggtgcagttctacggcctgagcgagaacgacgagtggacccaggacagagccaagcccgtgacccagatcgtgtctgccgaagcctggggcagagccgattgcggcatcaccagcgccagctaccaccagggcgtgctgagcgccaccatcctgtacgagatcctgctgggcaaggccaccctgtacgccgtgctggtgtctgccctggtgctgatggctatggtcaagcggaaggacagccggggaagggccaagcgatctggatctggagcaacaaacttctcactactcaaacaagcaggtgacgtggaggagaatcccgggcctactagtatggactggatttggcgcatccttttccttgtcggcgctgctaccggcgcgcattccttcgaacaagttcagctggttcagagcggagccgaagtgaagaaacctggcagcagcgtgaaggtgtcctgcaaagcaagcggcggcacctttagcacctacgccatccactgggttcgacaggcaccaggacaaggactggaatggatgggcagaatcatccccatcgagggcagagcctactacgcccagaaattccagggcagagtgaccatcaccgccgacgagtctacaagcaccgcctacatggaactgagcagcctgagaagcgaggataccgctgtgtactattgcgccagaggccggtacagctacagatattggttcgactactggggccagggcaccctggttacagtctcttctacgcgtatccagaaccctgatcctgccgtgtaccagctgcgggatagcaagagcagcgacaagagcgtgtgtctgttcaccgacttcgacagccagaccaacgtgtcccagagcaaggactccgacgtgtacatcaccgataagtgcgtgctggacatgcggagcatggacttcaagagcaactccgccgtggcctggtccaacaagtccgatttcgcctgcgccaacgccttcaacaacagcattatccccgaggacacattcttcccaagcagcgacgtgccctgcgacgtgaagctggtggaaaagagcttcgagacagacaccaacctgaacttccagaacctgagcgtgatcggcttcagaatcctgctgctgaaagtggccggctttaacctgctgatgaccctgcggctgtggtccagctaa

SEQ ID NO: 39963 - DNA, 2277 bp, synthetic construct
  source 1..2277: mol_type = other DNA
atggccttaccagtgaccgccttgctcctgccgctggccttgctgctccacgccgccaggccggagatcgtgctgacacagtctcccgccacactgtcactgtctccaggcgaaagagccacactgagctgtagagccagccagagcgtgtcctcttacctggcctggtatcagcagaagcctggacaggctccccggctgctgatctacgatgccagcaatagagccacaggcatccccgccagattttctggctctggcagcggcaccgatttcaccctgaccataagcagcctggaacctgaggacttcgccgtgtactactgccagcagagaagcaactggcccctgacctttggacagggcaccaaggtggaaatcaaactcgaggacctgaagaacgtgttcccacctgaggtggccgtgttcgagcctagcgaggccgagatcagccacacccagaaagccaccctcgtgtgcctggctaccggcttctaccccgaccatgtggaactgtcttggtgggtcaacggcaaagaggtgcacagcggcgtgtgtaccgacccccagccactgaaagaacagcccgccctgaacgacagccggtactgcctgagcagcagactgagagtgtccgccaccttctggcagaacccccggaaccacttcagatgccaggtgcagttctacggcctgagcgagaacgacgagtggacccaggacagagccaagcccgtgacccagatcgtgtctgccgaagcctggggcagagccgattgcggctttaccagcgagagctaccagcagggcgtgctgagcgccaccatcctgtacgagatcctgctgggcaaggccaccctgtacgccgtgctggtgtctgccctggtgctgatggctatggtcaagcggaaggacagccggggaagggccaagcgatctggatctggagcaacaaacttctcactactcaaacaagcaggtgacgtggaggagaatcccgggcctactagtaccatggactggatttggcgcatccttttccttgtcggcgctgctaccggcgcccattccgggcccgaagtgcaactggttgaatccggtggcggcctggtgcaacccggcggatctctcagacttagctgtgccgcctccggcagaaccttcacaatgggatggtacaggcaggctccagggaaagagagagagttcgtcgccgccatctctctgtctcccacactggcctactacgccgactctgtgaaaggccggttcaccatctccagagataatagcaagaacaccgtggtgctgcaaatgaactctctgagagccgaggatacagccctgtactattgtgccgctgaccggaagtccgtgatgagcatcagacccgattactggggacagggcacactggtcacagtgtctagtggatccggcggcggaggatctggcggaggcggatctgggggcggaggctctttcgaacaagttcagctggttcagagcggagccgaagtgaagaaacctggcagcagcgtgaaggtgtcctgcaaagcaagcggcggcacctttagcacctacgccatccactgggttcgacaggcaccaggacaaggactggaatggatgggcagaatcatccccatcgagggcagagcctactacgcccagaaattccagggcagagtgaccatcaccgccgacgagtctacaagcaccgcctacatggaactgagcagcctgagaagcgaggataccgctgtgtactattgcgccagaggccggtacagctacagatattggttcgactactggggccagggcaccctggttacagtctcttctacgcgtatccagaaccctgatcctgccgtgtaccagctgcgggatagcaagagcagcgacaagagcgtgtgtctgttcaccgacttcgacagccagaccaacgtgtcccagagcaaggactccgacgtgtacatcaccgataagtgcgtgctggacatgcggagcatggacttcaagagcaactccgccgtggcctggtccaacaagtccgatttcgcctgcgccaacgccttcaacaacagcattatccccgaggacacattcttcccaagccccgagagcagctgcgacgtgaagctggtggaaaagagcttcgagacagacaccaacctgaacttccagaacctgagcgtgatcggcttcagaatcctgctgctgaaagtggccggctttaacctgctgatgaccctgcggctgtggtccagctaa

SEQ ID NO: 39964 - DNA, 2295 bp, synthetic construct
  source 1..2295: mol_type = other DNA
atggccttaccagtgaccgccttgctcctgccgctggccttgctgctccacgccgccaggccggagatcgtgctgacacagtctcccgccacactgtcactgtctccaggcgaaagagccacactgagctgtagagccagccagagcgtgtcctcttacctggcctggtatcagcagaagcctggacaggctccccggctgctgatctacgatgccagcaatagagccacaggcatccccgccagattttctggctctggcagcggcaccgatttcaccctgaccataagcagcctggaacctgaggacttcgccgtgtactactgccagcagagaagcaactggcccctgacctttggacagggcaccaaggtggaaatcaaactcgaggacctgaagaacgtgttcccacctgaggtggccgtgttcgagcctagcgaggccgagatcagccacacccagaaagccaccctcgtgtgcctggctaccggcttctaccccgaccatgtggaactgtcttggtgggtcaacggcaaagaggtgcacagcggcgtgtgtaccgacccccagccactgaaagaacagcccgccctgaacgacagccggtactgcctgagcagcagactgagagtgtccgccaccttctggcagaacccccggaaccacttcagatgccaggtgcagttctacggcctgagcgagaacgacgagtggacccaggacagagccaagcccgtgacccagatcgtgtctgccgaagcctggggcagagccgattgcggctttaccagcgagagctaccagcagggcgtgctgagcgccaccatcctgtacgagatcctgctgggcaaggccaccctgtacgccgtgctggtgtctgccctggtgctgatggctatggtcaagcggaaggacagccggggaagggccaagcgatctggatctggagcaacaaacttctcactactcaaacaagcaggtgacgtggaggagaatcccgggcctactagtaccatggactggatttggcgcatccttttccttgtcggcgctgctaccggcgcccattccgggccccaggtgcagctggttgaatctggcggaggactggttcagcctggcggatctctgagactgtcttgtgccgccagcggcaacatcaacagcagaaactgcatgggctggttcagacaggcccctggcaagggaagagaaggcgtggcagctatcggccaagtgaccggcagaacctactacgtggacagcgtgaagggcagattcaccatcagcctggacaacagcaagaacaccctgtacctccagatgaacagcctgagagccgaggacaccgccgtgtactattgtgctgctgcccctggctgtctgctgtctgcacttagaagcgccgactacagaaactggggccagggcacactggtcaccgtttcttctggatccggcggcggaggatctggcggaggcggatctgggggcggaggctctttcgaacaagttcagctggttcagagcggagccgaagtgaagaaacctggcagcagcgtgaaggtgtcctgcaaagcaagcggcggcacctttagcacctacgccatccactgggttcgacaggcaccaggacaaggactggaatggatgggcagaatcatccccatcgagggcagagcctactacgcccagaaattccagggcagagtgaccatcaccgccgacgagtctacaagcaccgcctacatggaactgagcagcctgagaagcgaggataccgctgtgtactattgcgccagaggccggtacagctacagatattggttcgactactggggccagggcaccctggttacagtctcttctacgcgtatccagaaccctgatcctgccgtgtaccagctgcgggatagcaagagcagcgacaagagcgtgtgtctgttcaccgacttcgacagccagaccaacgtgtcccagagcaaggactccgacgtgtacatcaccgataagtgcgtgctggacatgcggagcatggacttcaagagcaactccgccgtggcctggtccaacaagtccgatttcgcctgcgccaacgccttcaacaacagcattatccccgaggacacattcttcccaagccccgagagcagctgcgacgtgaagctggtggaaaagagcttcgagacagacaccaacctgaacttccagaacctgagcgtgatcggcttcagaatcctgctgctgaaagtggccggctttaacctgctgatgaccctgcggctgtggtccagc

SEQ ID NO: 39965 - DNA, 2298 bp, synthetic construct
  source 1..2298: mol_type = other DNA
atggccttaccagtgaccgccttgctcctgccgctggccttgctgctccacgccgccaggccggagatcgtgctgacacagtctcccgccacactgtcactgtctccaggcgaaagagccacactgagctgtagagccagccagagcgtgtcctcttacctggcctggtatcagcagaagcctggacaggctccccggctgctgatctacgatgccagcaatagagccacaggcatccccgccagattttctggctctggcagcggcaccgatttcaccctgaccataagcagcctggaacctgaggacttcgccgtgtactactgccagcagagaagcaactggcccctgacctttggacagggcaccaaggtggaaatcaaactcgaggacctgaagaacgtgttcccacctgaggtggccgtgttcgagcctagcgaggccgagatcagccacacccagaaagccaccctcgtgtgcctggctaccggcttctaccccgaccatgtggaactgtcttggtgggtcaacggcaaagaggtgcacagcggcgtgtgtaccgacccccagccactgaaagaacagcccgccctgaacgacagccggtactgcctgagcagcagactgagagtgtccgccaccttctggcagaacccccggaaccacttcagatgccaggtgcagttctacggcctgagcgagaacgacgagtggacccaggacagagccaagcccgtgacccagatcgtgtctgccgaagcctggggcagagccgattgcggctttaccagcgagagctaccagcagggcgtgctgagcgccaccatcctgtacgagatcctgctgggcaaggccaccctgtacgccgtgctggtgtctgccctggtgctgatggctatggtcaagcggaaggacagccggggaagggccaagcgatctggatctggagcaacaaacttctcactactcaaacaagcaggtgacgtggaggagaatcccgggcctactagtaccatggactggatttggcgcatccttttccttgtcggcgctgctaccggcgcccattccgggccccaggtgcagctggttgaatctggcggaggatctgttcaggctggcggctctctgagactgtcttgtggcgcttccggcaacatcagcagcagaaactgcatgggctggttcagacaggcccctggcaaagagagagaaggcgttgccgccatcggacaagtgaccggcagatcctactacgtggacagcgtgaagggcagattcaccatcagcctggacaacgccaagaacaccctgtacctccagatgaacacactgaagcccgaggacaccgccatgtactactgtgctgctgcccctggctgtctgctgtctgcacttagaagcgccgactacagaaactggggccagggaacccaagtgacagtgtctagtggatccggcggcggaggatctggcggaggcggatctgggggcggaggctctttcgaacaagttcagctggttcagagcggagccgaagtgaagaaacctggcagcagcgtgaaggtgtcctgcaaagcaagcggcggcacctttagcacctacgccatccactgggttcgacaggcaccaggacaaggactggaatggatgggcagaatcatccccatcgagggcagagcctactacgcccagaaattccagggcagagtgaccatcaccgccgacgagtctacaagcaccgcctacatggaactgagcagcctgagaagcgaggataccgctgtgtactattgcgccagaggccggtacagctacagatattggttcgactactggggccagggcaccctggttacagtctcttctacgcgtatccagaaccctgatcctgccgtgtaccagctgcgggatagcaagagcagcgacaagagcgtgtgtctgttcaccgacttcgacagccagaccaacgtgtcccagagcaaggactccgacgtgtacatcaccgataagtgcgtgctggacatgcggagcatggacttcaagagcaactccgccgtggcctggtccaacaagtccgatttcgcctgcgccaacgccttcaacaacagcattatccccgaggacacattcttcccaagccccgagagcagctgcgacgtgaagctggtggaaaagagcttcgagacagacaccaacctgaacttccagaacctgagcgtgatcggcttcagaatcctgctgctgaaagtggccggctttaacctgctgatgaccctgcggctgtggtccagctaa

SEQ ID NO: 39966 - DNA, 2721 bp, synthetic construct
  source 1..2721: mol_type = other DNA
atggccttaccagtgaccgccttgctcctgccgctggccttgctgctccacgccgccaggccggaagtgcagctggttgaatctggcggaggactggttcaggctggcggatctctgagactgtcttgtgccgccagcggcagaacctttagcatgggctggtttagacaggcccctggcaaagagagagagttcgtcgccgccatcacatactctggcggcagcccttactacgccgactctgtgaagggcagattcaccatcagccgggacaacgccaagaacaccgtgtacctccagatgaacagcctgaagcctgaggacaccgccgtgtactactgcgccgccaatccaacatacggcagcgactggaacgccgagaattggggccagggaacccaagtgacagtgtctagcggtaccggcggaggcggatctggcggcggaggtagcggtggcggaggatctgaattcgagatcgtgctgacacagtctcccgccacactgtcactgtctccaggcgaaagagccacactgagctgtagagccagccagagcgtgtcctcttacctggcctggtatcagcagaagcctggacaggctccccggctgctgatctacgatgccagcaatagagccacaggcatccccgccagattttctggctctggcagcggcaccgatttcaccctgaccataagcagcctggaacctgaggacttcgccgtgtactactgccagcagagaagcaactggcccctgacctttggacagggcaccaaggtggaaatcaaactcgagatccagaaccctgatcctgccgtgtaccagctgcgggatagcaagagcagcgacaagagcgtgtgtctgttcaccgacttcgacagccagaccaacgtgtcccagagcaaggactccgacgtgtacatcaccgataagtgcgtgctggacatgcggagcatggacttcaagagcaactccgccgtggcctggtccaacaagtccgatttcgcctgcgccaacgccttcaacaacagcattatccccgaggacacattcttcccaagcagcgacgtgccctgcgacgtgaagctggtggaaaagagcttcgagacagacaccaacctgaacttccagaacctgagcgtgatcggcttcagaatcctgctgctgaaagtggccggctttaacctgctgatgaccctgcggctgtggtccagccgcgccaagagaagcggatctggcgtgaagcagaccctgaatttcgacctgctgaagctggctggcgacgtggaatccaacccaggccctactagtaccatggactggatttggcgcatccttttccttgtcggcgctgctaccggcgcccattccgggccccaggtgcagctggttgaatctggcggaggatctgttcaggctggcggctctctgagactgtcttgtggcgcttccggcaacatcagcagcagaaactgcatgggctggttcagacaggcccctggcaaagagagagaaggcgttgccgccatcggacaagtgaccggcagatcctactacgtggacagcgtgaagggcagattcaccatcagcctggacaacgccaagaacaccctgtacctccagatgaacacactgaagcccgaggacaccgccatgtactactgtgctgctgcccctggctgtctgctgtctgcacttagaagcgccgactacagaaactggggccagggaacccaagtgacagtgtctagtggatccggcggcggaggatctggcggaggcggatctgggggcggaggctctttcgaacaagttcagctggttcagagcggagccgaagtgaagaaacctggcagcagcgtgaaggtgtcctgcaaagcaagcggcggcacctttagcacctacgccatccactgggttcgacaggcaccaggacaaggactggaatggatgggcagaatcatccccatcgagggcagagcctactacgcccagaaattccagggcagagtgaccatcaccgccgacgagtctacaagcaccgcctacatggaactgagcagcctgagaagcgaggataccgctgtgtactattgcgccagaggccggtacagctacagatattggttcgactactggggccagggcaccctggttacagtctcttctacgcgtgaggacctgaagaacgtgttcccacctgaggtggccgtgttcgagcctagcaaggccgagatcgcccacacccagaaagccaccctcgtgtgcctggctaccggcttctaccccgaccatgtggaactgtcttggtgggtcaacggcaaagaggtgcacagcggcgtgtgtaccgacccccagccactgaaagaacagcccgccctgaacgacagccggtactgcctgagcagcagactgagagtgtccgccaccttctggcagaacccccggaaccacttcagatgccaggtgcagttctacggcctgagcgagaacgacgagtggacccaggacagagccaagcccgtgacccagatcgtgtctgccgaagcctggggcagagccgattgcggcatcaccagcgccagctaccaccagggcgtgctgagcgccaccatcctgtacgagatcctgctgggcaaggccaccctgtacgccgtgctggtgtctgccctggtgctgatggctatggtcaagcggaaggacagccggggataa

SEQ ID NO: 39967 - DNA, 2712 bp, synthetic construct
  source 1..2712: mol_type = other DNA
atggccttaccagtgaccgccttgctcctgccgctggccttgctgctccacgccgccaggccgcaggtgcagctggttgaatctggcggaggatctgttcaggctggcggctctctgagactgtcttgtggcgcttccggcaacatcagcagcagaaactgcatgggctggttcagacaggcccctggcaaagagagagaaggcgttgccgccatcggacaagtgaccggcagatcctactacgtggacagcgtgaagggcagattcaccatcagcctggacaacgccaagaacaccctgtacctccagatgaacacactgaagcccgaggacaccgccatgtactactgtgctgctgcccctggctgtctgctgtctgcacttagaagcgccgactacagaaactggggccagggaacccaagtgacagtgtctagtggtaccggcggaggcggatctggcggcggaggtagcggtggcggaggatctgaattcgagatcgtgctgacacagtctcccgccacactgtcactgtctccaggcgaaagagccacactgagctgtagagccagccagagcgtgtcctcttacctggcctggtatcagcagaagcctggacaggctccccggctgctgatctacgatgccagcaatagagccacaggcatccccgccagattttctggctctggcagcggcaccgatttcaccctgaccataagcagcctggaacctgaggacttcgccgtgtactactgccagcagagaagcaactggcccctgacctttggacagggcaccaaggtggaaatcaaactcgaggacctgaagaacgtgttcccacctgaggtggccgtgttcgagcctagcgaggccgagatcagccacacccagaaagccaccctcgtgtgcctggctaccggcttctaccccgaccatgtggaactgtcttggtgggtcaacggcaaagaggtgcacagcggcgtgtgtaccgacccccagccactgaaagaacagcccgccctgaacgacagccggtactgcctgagcagcagactgagagtgtccgccaccttctggcagaacccccggaaccacttcagatgccaggtgcagttctacggcctgagcgagaacgacgagtggacccaggacagagccaagcccgtgacccagatcgtgtctgccgaagcctggggcagagccgattgcggctttaccagcgagagctaccagcagggcgtgctgagcgccaccatcctgtacgagatcctgctgggcaaggccaccctgtacgccgtgctggtgtctgccctggtgctgatggctatggtcaagcggaaggacagccggggaagggccaagcgatctggatctggagcaacaaacttctcactactcaaacaagcaggtgacgtggaggagaatcccgggcctactagtgccaccatggactggatttggcgcatccttttccttgtcggcgctgctaccggcgcccattccgggcccgaagtgcaactggttgaatccggtggcggcctggtgcaagcaggcggatctctcagacttagctgtgccgcctccggcagaaccttcacaatgggatggtttaggcaggctccagggaaagagagagagttcgtcgccgccatctctctgtctcccacactggcctactacgccgactctgtgaaaggccggttcaccatctccagagataatgccaagaacaccgtggtgctgcaaatgaactctctgaaacccgaggatacagccctgtactattgtgccgctgaccggaagtccgtgatgagcatcagacccgattactggggacagggcacacaagtcacagtgtcctctggatccggcggcggaggatctggcggaggcggatctgggggcggaggctctttcgaacaagttcagctggttcagagcggagccgaagtgaagaaacctggcagcagcgtgaaggtgtcctgcaaagcaagcggcggcacctttagcacctacgccatccactgggttcgacaggcaccaggacaaggactggaatggatgggcagaatcatccccatcgagggcagagcctactacgcccagaaattccagggcagagtgaccatcaccgccgacgagtctacaagcaccgcctacatggaactgagcagcctgagaagcgaggataccgctgtgtactattgcgccagaggccggtacagctacagatattggttcgactactggggccagggcaccctggttacagtctcttctacgcgtatccagaaccctgatcctgccgtgtaccagctgcgggatagcaagagcagcgacaagagcgtgtgtctgttcaccgacttcgacagccagaccaacgtgtcccagagcaaggactccgacgtgtacatcaccgataagtgcgtgctggacatgcggagcatggacttcaagagcaactccgccgtggcctggtccaacaagtccgatttcgcctgcgccaacgccttcaacaacagcattatccccgaggacacattcttcccaagccccgagagcagctgcgacgtgaagctggtggaaaagagcttcgagacagacaccaacctgaacttccagaacctgagcgtgatcggcttcagaatcctgctgctgaaagtggccggctttaacctgctgatgaccctgcggctgtggtccagctaa

SEQ ID NO: 39968 - DNA, 2301 bp, synthetic construct
  source 1..2301: mol_type = other DNA
atggccttaccagtgaccgccttgctcctgccgctggccttgctgctccacgccgccaggccgcaggtgcagctggttgaatctggcggaggatctgttcaggctggcggctctctgagactgtcttgtggcgcttccggcaacatcagcagcagaaactgcatgggctggttcagacaggcccctggcaaagagagagaaggcgttgccgccatcggacaagtgaccggcagatcctactacgtggacagcgtgaagggcagattcaccatcagcctggacaacgccaagaacaccctgtacctccagatgaacacactgaagcccgaggacaccgccatgtactactgtgctgctgcccctggctgtctgctgtctgcacttagaagcgccgactacagaaactggggccagggaacccaagtgacagtgtctagtggtaccggcggaggcggatctggcggcggaggtagcggtggcggaggatctgaattcgagatcgtgctgacacagtctcccgccacactgtcactgtctccaggcgaaagagccacactgagctgtagagccagccagagcgtgtcctcttacctggcctggtatcagcagaagcctggacaggctccccggctgctgatctacgatgccagcaatagagccacaggcatccccgccagattttctggctctggcagcggcaccgatttcaccctgaccataagcagcctggaacctgaggacttcgccgtgtactactgccagcagagaagcaactggcccctgacctttggacagggcaccaaggtggaaatcaaactcgaggacctgaagaacgtgttcccacctgaggtggccgtgttcgagcctagcgaggccgagatcagccacacccagaaagccaccctcgtgtgcctggctaccggcttctaccccgaccatgtggaactgtcttggtgggtcaacggcaaagaggtgcacagcggcgtgtgtaccgacccccagccactgaaagaacagcccgccctgaacgacagccggtactgcctgagcagcagactgagagtgtccgccaccttctggcagaacccccggaaccacttcagatgccaggtgcagttctacggcctgagcgagaacgacgagtggacccaggacagagccaagcccgtgacccagatcgtgtctgccgaagcctggggcagagccgattgcggctttaccagcgagagctaccagcagggcgtgctgagcgccaccatcctgtacgagatcctgctgggcaaggccaccctgtacgccgtgctggtgtctgccctggtgctgatggctatggtcaagcggaaggacagccggggaagggccaagcgatctggatctggagcaacaaacttctcactactcaaacaagcaggtgacgtggaggagaatcccgggcctactagtgccaccatggactggatttggcgcatccttttccttgtcggcgctgctaccggcgcccattccttcgaacaagttcagctggttcagagcggagccgaagtgaagaaacctggcagcagcgtgaaggtgtcctgcaaagcaagcggcggcacctttagcacctacgccatccactgggttcgacaggcaccaggacaaggactggaatggatgggcagaatcatccccatcgagggcagagcctactacgcccagaaattccagggcagagtgaccatcaccgccgacgagtctacaagcaccgcctacatggaactgagcagcctgagaagcgaggataccgctgtgtactattgcgccagaggccggtacagctacagatattggttcgactactggggccagggcaccctggttacagtctcttctacgcgtatccagaaccctgatcctgccgtgtaccagctgcgggatagcaagagcagcgacaagagcgtgtgtctgttcaccgacttcgacagccagaccaacgtgtcccagagcaaggactccgacgtgtacatcaccgataagtgcgtgctggacatgcggagcatggacttcaagagcaactccgccgtggcctggtccaacaagtccgatttcgcctgcgccaacgccttcaacaacagcattatccccgaggacacattcttcccaagccccgagagcagctgcgacgtgaagctggtggaaaagagcttcgagacagacaccaacctgaacttccagaacctgagcgtgatcggcttcagaatcctgctgctgaaagtggccggctttaacctgctgatgaccctgcggctgtggtccagctaa

SEQ ID NO: 39969 - DNA, 2301 bp, synthetic construct
  source 1..2301: mol_type = other DNA
atggccttaccagtgaccgccttgctcctgccgctggccttgctgctccacgccgccaggccgcaagttcagctggtggaaagcggtggtggcgttgtgcaacctggtggaagtctgaggctgagctgtgccgcttctggcctgagctttagcacctacactgtggcctggttcaggcaggctcccggaaagggtcttgaaggcgtggccgccattccttacaccagccagcacatggtgtacacagacagcgtcagaggccggttcaccatcagcagagacaactccaagaatacgctctatctccagatgaactctctgcgcgccgaagatacagccgtgtattactgcgccaccgacagacggcctggcacctctatgctggctatcaacggctacaacagatggggacagggaaccaccgtgaccgtgtcatctggtaccggcggaggcggatctggcggcggaggtagcggtggcggaggatctgaattcgagatcgtgctgacacagtctcccgccacactgtcactgtctccaggcgaaagagccacactgagctgtagagccagccagagcgtgtcctcttacctggcctggtatcagcagaagcctggacaggctccccggctgctgatctacgatgccagcaatagagccacaggcatccccgccagattttctggctctggcagcggcaccgatttcaccctgaccataagcagcctggaacctgaggacttcgccgtgtactactgccagcagagaagcaactggcccctgacctttggacagggcaccaaggtggaaatcaaactcgaggacctgaagaacgtgttcccacctgaggtggccgtgttcgagcctagcgaggccgagatcagccacacccagaaagccaccctcgtgtgcctggctaccggcttctaccccgaccatgtggaactgtcttggtgggtcaacggcaaagaggtgcacagcggcgtgtgtaccgacccccagccactgaaagaacagcccgccctgaacgacagccggtactgcctgagcagcagactgagagtgtccgccaccttctggcagaacccccggaaccacttcagatgccaggtgcagttctacggcctgagcgagaacgacgagtggacccaggacagagccaagcccgtgacccagatcgtgtctgccgaagcctggggcagagccgattgcggctttaccagcgagagctaccagcagggcgtgctgagcgccaccatcctgtacgagatcctgctgggcaaggccaccctgtacgccgtgctggtgtctgccctggtgctgatggctatggtcaagcggaaggacagccggggaagggccaagcgatctggatctggagcaacaaacttctcactactcaaacaagcaggtgacgtggaggagaatcccgggcctactagtgccaccatggactggatttggcgcatccttttccttgtcggcgctgctaccggcgcccattccttcgaacaagttcagctggttcagagcggagccgaagtgaagaaacctggcagcagcgtgaaggtgtcctgcaaagcaagcggcggcacctttagcacctacgccatccactgggttcgacaggcaccaggacaaggactggaatggatgggcagaatcatccccatcgagggcagagcctactacgcccagaaattccagggcagagtgaccatcaccgccgacgagtctacaagcaccgcctacatggaactgagcagcctgagaagcgaggataccgctgtgtactattgcgccagaggccggtacagctacagatattggttcgactactggggccagggcaccctggttacagtctcttctacgcgtatccagaaccctgatcctgccgtgtaccagctgcgggatagcaagagcagcgacaagagcgtgtgtctgttcaccgacttcgacagccagaccaacgtgtcccagagcaaggactccgacgtgtacatcaccgataagtgcgtgctggacatgcggagcatggacttcaagagcaactccgccgtggcctggtccaacaagtccgatttcgcctgcgccaacgccttcaacaacagcattatccccgaggacacattcttcccaagccccgagagcagctgcgacgtgaagctggtggaaaagagcttcgagacagacaccaacctgaacttccagaacctgagcgtgatcggcttcagaatcctgctgctgaaagtggccggctttaacctgctgatgaccctgcggctgtggtccagctaa

SEQ ID NO: 39970 - DNA, 2298 bp, synthetic construct
  source 1..2298: mol_type = other DNA
atggccttaccagtgaccgccttgctcctgccgctggccttgctgctccacgccgccaggccggagatcgtgctgacacagtctcccgccacactgtcactgtctccaggcgaaagagccacactgagctgtagagccagccagagcgtgtcctcttacctggcctggtatcagcagaagcctggacaggctccccggctgctgatctacgatgccagcaatagagccacaggcatccccgccagattttctggctctggcagcggcaccgatttcaccctgaccataagcagcctggaacctgaggacttcgccgtgtactactgccagcagagaagcaactggcccctgacctttggacagggcaccaaggtggaaatcaaactcgaggacctgaagaacgtgttcccacctgaggtggccgtgttcgagcctagcgaggccgagatcagccacacccagaaagccaccctcgtgtgcctggctaccggcttctaccccgaccatgtggaactgtcttggtgggtcaacggcaaagaggtgcacagcggcgtgtgtaccgacccccagccactgaaagaacagcccgccctgaacgacagccggtactgcctgagcagcagactgagagtgtccgccaccttctggcagaacccccggaaccacttcagatgccaggtgcagttctacggcctgagcgagaacgacgagtggacccaggacagagccaagcccgtgacccagatcgtgtctgccgaagcctggggcagagccgattgcggctttaccagcgagagctaccagcagggcgtgctgagcgccaccatcctgtacgagatcctgctgggcaaggccaccctgtacgccgtgctggtgtctgccctggtgctgatggctatggtcaagcggaaggacagccggggaagggccaagcgatctggatctggagcaacaaacttctcactactcaaacaagcaggtgacgtggaggagaatcccgggcctactagtaccatggactggatttggcgcatccttttccttgtcggcgctgctaccggcgcccattccgggccccaagttcagctggtggaaagcggtggtggcgttgtgcaacctggtggaagtctgaggctgagctgtgccgcttctggcctgagctttagcacctacactgtggcctggttcaggcaggctcccggaaagggtcttgaaggcgtggccgccattccttacaccagccagcacatggtgtacacagacagcgtcagaggccggttcaccatcagcagagacaactccaagaatacgctctatctccagatgaactctctgcgcgccgaagatacagccgtgtattactgcgccaccgacagacggcctggcacctctatgctggctatcaacggctacaacagatggggacagggaaccaccgtgaccgtgtcatctggatccggcggcggaggatctggcggaggcggatctgggggcggaggctctttcgaacaagttcagctggttcagagcggagccgaagtgaagaaacctggcagcagcgtgaaggtgtcctgcaaagcaagcggcggcacctttagcacctacgccatccactgggttcgacaggcaccaggacaaggactggaatggatgggcagaatcatccccatcgagggcagagcctactacgcccagaaattccagggcagagtgaccatcaccgccgacgagtctacaagcaccgcctacatggaactgagcagcctgagaagcgaggataccgctgtgtactattgcgccagaggccggtacagctacagatattggttcgactactggggccagggcaccctggttacagtctcttctacgcgtatccagaaccctgatcctgccgtgtaccagctgcgggatagcaagagcagcgacaagagcgtgtgtctgttcaccgacttcgacagccagaccaacgtgtcccagagcaaggactccgacgtgtacatcaccgataagtgcgtgctggacatgcggagcatggacttcaagagcaactccgccgtggcctggtccaacaagtccgatttcgcctgcgccaacgccttcaacaacagcattatccccgaggacacattcttcccaagccccgagagcagctgcgacgtgaagctggtggaaaagagcttcgagacagacaccaacctgaacttccagaacctgagcgtgatcggcttcagaatcctgctgctgaaagtggccggctttaacctgctgatgaccctgcggctgtggtccagctaa

SEQ ID NO: 39971 - DNA, 2304 bp, synthetic construct
  source 1..2304: mol_type = other DNA
atggccttaccagtgaccgccttgctcctgccgctggccttgctgctccacgccgccaggccggagatcgtgctgacacagtctcccgccacactgtcactgtctccaggcgaaagagccacactgagctgtagagccagccagagcgtgtcctcttacctggcctggtatcagcagaagcctggacaggctccccggctgctgatctacgatgccagcaatagagccacaggcatccccgccagattttctggctctggcagcggcaccgatttcaccctgaccataagcagcctggaacctgaggacttcgccgtgtactactgccagcagagaagcaactggcccctgacctttggacagggcaccaaggtggaaatcaaactcgaggacctgaagaacgtgttcccacctgaggtggccgtgttcgagcctagcgaggccgagatcagccacacccagaaagccaccctcgtgtgcctggctaccggcttctaccccgaccatgtggaactgtcttggtgggtcaacggcaaagaggtgcacagcggcgtgtgtaccgacccccagccactgaaagaacagcccgccctgaacgacagccggtactgcctgagcagcagactgagagtgtccgccaccttctggcagaacccccggaaccacttcagatgccaggtgcagttctacggcctgagcgagaacgacgagtggacccaggacagagccaagcccgtgacccagatcgtgtctgccgaagcctggggcagagccgattgcggctttaccagcgagagctaccagcagggcgtgctgagcgccaccatcctgtacgagatcctgctgggcaaggccaccctgtacgccgtgctggtgtctgccctggtgctgatggctatggtcaagcggaaggacagccggggaagggccaagcgatctggatctggagcaacaaacttctcactactcaaacaagcaggtgacgtggaggagaatcccgggcctactagtaccatggactggatttggcgcatccttttccttgtcggcgctgctaccggcgcccattccgggcccgaggtgcagctggttgaatctggcggaggatctgttcaggctggcggctctctgagactgtcttgtgccgccagcggctacacctacagcatcaactgcatgggctggttcagacaggcccctggcaaagagagagaaggcgttgccgccatctctaccggcggaggcagaaccgattaccgggattctgtgaagggcagattcaccatcagccaggacaacgccaagaacaccgtgtacctccagatgaacagcctgaagcctgaggacaccgccatgtactactgtgccggcaagaccacctatcctggctacggatgtggcctgggcagaagcgcctacaattattggggccagggcacccaagtgaccgtgtcatctggatccggcggcggaggatctggcggaggcggatctgggggcggaggctctttcgaacaagttcagctggttcagagcggagccgaagtgaagaaacctggcagcagcgtgaaggtgtcctgcaaagcaagcggcggcacctttagcacctacgccatccactgggttcgacaggcaccaggacaaggactggaatggatgggcagaatcatccccatcgagggcagagcctactacgcccagaaattccagggcagagtgaccatcaccgccgacgagtctacaagcaccgcctacatggaactgagcagcctgagaagcgaggataccgctgtgtactattgcgccagaggccggtacagctacagatattggttcgactactggggccagggcaccctggttacagtctcttctacgcgtatccagaaccctgatcctgccgtgtaccagctgcgggatagcaagagcagcgacaagagcgtgtgtctgttcaccgacttcgacagccagaccaacgtgtcccagagcaaggactccgacgtgtacatcaccgataagtgcgtgctggacatgcggagcatggacttcaagagcaactccgccgtggcctggtccaacaagtccgatttcgcctgcgccaacgccttcaacaacagcattatccccgaggacacattcttcccaagccccgagagcagctgcgacgtgaagctggtggaaaagagcttcgagacagacaccaacctgaacttccagaacctgagcgtgatcggcttcagaatcctgctgctgaaagtggccggctttaacctgctgatgaccctgcggctgtggtccagctaa

SEQ ID NO: 39972 - DNA, 1860 bp, synthetic construct
  source 1..1860: mol_type = other DNA
atggccttaccagtgaccgccttgctcctgccgctggccttgctgctccacgccgccaggccggagatcgtgctgacacagtctcccgccacactgtcactgtctccaggcgaaagagccacactgagctgtagagccagccagagcgtgtcctcttacctggcctggtatcagcagaagcctggacaggctccccggctgctgatctacgatgccagcaatagagccacaggcatccccgccagattttctggctctggcagcggcaccgatttcaccctgaccataagcagcctggaacctgaggacttcgccgtgtactactgccagcagagaagcaactggcccctgacctttggacagggcaccaaggtggaaatcaaactcgaggacctgaagcacgtgttcccacctgaggtggccgtgttcgagcctagcgacgccgagatctggcacacccagaaagccaccctcgtgtgcctggctaccggcttctaccccgaccatgtggaactgtcttggtgggtcaacggcaaagaggtgcacagcggcgtgtctaccgacccccagccactgaaagaacagcccgccctgaacgacagccggtactgcctgagcagcagactgagagtgtccgccaccttctggcagaacccccggaaccacttcagatgccaggtgcagttctacggcctgagcgagaacgacgagtggacccaggacagagccaagcccgtgacccagatcgtgtctgccgaagcctggggcagagccgattgcggctttaccagcgagagctaccagcagggcgtgctgagcgccaccatcctgtacgagatcctgctgggcaaggccaccctgtacgccgtgctggtgtctgccctggtgctgatggctatggtcaagcggaaggacagccggggaagggccaagcgatctggatctggagcaacaaacttctcactactcaaacaagcaggtgacgtggaggagaatcccgggcctactagtatggactggatttggcgcatccttttccttgtcggcgctgctaccggcgcgcattccttcgaacaagttcagctggttcagagcggagccgaagtgaagaaacctggcagcagcgtgaaggtgtcctgcaaagcaagcggcggcacctttagcacctacgccatccactgggttcgacaggcaccaggacaaggactggaatggatgggcagaatcatccccatcgagggcagagcctactacgcccagaaattccagggcagagtgaccatcaccgccgacgagtctacaagcaccgcctacatggaactgagcagcctgagaagcgaggataccgctgtgtactattgcgccagaggccggtacagctacagatattggttcgactactggggccagggcaccctggttacagtctcttctacgcgtatccagaaccctgatcctgccgtgtaccagctgcgggatagcaagagcagcgacaagagcgtgtgtctgttcaccgacttcgacagccagaccaacgtgtcccagagcaaggactccgacgtgtacatcaccgataagaccgtgctggacatgcggagcatggacttcaagagcaactccgccgtggcctggtccagcaagtccgatttcgcctgcgccaacgccttcaacaacagcattatccccgaggacacattcttcccaagccccgagatggcctgcgacgtgaagctggtggaaaagagcttcgagacagacaccaacctgaacttccagaacctgctcgtgatctggctgagaatcctgctgctgaaagtggccggctttaacctgctgatgaccctgcggctgtggtccagc

SEQ ID NO: 39973 - DNA, 1860 bp, synthetic construct
  source 1..1860: mol_type = other DNA
atggccttaccagtgaccgccttgctcctgccgctggccttgctgctccacgccgccaggccggagatcgtgctgacacagtctcccgccacactgtcactgtctccaggcgaaagagccacactgagctgtagagccagccagagcgtgtcctcttacctggcctggtatcagcagaagcctggacaggctccccggctgctgatctacgatgccagcaatagagccacaggcatccccgccagattttctggctctggcagcggcaccgatttcaccctgaccataagcagcctggaacctgaggacttcgccgtgtactactgccagcagagaagcaactggcccctgacctttggacagggcaccaaggtggaaatcaaactcgaggacctgaagcacgtgttcccacctgaggtggccgtgttcgagcctagcgacgccgagatctggcacacccagaaagccaccctcgtgtgcctggctaccggcttctaccccgaccatgtggaactgtcttggtgggtcaacggcaaagaggtgcacagcggcgtgtctaccgacccccagccactgaaagaacagcccgccctgaacgacagccggtactgcctgagcagcagactgagagtgtccgccaccttctggcagaacccccggaaccacttcagatgccaggtgcagttctacggcctgagcgagaacgacgagtggacccaggacagagccaagcccgtgacccagatcgtgtctgccgaagcctggggcagagccgattgcggctttaccagcgagagctaccagcagggcgtgctgagcgccaccatcctgtacgagatcctgctgggcaaggccaccctgtacgccgtgctggtgtctgccctggtgctgatggctatggtcaagcggaaggacagccggggaagggccaagcgatctggatctggagcaacaaacttctcactactcaaacaagcaggtgacgtggaggagaatcccgggcctactagtatggactggatttggcgcatccttttccttgtcggcgctgctaccggcgcgcattccttcgaacaagttcagctggttcagagcggagccgaagtgaagaaacctggcagcagcgtgaaggtgtcctgcaaagcaagcggcggcacctttagcacctacgccatccactgggttcgacaggcaccaggacaaggactggaatggatgggcagaatcatccccatcgagggcagagcctactacgcccagaaattccagggcagagtgaccatcaccgccgacgagtctacaagcaccgcctacatggaactgagcagcctgagaagcgaggataccgctgtgtactattgcgccagaggccggtacagctacagatattggttcgactactggggccagggcaccctggttacagtctcttctacgcgtatccagaaccctgatcctgccgtgtaccagctgcgggatagcaagagcagcgacaagagcgtgtgtctgttcaccgacttcgacagccagaccaacgtgtcccagagcaaggactccgacgtgtacatcaccgataagaccgtgctggacatgcggagcatggacttcaagagcaactccgccgtggcctggtccaccaagtccgatttcgcctgcgccaacgccttcaacaacagcattatccccgaggacacattcttcccaagccccgaggtggtgtgcgacgtgaagctggtggaaaagagcttcgagacagacaccaacctgaacttccagaacctggtggtgatcggcgccagaatcctgctgctgaaagtggccggctttaacctgctgatgaccctgcggctgtggtccagc

SEQ ID NO: 39974 - DNA, 1860 bp, synthetic construct
  source 1..1860: mol_type = other DNA
atggccttaccagtgaccgccttgctcctgccgctggccttgctgctccacgccgccaggccggagatcgtgctgacacagtctcccgccacactgtcactgtctccaggcgaaagagccacactgagctgtagagccagccagagcgtgtcctcttacctggcctggtatcagcagaagcctggacaggctccccggctgctgatctacgatgccagcaatagagccacaggcatccccgccagattttctggctctggcagcggcaccgatttcaccctgaccataagcagcctggaacctgaggacttcgccgtgtactactgccagcagagaagcaactggcccctgacctttggacagggcaccaaggtggaaatcaaactcgaggacctgaagaacgtgttcccacctgaggtggccgtgttcgagcctagcaaggccgagatcagcagaacccagaaagccaccctcgtgtgcctggctaccggcttctaccctcctcatgtggaactgtcttggtgggtcaacggcaaagaggtgcacgacggcgtgtgtaccgacccccagccactgaaagaacagcccgccctgaacgacagccggtactgcctgagcagcagactgagagtgtccgccaccttctggcagaacccccggaaccacttcagatgccaggtgcagttctacggcctgagcgagaacgacgagtggacccaggacagagccaagcccgtgacccagatcgtgtctgccgaagcctggggcagagccgattgcggctttaccagcgagagctaccagcagggcgtgctgagcgccaccatcctgtacgagatcctgctgggcaaggccaccctgtacgccgtgctggtgtctgccctggtgctgatggctatggtcaagcggaaggacagccggggaagggccaagcgatctggatctggagcaacaaacttctcactactcaaacaagcaggtgacgtggaggagaatcccgggcctactagtatggactggatttggcgcatccttttccttgtcggcgctgctaccggcgcgcattccttcgaacaagttcagctggttcagagcggagccgaagtgaagaaacctggcagcagcgtgaaggtgtcctgcaaagcaagcggcggcacctttagcacctacgccatccactgggttcgacaggcaccaggacaaggactggaatggatgggcagaatcatccccatcgagggcagagcctactacgcccagaaattccagggcagagtgaccatcaccgccgacgagtctacaagcaccgcctacatggaactgagcagcctgagaagcgaggataccgctgtgtactattgcgccagaggccggtacagctacagatattggttcgactactggggccagggcaccctggttacagtctcttctacgcgtatccagaaccctgatcctgccgtgtaccagctgcgggatagcaagagcagcgacaagttcgtgtgtctgttcaccgacttcgacagccagatcaacgtgtcccagagcaaggactccgacgtgtacatcaccgataagtgcgtgctggacatgcggagcatggacttcaagagcaactccgccgtggcctggtccaacaagtccgatttcacctgcgccaacgccttcaacaacagcattatccccgaggacacattcttcccaagccccgagagcagctgcgacgtgaagctggtggaaaagagcttcgagacagacaccaacctgaacttccagaacctgagcgtgatcggcttcagaatcctgctgctgaaagtggccggctttaacctgctgatgaccctgcggctgtggtccagc

SEQ ID NO: 39975 - DNA, 2286 bp, synthetic construct
  source 1..2286: mol_type = other DNA
atggccttaccagtgaccgccttgctcctgccgctggccttgctgctccacgccgccaggccggagatcgtgctgacacagtctcccgccacactgtcactgtctccaggcgaaagagccacactgagctgtagagccagccagagcgtgtcctcttacctggcctggtatcagcagaagcctggacaggctccccggctgctgatctacgatgccagcaatagagccacaggcatccccgccagattttctggctctggcagcggcaccgatttcaccctgaccataagcagcctggaacctgaggacttcgccgtgtactactgccagcagagaagcaactggcccctgacctttggacagggcaccaaggtggaaatcaaactcgaggacctgaagaacgtgttcccacctgaggtggccgtgttcgagcctagcgaggccgagatcagccacacccagaaagccaccctcgtgtgcctggctaccggcttctaccccgaccatgtggaactgtcttggtgggtcaacggcaaagaggtgcacagcggcgtgtgtaccgacccccagccactgaaagaacagcccgccctgaacgacagccggtactgcctgagcagcagactgagagtgtccgccaccttctggcagaacccccggaaccacttcagatgccaggtgcagttctacggcctgagcgagaacgacgagtggacccaggacagagccaagcccgtgacccagatcgtgtctgccgaagcctggggcagagccgattgcggctttaccagcgagagctaccagcagggcgtgctgagcgccaccatcctgtacgagatcctgctgggcaaggccaccctgtacgccgtgctggtgtctgccctggtgctgatggctatggtcaagcggaaggacagccggggaagggccaagcgatctggatctggagcaacaaacttctcactactcaaacaagcaggtgacgtggaggagaatcccgggcctactagtaccatggactggatttggcgcatccttttccttgtcggcgctgctaccggcgcccattccgggccccaggtgcagctccaagaaagcggacccggactggttaagccctctcagaccctgtctctgacctgcacagttagcggagccagcattaccacaggcgagtattattggaattggtttcggcagccaccaggcaaggggcttgagtggatgggtgctattgctgcctctggcagcaccacctactctcccagctttgagagcagaacctccatcagccgggacacctccaaaaaccagttctctctgaagctgtcctccgtgaccgctgctgacaccgccgtctattattgtggccggtctttcggcgtggcagctgtgaccacaggacagaacagaggccagggaacacttgtgaccgtgtcctctggatccggcggcggaggatctggcggaggcggatctgggggcggaggctctttcgaacaagttcagctggttcagagcggagccgaagtgaagaaacctggcagcagcgtgaaggtgtcctgcaaagcaagcggcggcacctttagcacctacgccatccactgggttcgacaggcaccaggacaaggactggaatggatgggcagaatcatccccatcgagggcagagcctactacgcccagaaattccagggcagagtgaccatcaccgccgacgagtctacaagcaccgcctacatggaactgagcagcctgagaagcgaggataccgctgtgtactattgcgccagaggccggtacagctacagatattggttcgactactggggccagggcaccctggttacagtctcttctacgcgtatccagaaccctgatcctgccgtgtaccagctgcgggatagcaagagcagcgacaagagcgtgtgtctgttcaccgacttcgacagccagaccaacgtgtcccagagcaaggactccgacgtgtacatcaccgataagtgcgtgctggacatgcggagcatggacttcaagagcaactccgccgtggcctggtccaacaagtccgatttcgcctgcgccaacgccttcaacaacagcattatccccgaggacacattcttcccaagccccgagagcagctgcgacgtgaagctggtggaaaagagcttcgagacagacaccaacctgaacttccagaacctgagcgtgatcggcttcagaatcctgctgctgaaagtggccggctttaacctgctgatgaccctgcggctgtggtccagc

SEQ ID NO: 39976 - DNA, 2709 bp, synthetic construct
  source 1..2709: mol_type = other DNA
atggccttaccagtgaccgccttgctcctgccgctggccttgctgctccacgccgccaggccgcaggttcagctgcaagagtctggccctggcctggtcaagcctagccaaacactgagcctgacctgtaccgtgtctggcggctctatcaccaccggcgagttctactggaactggttcagacagcctcctggcaaaggactggaatggatgggagccattgccgccagcggcagcacaacatacagccctagcttcgagagccggaccagcatcagcagagacaccagcaagaatcagttcagcctgaagctgagcagcgtgacagccgccgatacagccgtgtattactgcggcagatcctttggagtggccgccgtgacaaccggccagaatagaggacagggcaccctggtcacagtgtctagcggtaccggcggaggcggatctggcggcggaggtagcggtggcggaggatctgaattcgagatcgtgctgacacagtctcccgccacactgtcactgtctccaggcgaaagagccacactgagctgtagagccagccagagcgtgtcctcttacctggcctggtatcagcagaagcctggacaggctccccggctgctgatctacgatgccagcaatagagccacaggcatccccgccagattttctggctctggcagcggcaccgatttcaccctgaccataagcagcctggaacctgaggacttcgccgtgtactactgccagcagagaagcaactggcccctgacctttggacagggcaccaaggtggaaatcaaactcgagatccagaaccctgatcctgccgtgtaccagctgcgggatagcaagagcagcgacaagagcgtgtgtctgttcaccgacttcgacagccagaccaacgtgtcccagagcaaggactccgacgtgtacatcaccgataagtgcgtgctggacatgcggagcatggacttcaagagcaactccgccgtggcctggtccaacaagtccgatttcgcctgcgccaacgccttcaacaacagcattatccccgaggacacattcttcccaagcagcgacgtgccctgcgacgtgaagctggtggaaaagagcttcgagacagacaccaacctgaacttccagaacctgagcgtgatcggcttcagaatcctgctgctgaaagtggccggctttaacctgctgatgaccctgcggctgtggtccagccgcgccaagagaagcggatctggcgtgaagcagaccctgaatttcgacctgctgaagctggctggcgacgtggaatccaacccaggccctactagtaccatggactggatttggcgcatccttttccttgtcggcgctgctaccggcgcccattccgggcccgaagtgcaactggttgaatccggtggcggcctggtgcaacccggcggatctctcagacttagctgtgccgcctccggcagaaccttcacaatgggatggtacaggcaggctccagggaaagagagagagttcgtcgccgccatctctctgtctcccacactggcctactacgccgactctgtgaaaggccggttcaccatctccagagataatagcaagaacaccgtggtgctgcaaatgaactctctgagagccgaggatacagccctgtactattgtgccgctgaccggaagtccgtgatgagcatcagacccgattactggggacagggcacactggtcacagtgtctagtggatccggcggcggaggatctggcggaggcggatctgggggcggaggctctttcgaacaagttcagctggttcagagcggagccgaagtgaagaaacctggcagcagcgtgaaggtgtcctgcaaagcaagcggcggcacctttagcacctacgccatccactgggttcgacaggcaccaggacaaggactggaatggatgggcagaatcatccccatcgagggcagagcctactacgcccagaaattccagggcagagtgaccatcaccgccgacgagtctacaagcaccgcctacatggaactgagcagcctgagaagcgaggataccgctgtgtactattgcgccagaggccggtacagctacagatattggttcgactactggggccagggcaccctggttacagtctcttctacgcgtgaggacctgaagaacgtgttcccacctgaggtggccgtgttcgagcctagcaaggccgagatcgcccacacccagaaagccaccctcgtgtgcctggctaccggcttctaccccgaccatgtggaactgtcttggtgggtcaacggcaaagaggtgcacagcggcgtgtgtaccgacccccagccactgaaagaacagcccgccctgaacgacagccggtactgcctgagcagcagactgagagtgtccgccaccttctggcagaacccccggaaccacttcagatgccaggtgcagttctacggcctgagcgagaacgacgagtggacccaggacagagccaagcccgtgacccagatcgtgtctgccgaagcctggggcagagccgattgcggcatcaccagcgccagctaccaccagggcgtgctgagcgccaccatcctgtacgagatcctgctgggcaaggccaccctgtacgccgtgctggtgtctgccctggtgctgatggctatggtcaagcggaaggacagccgggga

SEQ ID NO: 39977 - DNA, 2298 bp, synthetic construct
  source 1..2298: mol_type = other DNA
atggccttaccagtgaccgccttgctcctgccgctggccttgctgctccacgccgccaggccgcaggttcagctgcaagagtctggccctggcctggtcaagcctagccaaacactgagcctgacctgtaccgtgtctggcggctctatcaccaccggcgagttctactggaactggttcagacagcctcctggcaaaggactggaatggatgggagccattgccgccagcggcagcacaacatacagccctagcttcgagagccggaccagcatcagcagagacaccagcaagaatcagttcagcctgaagctgagcagcgtgacagccgccgatacagccgtgtattactgcggcagatcctttggagtggccgccgtgacaaccggccagaatagaggacagggcaccctggtcacagtgtctagcggtaccggcggaggcggatctggcggcggaggtagcggtggcggaggatctgaattcgagatcgtgctgacacagtctcccgccacactgtcactgtctccaggcgaaagagccacactgagctgtagagccagccagagcgtgtcctcttacctggcctggtatcagcagaagcctggacaggctccccggctgctgatctacgatgccagcaatagagccacaggcatccccgccagattttctggctctggcagcggcaccgatttcaccctgaccataagcagcctggaacctgaggacttcgccgtgtactactgccagcagagaagcaactggcccctgacctttggacagggcaccaaggtggaaatcaaactcgagatccagaaccctgatcctgccgtgtaccagctgcgggatagcaagagcagcgacaagagcgtgtgtctgttcaccgacttcgacagccagaccaacgtgtcccagagcaaggactccgacgtgtacatcaccgataagtgcgtgctggacatgcggagcatggacttcaagagcaactccgccgtggcctggtccaacaagtccgatttcgcctgcgccaacgccttcaacaacagcattatccccgaggacacattcttcccaagcagcgacgtgccctgcgacgtgaagctggtggaaaagagcttcgagacagacaccaacctgaacttccagaacctgagcgtgatcggcttcagaatcctgctgctgaaagtggccggctttaacctgctgatgaccctgcggctgtggtccagccgcgccaagagaagcggatctggcgtgaagcagaccctgaatttcgacctgctgaagctggctggcgacgtggaatccaacccaggccctactagtaccatggactggatttggcgcatccttttccttgtcggcgctgctaccggcgcccattccttcgaacaagttcagctggttcagagcggagccgaagtgaagaaacctggcagcagcgtgaaggtgtcctgcaaagcaagcggcggcacctttagcacctacgccatccactgggttcgacaggcaccaggacaaggactggaatggatgggcagaatcatccccatcgagggcagagcctactacgcccagaaattccagggcagagtgaccatcaccgccgacgagtctacaagcaccgcctacatggaactgagcagcctgagaagcgaggataccgctgtgtactattgcgccagaggccggtacagctacagatattggttcgactactggggccagggcaccctggttacagtctcttctacgcgtgaggacctgaagaacgtgttcccacctgaggtggccgtgttcgagcctagcaaggccgagatcgcccacacccagaaagccaccctcgtgtgcctggctaccggcttctaccccgaccatgtggaactgtcttggtgggtcaacggcaaagaggtgcacagcggcgtgtgtaccgacccccagccactgaaagaacagcccgccctgaacgacagccggtactgcctgagcagcagactgagagtgtccgccaccttctggcagaacccccggaaccacttcagatgccaggtgcagttctacggcctgagcgagaacgacgagtggacccaggacagagccaagcccgtgacccagatcgtgtctgccgaagcctggggcagagccgattgcggcatcaccagcgccagctaccaccagggcgtgctgagcgccaccatcctgtacgagatcctgctgggcaaggccaccctgtacgccgtgctggtgtctgccctggtgctgatggctatggtcaagcggaaggacagccgggga

SEQ ID NO: 39978 - DNA, 2697 bp, synthetic construct
  source 1..2697: mol_type = other DNA
atggccttaccagtgaccgccttgctcctgccgctggccttgctgctccacgccgccaggccggaagtgcagctggttgaatctggcggaggactggttcaggctggcggatctctgagactgtcttgtgccgccagcggcagaacctttagcatgggctggtttagacaggcccctggcaaagagagagagttcgtcgccgccatcacatactctggcggcagcccttactacgccgactctgtgaagggcagattcaccatcagccgggacaacgccaagaacaccgtgtacctccagatgaacagcctgaagcctgaggacaccgccgtgtactactgcgccgccaatccaacatacggcagcgactggaacgccgagaattggggccagggaacccaagtgacagtgtctagcggtaccggcggaggcggatctggcggcggaggtagcggtggcggaggatctgaattcgagatcgtgctgacacagtctcccgccacactgtcactgtctccaggcgaaagagccacactgagctgtagagccagccagagcgtgtcctcttacctggcctggtatcagcagaagcctggacaggctccccggctgctgatctacgatgccagcaatagagccacaggcatccccgccagattttctggctctggcagcggcaccgatttcaccctgaccataagcagcctggaacctgaggacttcgccgtgtactactgccagcagagaagcaactggcccctgacctttggacagggcaccaaggtggaaatcaaactcgaggacctgaagaacgtgttcccacctgaggtggccgtgttcgagcctagcgaggccgagatcagccacacccagaaagccaccctcgtgtgcctggctaccggcttctaccccgaccatgtggaactgtcttggtgggtcaacggcaaagaggtgcacagcggcgtgtgtaccgacccccagccactgaaagaacagcccgccctgaacgacagccggtactgcctgagcagcagactgagagtgtccgccaccttctggcagaacccccggaaccacttcagatgccaggtgcagttctacggcctgagcgagaacgacgagtggacccaggacagagccaagcccgtgacccagatcgtgtctgccgaagcctggggcagagccgattgcggctttaccagcgagagctaccagcagggcgtgctgagcgccaccatcctgtacgagatcctgctgggcaaggccaccctgtacgccgtgctggtgtctgccctggtgctgatggctatggtcaagcggaaggacagccggggaagggccaagcgatctggatctggagcaacaaacttctcactactcaaacaagcaggtgacgtggaggagaatcccgggcctactagtaccatggactggatttggcgcatccttttccttgtcggcgctgctaccggcgcccattccgggccccaggtgcagctccaagaaagcggacccggactggttaagccctctcagaccctgtctctgacctgcacagttagcggagccagcattaccacaggcgagtattattggaattggtttcggcagccaccaggcaaggggcttgagtggatgggtgctattgctgcctctggcagcaccacctactctcccagctttgagagcagaacctccatcagccgggacacctccaaaaaccagttctctctgaagctgtcctccgtgaccgctgctgacaccgccgtctattattgtggccggtctttcggcgtggcagctgtgaccacaggacagaacagaggccagggaacacttgtgaccgtgtcctctggatccggcggcggaggatctggcggaggcggatctgggggcggaggctctttcgaacaagttcagctggttcagagcggagccgaagtgaagaaacctggcagcagcgtgaaggtgtcctgcaaagcaagcggcggcacctttagcacctacgccatccactgggttcgacaggcaccaggacaaggactggaatggatgggcagaatcatccccatcgagggcagagcctactacgcccagaaattccagggcagagtgaccatcaccgccgacgagtctacaagcaccgcctacatggaactgagcagcctgagaagcgaggataccgctgtgtactattgcgccagaggccggtacagctacagatattggttcgactactggggccagggcaccctggttacagtctcttctacgcgtatccagaaccctgatcctgccgtgtaccagctgcgggatagcaagagcagcgacaagagcgtgtgtctgttcaccgacttcgacagccagaccaacgtgtcccagagcaaggactccgacgtgtacatcaccgataagtgcgtgctggacatgcggagcatggacttcaagagcaactccgccgtggcctggtccaacaagtccgatttcgcctgcgccaacgccttcaacaacagcattatccccgaggacacattcttcccaagccccgagagcagctgcgacgtgaagctggtggaaaagagcttcgagacagacaccaacctgaacttccagaacctgagcgtgatcggcttcagaatcctgctgctgaaagtggccggctttaacctgctgatgaccctgcggctgtggtccagc

SEQ ID NO: 39979 - DNA, 2718 bp, synthetic construct
  source 1..2718: mol_type = other DNA
atggccttaccagtgaccgccttgctcctgccgctggccttgctgctccacgccgccaggccggaagtgcagctggttgaatctggcggaggactggttcaggctggcggatctctgagactgtcttgtgccgccagcggcagaacctttagcatgggctggtttagacaggcccctggcaaagagagagagttcgtcgccgccatcacatactctggcggcagcccttactacgccgactctgtgaagggcagattcaccatcagccgggacaacgccaagaacaccgtgtacctccagatgaacagcctgaagcctgaggacaccgccgtgtactactgcgccgccaatccaacatacggcagcgactggaacgccgagaattggggccagggaacccaagtgacagtgtctagcggtaccggcggaggcggatctggcggcggaggtagcggtggcggaggatctgaattcgagatcgtgctgacacagtctcccgccacactgtcactgtctccaggcgaaagagccacactgagctgtagagccagccagagcgtgtcctcttacctggcctggtatcagcagaagcctggacaggctccccggctgctgatctacgatgccagcaatagagccacaggcatccccgccagattttctggctctggcagcggcaccgatttcaccctgaccataagcagcctggaacctgaggacttcgccgtgtactactgccagcagagaagcaactggcccctgacctttggacagggcaccaaggtggaaatcaaactcgagatccagaaccctgatcctgccgtgtaccagctgcgggatagcaagagcagcgacaagagcgtgtgtctgttcaccgacttcgacagccagaccaacgtgtcccagagcaaggactccgacgtgtacatcaccgataagtgcgtgctggacatgcggagcatggacttcaagagcaactccgccgtggcctggtccaacaagtccgatttcgcctgcgccaacgccttcaacaacagcattatccccgaggacacattcttcccaagcagcgacgtgccctgcgacgtgaagctggtggaaaagagcttcgagacagacaccaacctgaacttccagaacctgagcgtgatcggcttcagaatcctgctgctgaaagtggccggctttaacctgctgatgaccctgcggctgtggtccagccgcgccaagagaagcggatctggcgtgaagcagaccctgaatttcgacctgctgaagctggctggcgacgtggaatccaacccaggccctactagtaccatggactggatttggcgcatccttttccttgtcggcgctgctaccggcgcccattccgggccccaggtgcagctggttgaatctggcggaggactggttcagcctggcggatctctgagactgtcttgtgccgccagcggcaacatcaacagcagaaactgcatgggctggttcagacaggcccctggcaagggaagagaaggcgtggcagctatcggccaagtgaccggcagaacctactacgtggacagcgtgaagggcagattcaccatcagcctggacaacagcaagaacaccctgtacctccagatgaacagcctgagagccgaggacaccgccgtgtactattgtgctgctgcccctggctgtctgctgtctgcacttagaagcgccgactacagaaactggggccagggcacactggtcaccgtttcttctggatccggcggcggaggatctggcggaggcggatctgggggcggaggctctttcgaacaagttcagctggttcagagcggagccgaagtgaagaaacctggcagcagcgtgaaggtgtcctgcaaagcaagcggcggcacctttagcacctacgccatccactgggttcgacaggcaccaggacaaggactggaatggatgggcagaatcatccccatcgagggcagagcctactacgcccagaaattccagggcagagtgaccatcaccgccgacgagtctacaagcaccgcctacatggaactgagcagcctgagaagcgaggataccgctgtgtactattgcgccagaggccggtacagctacagatattggttcgactactggggccagggcaccctggttacagtctcttctacgcgtgaggacctgaagaacgtgttcccacctgaggtggccgtgttcgagcctagcaaggccgagatcgcccacacccagaaagccaccctcgtgtgcctggctaccggcttctaccccgaccatgtggaactgtcttggtgggtcaacggcaaagaggtgcacagcggcgtgtgtaccgacccccagccactgaaagaacagcccgccctgaacgacagccggtactgcctgagcagcagactgagagtgtccgccaccttctggcagaacccccggaaccacttcagatgccaggtgcagttctacggcctgagcgagaacgacgagtggacccaggacagagccaagcccgtgacccagatcgtgtctgccgaagcctggggcagagccgattgcggcatcaccagcgccagctaccaccagggcgtgctgagcgccaccatcctgtacgagatcctgctgggcaaggccaccctgtacgccgtgctggtgtctgccctggtgctgatggctatggtcaagcggaaggacagccgggga

SEQ ID NO: 39980 - DNA, 2706 bp, synthetic construct
  source 1..2706: mol_type = other DNA
atggccttaccagtgaccgccttgctcctgccgctggccttgctgctccacgccgccaggccggaagtgcagctggttgaatctggcggaggactggttcaggctggcggatctctgagactgtcttgtgccgccagcggcagaacctttagcatgggctggtttagacaggcccctggcaaagagagagagttcgtcgccgccatcacatactctggcggcagcccttactacgccgactctgtgaagggcagattcaccatcagccgggacaacgccaagaacaccgtgtacctccagatgaacagcctgaagcctgaggacaccgccgtgtactactgcgccgccaatccaacatacggcagcgactggaacgccgagaattggggccagggaacccaagtgacagtgtctagcggtaccggcggaggcggatctggcggcggaggtagcggtggcggaggatctgaattcgagatcgtgctgacacagtctcccgccacactgtcactgtctccaggcgaaagagccacactgagctgtagagccagccagagcgtgtcctcttacctggcctggtatcagcagaagcctggacaggctccccggctgctgatctacgatgccagcaatagagccacaggcatccccgccagattttctggctctggcagcggcaccgatttcaccctgaccataagcagcctggaacctgaggacttcgccgtgtactactgccagcagagaagcaactggcccctgacctttggacagggcaccaaggtggaaatcaaactcgaggacctgaagaacgtgttcccacctgaggtggccgtgttcgagcctagcgaggccgagatcagccacacccagaaagccaccctcgtgtgcctggctaccggcttctaccccgaccatgtggaactgtcttggtgggtcaacggcaaagaggtgcacagcggcgtgtgtaccgacccccagccactgaaagaacagcccgccctgaacgacagccggtactgcctgagcagcagactgagagtgtccgccaccttctggcagaacccccggaaccacttcagatgccaggtgcagttctacggcctgagcgagaacgacgagtggacccaggacagagccaagcccgtgacccagatcgtgtctgccgaagcctggggcagagccgattgcggctttaccagcgagagctaccagcagggcgtgctgagcgccaccatcctgtacgagatcctgctgggcaaggccaccctgtacgccgtgctggtgtctgccctggtgctgatggctatggtcaagcggaaggacagccggggaagggccaagcgatctggatctggagcaacaaacttctcactactcaaacaagcaggtgacgtggaggagaatcccgggcctactagtaccatggactggatttggcgcatccttttccttgtcggcgctgctaccggcgcccattccgggccccaggtgcagctggttgaatctggcggaggactggttcagcctggcggatctctgagactgtcttgtgccgccagcggcaacatcaacagcagaaactgcatgggctggttcagacaggcccctggcaagggaagagaaggcgtggcagctatcggccaagtgaccggcagaacctactacgtggacagcgtgaagggcagattcaccatcagcctggacaacagcaagaacaccctgtacctccagatgaacagcctgagagccgaggacaccgccgtgtactattgtgctgctgcccctggctgtctgctgtctgcacttagaagcgccgactacagaaactggggccagggcacactggtcaccgtttcttctggatccggcggcggaggatctggcggaggcggatctgggggcggaggctctttcgaacaagttcagctggttcagagcggagccgaagtgaagaaacctggcagcagcgtgaaggtgtcctgcaaagcaagcggcggcacctttagcacctacgccatccactgggttcgacaggcaccaggacaaggactggaatggatgggcagaatcatccccatcgagggcagagcctactacgcccagaaattccagggcagagtgaccatcaccgccgacgagtctacaagcaccgcctacatggaactgagcagcctgagaagcgaggataccgctgtgtactattgcgccagaggccggtacagctacagatattggttcgactactggggccagggcaccctggttacagtctcttctacgcgtatccagaaccctgatcctgccgtgtaccagctgcgggatagcaagagcagcgacaagagcgtgtgtctgttcaccgacttcgacagccagaccaacgtgtcccagagcaaggactccgacgtgtacatcaccgataagtgcgtgctggacatgcggagcatggacttcaagagcaactccgccgtggcctggtccaacaagtccgatttcgcctgcgccaacgccttcaacaacagcattatccccgaggacacattcttcccaagccccgagagcagctgcgacgtgaagctggtggaaaagagcttcgagacagacaccaacctgaacttccagaacctgagcgtgatcggcttcagaatcctgctgctgaaagtggccggctttaacctgctgatgaccctgcggctgtggtccagc

SEQ ID NO: 39981 - DNA, 2706 bp, synthetic construct
  source 1..2706: mol_type = other DNA
atggccttaccagtgaccgccttgctcctgccgctggccttgctgctccacgccgccaggccggaagtgcaactggttgaatccggtggcggcctggtgcaagcaggcggatctctcagacttagctgtgccgcctccggcagaaccttcacaatgggatggtttaggcaggctccagggaaagagagagagttcgtcgccgccatctctctgtctcccacactggcctactacgccgactctgtgaaaggccggttcaccatctccagagataatgccaagaacaccgtggtgctgcaaatgaactctctgaaacccgaggatacagccctgtactattgtgccgctgaccggaagtccgtgatgagcatcagacccgattactggggacagggcacacaagtcacagtgtcctctggtaccggcggaggcggatctggcggcggaggtagcggtggcggaggatctgaattcgagatcgtgctgacacagtctcccgccacactgtcactgtctccaggcgaaagagccacactgagctgtagagccagccagagcgtgtcctcttacctggcctggtatcagcagaagcctggacaggctccccggctgctgatctacgatgccagcaatagagccacaggcatccccgccagattttctggctctggcagcggcaccgatttcaccctgaccataagcagcctggaacctgaggacttcgccgtgtactactgccagcagagaagcaactggcccctgacctttggacagggcaccaaggtggaaatcaaactcgaggacctgaagaacgtgttcccacctgaggtggccgtgttcgagcctagcgaggccgagatcagccacacccagaaagccaccctcgtgtgcctggctaccggcttctaccccgaccatgtggaactgtcttggtgggtcaacggcaaagaggtgcacagcggcgtgtgtaccgacccccagccactgaaagaacagcccgccctgaacgacagccggtactgcctgagcagcagactgagagtgtccgccaccttctggcagaacccccggaaccacttcagatgccaggtgcagttctacggcctgagcgagaacgacgagtggacccaggacagagccaagcccgtgacccagatcgtgtctgccgaagcctggggcagagccgattgcggctttaccagcgagagctaccagcagggcgtgctgagcgccaccatcctgtacgagatcctgctgggcaaggccaccctgtacgccgtgctggtgtctgccctggtgctgatggctatggtcaagcggaaggacagccggggaagggccaagcgatctggatctggagcaacaaacttctcactactcaaacaagcaggtgacgtggaggagaatcccgggcctactagtaccatggactggatttggcgcatccttttccttgtcggcgctgctaccggcgcccattccgggccccaggtgcagctggttgaatctggcggaggactggttcagcctggcggatctctgagactgtcttgtgccgccagcggcaacatcaacagcagaaactgcatgggctggttcagacaggcccctggcaagggaagagaaggcgtggcagctatcggccaagtgaccggcagaacctactacgtggacagcgtgaagggcagattcaccatcagcctggacaacagcaagaacaccctgtacctccagatgaacagcctgagagccgaggacaccgccgtgtactattgtgctgctgcccctggctgtctgctgtctgcacttagaagcgccgactacagaaactggggccagggcacactggtcaccgtttcttctggatccggcggcggaggatctggcggaggcggatctgggggcggaggctctttcgaacaagttcagctggttcagagcggagccgaagtgaagaaacctggcagcagcgtgaaggtgtcctgcaaagcaagcggcggcacctttagcacctacgccatccactgggttcgacaggcaccaggacaaggactggaatggatgggcagaatcatccccatcgagggcagagcctactacgcccagaaattccagggcagagtgaccatcaccgccgacgagtctacaagcaccgcctacatggaactgagcagcctgagaagcgaggataccgctgtgtactattgcgccagaggccggtacagctacagatattggttcgactactggggccagggcaccctggttacagtctcttctacgcgtatccagaaccctgatcctgccgtgtaccagctgcgggatagcaagagcagcgacaagagcgtgtgtctgttcaccgacttcgacagccagaccaacgtgtcccagagcaaggactccgacgtgtacatcaccgataagtgcgtgctggacatgcggagcatggacttcaagagcaactccgccgtggcctggtccaacaagtccgatttcgcctgcgccaacgccttcaacaacagcattatccccgaggacacattcttcccaagccccgagagcagctgcgacgtgaagctggtggaaaagagcttcgagacagacaccaacctgaacttccagaacctgagcgtgatcggcttcagaatcctgctgctgaaagtggccggctttaacctgctgatgaccctgcggctgtggtccagc

SEQ ID NO: 39982 - DNA, 2718 bp, synthetic construct
  source 1..2718: mol_type = other DNA
atggccttaccagtgaccgccttgctcctgccgctggccttgctgctccacgccgccaggccgcaggttcagctgcaagagtctggccctggcctggtcaagcctagccaaacactgagcctgacctgtaccgtgtctggcggctctatcaccaccggcgagttctactggaactggttcagacagcctcctggcaaaggactggaatggatgggagccattgccgccagcggcagcacaacatacagccctagcttcgagagccggaccagcatcagcagagacaccagcaagaatcagttcagcctgaagctgagcagcgtgacagccgccgatacagccgtgtattactgcggcagatcctttggagtggccgccgtgacaaccggccagaatagaggacagggcaccctggtcacagtgtctagcggtaccggcggaggcggatctggcggcggaggtagcggtggcggaggatctgaattcgagatcgtgctgacacagtctcccgccacactgtcactgtctccaggcgaaagagccacactgagctgtagagccagccagagcgtgtcctcttacctggcctggtatcagcagaagcctggacaggctccccggctgctgatctacgatgccagcaatagagccacaggcatccccgccagattttctggctctggcagcggcaccgatttcaccctgaccataagcagcctggaacctgaggacttcgccgtgtactactgccagcagagaagcaactggcccctgacctttggacagggcaccaaggtggaaatcaaactcgaggacctgaagaacgtgttcccacctgaggtggccgtgttcgagcctagcgaggccgagatcagccacacccagaaagccaccctcgtgtgcctggctaccggcttctaccccgaccatgtggaactgtcttggtgggtcaacggcaaagaggtgcacagcggcgtgtgtaccgacccccagccactgaaagaacagcccgccctgaacgacagccggtactgcctgagcagcagactgagagtgtccgccaccttctggcagaacccccggaaccacttcagatgccaggtgcagttctacggcctgagcgagaacgacgagtggacccaggacagagccaagcccgtgacccagatcgtgtctgccgaagcctggggcagagccgattgcggctttaccagcgagagctaccagcagggcgtgctgagcgccaccatcctgtacgagatcctgctgggcaaggccaccctgtacgccgtgctggtgtctgccctggtgctgatggctatggtcaagcggaaggacagccggggaagggccaagcgatctggatctggagcaacaaacttctcactactcaaacaagcaggtgacgtggaggagaatcccgggcctactagtaccatggactggatttggcgcatccttttccttgtcggcgctgctaccggcgcccattccgggccccaggtgcagctggttgaatctggcggaggactggttcagcctggcggatctctgagactgtcttgtgccgccagcggcaacatcaacagcagaaactgcatgggctggttcagacaggcccctggcaagggaagagaaggcgtggcagctatcggccaagtgaccggcagaacctactacgtggacagcgtgaagggcagattcaccatcagcctggacaacagcaagaacaccctgtacctccagatgaacagcctgagagccgaggacaccgccgtgtactattgtgctgctgcccctggctgtctgctgtctgcacttagaagcgccgactacagaaactggggccagggcacactggtcaccgtttcttctggatccggcggcggaggatctggcggaggcggatctgggggcggaggctctttcgaacaagttcagctggttcagagcggagccgaagtgaagaaacctggcagcagcgtgaaggtgtcctgcaaagcaagcggcggcacctttagcacctacgccatccactgggttcgacaggcaccaggacaaggactggaatggatgggcagaatcatccccatcgagggcagagcctactacgcccagaaattccagggcagagtgaccatcaccgccgacgagtctacaagcaccgcctacatggaactgagcagcctgagaagcgaggataccgctgtgtactattgcgccagaggccggtacagctacagatattggttcgactactggggccagggcaccctggttacagtctcttctacgcgtatccagaaccctgatcctgccgtgtaccagctgcgggatagcaagagcagcgacaagagcgtgtgtctgttcaccgacttcgacagccagaccaacgtgtcccagagcaaggactccgacgtgtacatcaccgataagtgcgtgctggacatgcggagcatggacttcaagagcaactccgccgtggcctggtccaacaagtccgatttcgcctgcgccaacgccttcaacaacagcattatccccgaggacacattcttcccaagccccgagagcagctgcgacgtgaagctggtggaaaagagcttcgagacagacaccaacctgaacttccagaacctgagcgtgatcggcttcagaatcctgctgctgaaagtggccggctttaacctgctgatgaccctgcggctgtggtccagc

SEQ ID NO: 39983 - DNA, 1497 bp, synthetic construct
  source 1..1497: mol_type = other DNA
atggccttaccagtgaccgccttgctcctgccgctggccttgctgctccacgccgccaggccggacatccagatgacacagagcccctctagcctgtctgccagcgtgggagacagagtgaccatcacctgtagagccagccagagcatcagaaactacctgaactggtatcagcaaaagcccggcaaggcccctgagctgctgattcatgctgcaagcagcctccagagcggcgtgccaagcagattttctggcagcggcagcggaaccgacttcaccctgacaatatctagcctccagcctgaggacttcgccagctactactgccagcagagctacagcgcccctcctatcacctttggacagggcaccagactggaaatcaagggcggaggcggaagtggaggcggaggatctggcggcggaggctctcaggttcagctccagcagtctggacctggcctggtcaagcctagccagacactgtctctgacctgtgccatcagcggcgatagcgtgtcctctaatagagccgcctggaactggatcagacagagccctagcagaggactccagtggctgggcagaacctactaccgcagcaagtggtacaacgactacgccgtgtctctgcggagccggatcaccatcaatcccgtgaccagcaagaaccaggtggccctgcacatgaacagcgtgacccctgaagataccgccgtgtactactgtgccagagccggaattgtggtggtgcccggacctgagacattctactactacgaccacggcctggacgtgtggggccagggaacaacagtgactgtctcttctacgcgtaaaattgaagttatgtatcctcctccttacctagacaatgagaagagcaatggaaccattatccatgtgaaagggaaacacctttgtccaagtcccctatttcccggaccttctaagcccttttgggtgctggtggtggttgggggagtcctggcttgctatagcttgctagtaacagtggcctttattattttctgggtgaggagtaagaggagcaggctcctgcacagtgactacatgaacatgactccacgccgccccggacccacccgcaagcattaccagccctatgccccaccacgcgacttcgcagcctatcgctccagagtgaagttcagcaggagcgcagacgcccccgcgtaccagcagggccagaaccagctctataacgagctcaatctaggacgaagagaggagtacgatgttttggacaagagacgtggccgggaccctgagatggggggaaagccgagaaggaagaaccctcaggaaggcctgtacaatgaactgcagaaagataagatggcggaggcctacagtgagattgggatgaaaggcgagcgccggaggggcaaggggcacgatggcctttaccagggtctcagtacagccaccaaggacacctacgacgcccttcacatgcaggccctgccccctcgc

SEQ ID NO: 39984 - DNA, 1515 bp, synthetic construct
  source 1..1515: mol_type = other DNA
atggccttaccagtgaccgccttgctcctgccgctggccttgctgctccacgccgccaggccggacatccagatgacacagagcccctctagcctgtctgccagcgtgggagacagagtgaccatcacctgtagagccagccagagcatcagaaactacctgaactggtatcagcaaaagcccggcaaggcccctgagctgctgattcatgctgcaagcagcctccagagcggcgtgccaagcagattttctggcagcggcagcggaaccgacttcaccctgacaatatctagcctccagcctgaggacttcgccagctactactgccagcagagctacagcgcccctcctatcacctttggacagggcaccagactggaaatcaagggcggaggcggaagtggaggcggaggatctggcggcggaggctctcaggttcagctccagcagtctggacctggcctggtcaagcctagccagacactgtctctgacctgtgccatcagcggcgatagcgtgtcctctaatagagccgcctggaactggatcagacagagccctagcagaggactccagtggctgggcagaacctactaccgcagcaagtggtacaacgactacgccgtgtctctgcggagccggatcaccatcaatcccgtgaccagcaagaaccaggtggccctgcacatgaacagcgtgacccctgaagataccgccgtgtactactgtgccagagccggaattgtggtggtgcccggacctgagacattctactactacgaccacggcctggacgtgtggggccagggaacaacagtgactgtctcttctacgcgtgcgaagcccaccacgacgccagcgccgcgaccaccaacaccggcgcccaccatcgcgtcgcagcccctgtccctgcgcccagaggcgtgccggccagcggcggggggcgcagtgcacacgagggggctggacttcgcctgtgacatctacatctgggcgcccttggccgggacttgtggggtccttctcctgtcactggttatcaccctttactgcaaacggggcagaaagaaactcctgtatatattcaaacaaccatttatgagaccagtacaaactactcaagaggaagatggctgtagctgccgatttccagaagaagaagaaggaggatgtgaactgagagtgaagttcagcaggagcgcagacgcccccgcgtaccagcagggccagaaccagctctataacgagctgaatctaggacgaagagaggagtacgatgttttggacaagagacgtggccgggaccctgagatggggggaaagccgagaaggaagaaccctcaggaaggcctgtacaatgaactgcagaaagataagatggcggaggcctacagtgagattgggatgaaaggcgagcgccggaggggcaaggggcacgatggcctttaccagggtctcagtacagccaccaaggacacctacgacgcccttcacatgcaggccctgccccctcgc

SEQ ID NO: 39985 - DNA, 1515 bp, synthetic construct
  source 1..1515: mol_type = other DNA
atggccttaccagtgaccgccttgctcctgccgctggccttgctgctccacgccgccaggccgcaggttcagctccagcagtctggacctggcctggtcaagcctagccagacactgtctctgacctgtgccatcagcggcgatagcgtgtcctctaatagagccgcctggaactggatcagacagagccctagcagaggactccagtggctgggcagaacctactaccgcagcaagtggtacaacgactacgccgtgtctctgcggagccggatcaccatcaatcccgtgaccagcaagaaccaggtggccctgcacatgaacagcgtgacccctgaagataccgccgtgtactactgtgccagagccggaattgtggtggtgcccggacctgagacattctactactacgaccacggcctggacgtgtggggccagggaacaacagtgactgtctcttctggcggaggcggaagtggaggcggaggatctggcggcggaggctctgacatccagatgacacagagcccctctagcctgtctgccagcgtgggagacagagtgaccatcacctgtagagccagccagagcatcagaaactacctgaactggtatcagcaaaagcccggcaaggcccctgagctgctgattcatgctgcaagcagcctccagagcggcgtgccaagcagattttctggcagcggcagcggaaccgacttcaccctgacaatatctagcctccagcctgaggacttcgccagctactactgccagcagagctacagcgcccctcctatcacctttggacagggcaccagactggaaatcaagacgcgtgcgaagcccaccacgacgccagcgccgcgaccaccaacaccggcgcccaccatcgcgtcgcagcccctgtccctgcgcccagaggcgtgccggccagcggcggggggcgcagtgcacacgagggggctggacttcgcctgtgacatctacatctgggcgcccttggccgggacttgtggggtccttctcctgtcactggttatcaccctttactgcaaacggggcagaaagaaactcctgtatatattcaaacaaccatttatgagaccagtacaaactactcaagaggaagatggctgtagctgccgatttccagaagaagaagaaggaggatgtgaactgagagtgaagttcagcaggagcgcagacgcccccgcgtaccagcagggccagaaccagctctataacgagctgaatctaggacgaagagaggagtacgatgttttggacaagagacgtggccgggaccctgagatggggggaaagccgagaaggaagaaccctcaggaaggcctgtacaatgaactgcagaaagataagatggcggaggcctacagtgagattgggatgaaaggcgagcgccggaggggcaaggggcacgatggcctttaccagggtctcagtacagccaccaaggacacctacgacgcccttcacatgcaggccctgccccctcgc

SEQ ID NO: 39986 - DNA, 1914 bp, synthetic construct
  source 1..1914: mol_type = other DNA
atggccttaccagtgaccgccttgctcctgccgctggccttgctgctccacgccgccaggccggacatccagatgacacagagcccctctagcctgtctgccagcgtgggagacagagtgaccatcacctgtagagccagccagagcatcagaaactacctgaactggtatcagcaaaagcccggcaaggcccctgagctgctgattcatgctgcaagcagcctccagagcggcgtgccaagcagattttctggcagcggcagcggaaccgacttcaccctgacaatatctagcctccagcctgaggacttcgccagctactactgccagcagagctacagcgcccctcctatcacctttggacagggcaccagactggaaatcaagctcgagatccagaaccctgatcctgccgtgtaccagctgcgggatagcaagagcagcgacaagagcgtgtgtctgttcaccgacttcgacagccagaccaacgtgtcccagagcaaggactccgacgtgtacatcaccgataagtgcgtgctggacatgcggagcatggacttcaagagcaactccgccgtggcctggtccaacaagtccgatttcgcctgcgccaacgccttcaacaacagcattatccccgaggacacattcttcccaagcagcgacgtgccctgcgacgtgaagctggtggaaaagagcttcgagacagacaccaacctgaacttccagaacctgagcgtgatcggcttcagaatcctgctgctgaaagtggccggctttaacctgctgatgaccctgcggctgtggtccagccgcgccaagagaagcggatctggcgtgaagcagaccctgaatttcgacctgctgaagctggctggcgacgtggaatccaacccaggccctactagtatggactggatttggcgcatccttttccttgtcggcgctgctaccggcgcgcattccttcgaacaggttcagctccagcagtctggacctggcctggtcaagcctagccagacactgtctctgacctgtgccatcagcggcgatagcgtgtcctctaatagagccgcctggaactggatcagacagagccctagcagaggactccagtggctgggcagaacctactaccgcagcaagtggtacaacgactacgccgtgtctctgcggagccggatcaccatcaatcccgtgaccagcaagaaccaggtggccctgcacatgaacagcgtgacccctgaagataccgccgtgtactactgtgccagagccggaattgtggtggtgcccggacctgagacattctactactacgaccacggcctggacgtgtggggccagggaacaacagtgactgtctcttctacgcgtgaggacctgaagaacgtgttcccacctgaggtggccgtgttcgagcctagcaaggccgagatcgcccacacccagaaagccaccctcgtgtgcctggctaccggcttctaccccgaccatgtggaactgtcttggtgggtcaacggcaaagaggtgcacagcggcgtgtgtaccgacccccagccactgaaagaacagcccgccctgaacgacagccggtactgcctgagcagcagactgagagtgtccgccaccttctggcagaacccccggaaccacttcagatgccaggtgcagttctacggcctgagcgagaacgacgagtggacccaggacagagccaagcccgtgacccagatcgtgtctgccgaagcctggggcagagccgattgcggcatcaccagcgccagctaccaccagggcgtgctgagcgccaccatcctgtacgagatcctgctgggcaaggccaccctgtacgccgtgctggtgtctgccctggtgctgatggctatggtcaagcggaaggacagccgggga

SEQ ID NO: 39987 - DNA, 1902 bp, synthetic construct
  source 1..1902: mol_type = other DNA
atggccttaccagtgaccgccttgctcctgccgctggccttgctgctccacgccgccaggccggacatccagatgacacagagcccctctagcctgtctgccagcgtgggagacagagtgaccatcacctgtagagccagccagagcatcagaaactacctgaactggtatcagcaaaagcccggcaaggcccctgagctgctgattcatgctgcaagcagcctccagagcggcgtgccaagcagattttctggcagcggcagcggaaccgacttcaccctgacaatatctagcctccagcctgaggacttcgccagctactactgccagcagagctacagcgcccctcctatcacctttggacagggcaccagactggaaatcaagctcgaggacctgaagaacgtgttcccacctgaggtggccgtgttcgagcctagcaaggccgagatcgcccacacccagaaagccaccctcgtgtgcctggctaccggcttctaccccgaccatgtggaactgtcttggtgggtcaacggcaaagaggtgcacagcggcgtgtgtaccgacccccagccactgaaagaacagcccgccctgaacgacagccggtactgcctgagcagcagactgagagtgtccgccaccttctggcagaacccccggaaccacttcagatgccaggtgcagttctacggcctgagcgagaacgacgagtggacccaggacagagccaagcccgtgacccagatcgtgtctgccgaagcctggggcagagccgattgcggcatcaccagcgccagctaccaccagggcgtgctgagcgccaccatcctgtacgagatcctgctgggcaaggccaccctgtacgccgtgctggtgtctgccctggtgctgatggctatggtcaagcggaaggacagccggggaagggccaagcgatctggatctggagcaacaaacttctcactactcaaacaagcaggtgacgtggaggagaatcccgggcctactagtatggactggatttggcgcatccttttccttgtcggcgctgctaccggcgcgcattccttcgaacaggttcagctccagcagtctggacctggcctggtcaagcctagccagacactgtctctgacctgtgccatcagcggcgatagcgtgtcctctaatagagccgcctggaactggatcagacagagccctagcagaggactccagtggctgggcagaacctactaccgcagcaagtggtacaacgactacgccgtgtctctgcggagccggatcaccatcaatcccgtgaccagcaagaaccaggtggccctgcacatgaacagcgtgacccctgaagataccgccgtgtactactgtgccagagccggaattgtggtggtgcccggacctgagacattctactactacgaccacggcctggacgtgtggggccagggaacaacagtgactgtctcttctacgcgtatccagaaccctgatcctgccgtgtaccagctgcgggatagcaagagcagcgacaagagcgtgtgtctgttcaccgacttcgacagccagaccaacgtgtcccagagcaaggactccgacgtgtacatcaccgataagtgcgtgctggacatgcggagcatggacttcaagagcaactccgccgtggcctggtccaacaagtccgatttcgcctgcgccaacgccttcaacaacagcattatccccgaggacacattcttcccaagcagcgacgtgccctgcgacgtgaagctggtggaaaagagcttcgagacagacaccaacctgaacttccagaacctgagcgtgatcggcttcagaatcctgctgctgaaagtggccggctttaacctgctgatgaccctgcggctgtggtccagc

SEQ ID NO: 39988 - DNA, 1902 bp, synthetic construct; identical to SEQ ID NO: 21896
  source 1..1902: mol_type = other DNA

SEQ ID NO: 39989 - DNA, 1914 bp, synthetic construct; identical to SEQ ID NO: 21898
  source 1..1914: mol_type = other DNA

SEQ ID NO: 39990 - DNA, 1950 bp, synthetic construct
  source 1..1950: mol_type = other DNA
atggccttaccagtgaccgccttgctcctgccgctggccttgctgctccacgccgccaggccgctcgaggaggacctgaagaacgtgttcccacctgaggtggccgtgttcgagcctagcaaggccgagatcgcccacacccagaaagccaccctcgtgtgcctggctaccggcttctaccccgaccatgtggaactgtcttggtgggtcaacggcaaagaggtgcacagcggcgtgtgtaccgacccccagccactgaaagaacagcccgccctgaacgacagccggtactgcctgagcagcagactgagagtgtccgccaccttctggcagaacccccggaaccacttcagatgccaggtgcagttctacggcctgagcgagaacgacgagtggacccaggacagagccaagcccgtgacccagatcgtgtctgccgaagcctggggcagagccgattgcggcatcaccagcgccagctaccaccagggcgtgctgagcgccaccatcctgtacgagatcctgctgggcaaggccaccctgtacgccgtgctggtgtctgccctggtgctgatggctatggtcaagcggaaggacagccggggaagggccaagcgatctggatctggagcaacaaacttctcactactcaaacaagcaggtgacgtggaggagaatcccgggcctactagcatggccttaccagtgaccgccttgctcctgccgctggccttgctgctccacgccgccaggccggacatccagatgacacagagcccctctagcctgtctgccagcgtgggagacagagtgaccatcacctgtagagccagccagagcatcagaaactacctgaactggtatcagcaaaagcccggcaaggcccctgagctgctgattcatgctgcaagcagcctccagagcggcgtgccaagcagattttctggcagcggcagcggaaccgacttcaccctgacaatatctagcctccagcctgaggacttcgccagctactactgccagcagagctacagcgcccctcctatcacctttggacagggcaccagactggaaatcaagggcggaggcggaagtggaggcggaggatctggcggcggaggctctcaggttcagctccagcagtctggacctggcctggtcaagcctagccagacactgtctctgacctgtgccatcagcggcgatagcgtgtcctctaatagagccgcctggaactggatcagacagagccctagcagaggactccagtggctgggcagaacctactaccgcagcaagtggtacaacgactacgccgtgtctctgcggagccggatcaccatcaatcccgtgaccagcaagaaccaggtggccctgcacatgaacagcgtgacccctgaagataccgccgtgtactactgtgccagagccggaattgtggtggtgcccggacctgagacattctactactacgaccacggcctggacgtgtggggccagggaacaacagtgactgtctcttctacgcgtatccagaaccctgatcctgccgtgtaccagctgcgggatagcaagagcagcgacaagagcgtgtgtctgttcaccgacttcgacagccagaccaacgtgtcccagagcaaggactccgacgtgtacatcaccgataagtgcgtgctggacatgcggagcatggacttcaagagcaactccgccgtggcctggtccaacaagtccgatttcgcctgcgccaacgccttcaacaacagcattatccccgaggacacattcttcccaagcagcgacgtgccctgcgacgtgaagctggtggaaaagagcttcgagacagacaccaacctgaacttccagaacctgagcgtgatcggcttcagaatcctgctgctgaaagtggccggctttaacctgctgatgaccctgcggctgtggtccagc

SEQ ID NO: 39991 - DNA, 1971 bp, synthetic construct
  source 1..1971: mol_type = other DNA
atggccttaccagtgaccgccttgctcctgccgctggccttgctgctccacgccgccaggccgctcgagggctccggcgatcgccctgatcctgccgtgtaccagctgcgggatagcaagagcagcgacaagagcgtgtgtctgttcaccgacttcgacagccagaccaacgtgtcccagagcaaggactccgacgtgtacatcaccgataagtgcgtgctggacatgcggagcatggacttcaagagcaactccgccgtggcctggtccaacaagtccgatttcgcctgcgccaacgccttcaacaacagcattatccccgaggacacattcttcccaagccccgagagcagctgcgacgtgaagctggtggaaaagagcttcgagacagacaccaacctgaacttccagaacctgagcgtgatcggcttcagaatcctgctgctgaaagtggccggctttaacctgctgatgaccctgcggctgtggtccagctctagtcgcgccaagagaagcggatctggcgtgaagcagaccctgaatttcgacctgctgaagctggctggcgacgtggaatccaacccaggccccactagcatggccttaccagtgaccgccttgctcctgccgctggccttgctgctccacgccgccaggccggacatccagatgacacagagcccctctagcctgtctgccagcgtgggagacagagtgaccatcacctgtagagccagccagagcatcagaaactacctgaactggtatcagcaaaagcccggcaaggcccctgagctgctgattcatgctgcaagcagcctccagagcggcgtgccaagcagattttctggcagcggcagcggaaccgacttcaccctgacaatatctagcctccagcctgaggacttcgccagctactactgccagcagagctacagcgcccctcctatcacctttggacagggcaccagactggaaatcaagggcggaggcggaagtggaggcggaggatctggcggcggaggctctcaggttcagctccagcagtctggacctggcctggtcaagcctagccagacactgtctctgacctgtgccatcagcggcgatagcgtgtcctctaatagagccgcctggaactggatcagacagagccctagcagaggactccagtggctgggcagaacctactaccgcagcaagtggtacaacgactacgccgtgtctctgcggagccggatcaccatcaatcccgtgaccagcaagaaccaggtggccctgcacatgaacagcgtgacccctgaagataccgccgtgtactactgtgccagagccggaattgtggtggtgcccggacctgagacattctactactacgaccacggcctggacgtgtggggccagggaacaacagtgactgtctcttctacgcgtgaggacctgaagaacgtgttcccacctgaggtggccgtgttcgagcctagcgaggccgagatcagccacacccagaaagccaccctcgtgtgcctggctaccggcttctaccccgaccatgtggaactgtcttggtgggtcaacggcaaagaggtgcacagcggcgtgtgtaccgacccccagccactgaaagaacagcccgccctgaacgacagccggtactgcctgagcagcagactgagagtgtccgccaccttctggcagaacccccggaaccacttcagatgccaggtgcagttctacggcctgagcgagaacgacgagtggacccaggacagagccaagcccgtgacccagatcgtgtctgccgaagcctggggcagagccgattgcggctttaccagcgagagctaccagcagggcgtgctgagcgccaccatcctgtacgagatcctgctgggcaaggccaccctgtacgccgtgctggtgtctgccctggtgctgatggctatggtcaagcggaaggacagccgggga

SEQ ID NO: 39992 - DNA, 1902 bp, synthetic construct
  source 1..1902: mol_type = other DNA
atggccttaccagtgaccgccttgctcctgccgctggccttgctgctccacgccgccaggccggacatccagatgacacagagcccctctagcctgtctgccagcgtgggagacagagtgaccatcacctgtagagccagccagagcatcagaaactacctgaactggtatcagcaaaagcccggcaaggcccctgagctgctgattcatgctgcaagcagcctccagagcggcgtgccaagcagattttctggcagcggcagcggaaccgacttcaccctgacaatatctagcctccagcctgaggacttcgccagctactactgccagcagagctacagcgcccctcctatcacctttggacagggcaccagactggaaatcaagctcgaggacctgaagaacgtgttcccacctgaggtggccgtgttcgagcctagcgaggccgagatcagccacacccagaaagccaccctcgtgtgcctggctaccggcttctaccccgaccatgtggaactgtcttggtgggtcaacggcaaagaggtgcacagcggcgtgtctaccgacccccagccactgaaagaacagcccgccctgaacgacagccggtactgcctgagcagcagactgagagtgtccgccaccttctggcagaacccccggaaccacttcagatgccaggtgcagttctacggcctgagcgagaacgacgagtggacccaggacagagccaagcccgtgacccagatcgtgtctgccgaagcctggggcagagccgattgcggctttaccagcgagagctaccagcagggcgtgctgagcgccaccatcctgtacgagatcctgctgggcaaggccaccctgtacgccgtgctggtgtctgccctggtgctgatggctatggtcaagcggaaggacagccggggaagggccaagcgatctggatctggagcaacaaacttctcactactcaaacaagcaggtgacgtggaggagaatcccgggcctactagtatggactggatttggcgcatccttttccttgtcggcgctgctaccggcgcgcattccttcgaacaggttcagctccagcagtctggacctggcctggtcaagcctagccagacactgtctctgacctgtgccatcagcggcgatagcgtgtcctctaatagagccgcctggaactggatcagacagagccctagcagaggactccagtggctgggcagaacctactaccgcagcaagtggtacaacgactacgccgtgtctctgcggagccggatcaccatcaatcccgtgaccagcaagaaccaggtggccctgcacatgaacagcgtgacccctgaagataccgccgtgtactactgtgccagagccggaattgtggtggtgcccggacctgagacattctactactacgaccacggcctggacgtgtggggccagggaacaacagtgactgtctcttctacgcgtatccagaaccctgatcctgccgtgtaccagctgcgggatagcaagagcagcgacaagagcgtgtgtctgttcaccgacttcgacagccagaccaacgtgtcccagagcaaggactccgacgtgtacatcaccgataagaccgtgctggacatgcggagcatggacttcaagagcaactccgccgtggcctggtccaacaagtccgatttcgcctgcgccaacgccttcaacaacagcattatccccgaggacacattcttcccaagccccgagagcagctgcgacgtgaagctggtggaaaagagcttcgagacagacaccaacctgaacttccagaacctgagcgtgatcggcttcagaatcctgctgctgaaagtggccggctttaacctgctgatgaccctgcggctgtggtccagc

SEQ ID NO: 39993 - DNA, 1926 bp, synthetic construct
  source 1..1926: mol_type = other DNA
atggccttaccagtgaccgccttgctcctgccgctggccttgctgctccacgccgccaggccggacatccagatgacacagagcccctctagcctgtctgccagcgtgggagacagagtgaccatcacctgtagagccagccagagcatcagaaactacctgaactggtatcagcaaaagcccggcaaggcccctgagctgctgattcatgctgcaagcagcctccagagcggcgtgccaagcagattttctggcagcggcagcggaaccgacttcaccctgacaatatctagcctccagcctgaggacttcgccagctactactgccagcagagctacagcgcccctcctatcacctttggacagggcaccagactggaaatcaagctcgaggacaagcagctggacgccgacgtgtcccccaagcctaccatcttcctgccctctatcgccgagacaaagctccagaaggccggcacctacctgtgcctgctggaaaagttcttcccagatgtgattaagatccactggcaggaaaagaagtccaacaccatcctgggcagccaggaaggcaacaccatgaagaccaacgacacctacatgaagttcagctggctgaccgtgcccgagaagtccctggacaaagaacacagatgcatcgtgcggcacgaaaacaacaagaacggcgtggaccaggaaatcatcttcccacccatcaagaccgatgtgattacaatggaccccaaggacaactgctccaaggacgccaacgataccctgctgctccagctgaccaacaccagcgcctactacatgtacttgttgctgctgctgaagtccgtggtgtacttcgccatcatcacatgctgcctgctgcggagaaccgccttctgctgcaacggcgagaagtctagggccaagcgatctggatctggagcaacaaacttctcactactcaaacaagcaggtgacgtggaggagaatcccgggcctactagtatggactggatttggcgcatccttttccttgtcggcgctgctaccggcgcgcattccttcgaacaggttcagctccagcagtctggacctggcctggtcaagcctagccagacactgtctctgacctgtgccatcagcggcgatagcgtgtcctctaatagagccgcctggaactggatcagacagagccctagcagaggactccagtggctgggcagaacctactaccgcagcaagtggtacaacgactacgccgtgtctctgcggagccggatcaccatcaatcccgtgaccagcaagaaccaggtggccctgcacatgaacagcgtgacccctgaagataccgccgtgtactactgtgccagagccggaattgtggtggtgcccggacctgagacattctactactacgaccacggcctggacgtgtggggccagggaacaacagtgactgtctcttctacgcgtagccagcctcacaccaagcccagcgtgttcgtgatgaagaacggcaccaacgtggcctgcctcgtgaaagagttctaccccaaggacatcaggatcaacctggtgtccagcaagaagatcaccgagttcgaccccgccatcgtgatctcccccagcggcaagtacaacgccgtgaagctggggaagtacgaggacagcaacagcgtgacctgctccgtgcagcacgacaacaagaccgtgcacagcaccgactttgaagtgaaaaccgactccaccgaccacgtgaagcccaaagagacagagaacaccaagcagcccagcaagagctgccacaagcccaaggccatcgtgcacaccgagaaagtgaacatgatgagcctgaccgtgctgggcctgcggatgctgttcgccaaaaccgtggccgtgaacttcctgctgaccgccaagctgttcttcctc

SEQ ID NO: 39994 - DNA, 1926 bp, synthetic construct; identical to SEQ ID NO: 21906
  source 1..1926: mol_type = other DNA

SEQ ID NO: 39995 - DNA, 1971 bp, synthetic construct
  source 1..1971: mol_type = other DNA
atggccttaccagtgaccgccttgctcctgccgctggccttgctgctccacgccgccaggccgctcgaggacaagcagctggacgccgacgtgtcccccaagcctaccatcttcctgccctctatcgccgagacaaagctccagaaggccggcacctacctgtgcctgctggaaaagttcttcccagatgtgattaagatccactggcaggaaaagaagtccaacaccatcctgggcagccaggaaggcaacaccatgaagaccaacgacacctacatgaagttcagctggctgaccgtgcccgagaagtccctggacaaagaacacagatgcatcgtgcggcacgaaaacaacaagaacggcgtggaccaggaaatcatcttcccacccatcaagaccgatgtgattacaatggaccccaaggacaactgctccaaggacgccaacgataccctgctgctccagctgaccaacaccagcgcctactacatgtacttgttgctgctgctgaagtccgtggtgtacttcgccatcatcacatgctgcctgctgcggagaaccgccttctgctgcaacggcgagaagtctagggccaagcgatctggatctggagcaacaaacttctcactactcaaacaagcaggtgacgtggaggagaatcccgggcctactagcatggccttaccagtgaccgccttgctcctgccgctggccttgctgctccacgccgccaggccggacatccagatgacacagagcccctctagcctgtctgccagcgtgggagacagagtgaccatcacctgtagagccagccagagcatcagaaactacctgaactggtatcagcaaaagcccggcaaggcccctgagctgctgattcatgctgcaagcagcctccagagcggcgtgccaagcagattttctggcagcggcagcggaaccgacttcaccctgacaatatctagcctccagcctgaggacttcgccagctactactgccagcagagctacagcgcccctcctatcacctttggacagggcaccagactggaaatcaagggcggaggcggaagtggaggcggaggatctggcggcggaggctctcaggttcagctccagcagtctggacctggcctggtcaagcctagccagacactgtctctgacctgtgccatcagcggcgatagcgtgtcctctaatagagccgcctggaactggatcagacagagccctagcagaggactccagtggctgggcagaacctactaccgcagcaagtggtacaacgactacgccgtgtctctgcggagccggatcaccatcaatcccgtgaccagcaagaaccaggtggccctgcacatgaacagcgtgacccctgaagataccgccgtgtactactgtgccagagccggaattgtggtggtgcccggacctgagacattctactactacgaccacggcctggacgtgtggggccagggaacaacagtgactgtctcttctacgcgtagccagcctcacaccaagcccagcgtgttcgtgatgaagaacggcaccaacgtggcctgcctcgtgaaagagttctaccccaaggacatcaggatcaacctggtgtccagcaagaagatcaccgagttcgaccccgccatcgtgatctcccccagcggcaagtacaacgccgtgaagctggggaagtacgaggacagcaacagcgtgacctgctccgtgcagcacgacaacaagaccgtgcacagcaccgactttgaagtgaaaaccgactccaccgaccacgtgaagcccaaagagacagagaacaccaagcagcccagcaagagctgccacaagcccaaggccatcgtgcacaccgagaaagtgaacatgatgagcctgaccgtgctgggcctgcggatgctgttcgccaaaaccgtggccgtgaacttcctgctgaccgccaagctgttcttcctc

SEQ ID NO: 39996 - DNA, 2433 bp, synthetic construct
  source 1..2433: mol_type = other DNA
atggccttaccagtgaccgccttgctcctgccgctggccttgctgctccacgccgccaggccggacatccagatgacacagagcccctctagcctgtctgccagcgtgggagacagagtgaccatcacctgtagagccagccagagcatcagaaactacctgaactggtatcagcaaaagcccggcaaggcccctgagctgctgattcatgctgcaagcagcctccagagcggcgtgccaagcagattttctggcagcggcagcggaaccgacttcaccctgacaatatctagcctccagcctgaggacttcgccagctactactgccagcagagctacagcgcccctcctatcacctttggacagggcaccagactggaaatcaagggacagcctaaggccaatcctaccgtgacactgttccctccaagcagcgaagaactccaggccaacaaggccacacttgtgtgcctgatctccgacttctaccctggggctgtgacagtggcttggaaggccgatggatctcctgtgaaagccggcgtggaaaccaccaagccatccaagcagagcaacaacaaatacgccgccagctcctacctgagcctgacacctgagcagtggaagtcccacagatcctacagctgccaagtgacccacgaaggcagcaccgtggaaaagacagtggcccctacagagtgcagcggatcccagagcttcggcctgctggaccccaagctgtgctacctgctggatggcatcctgttcatctacggcgtgatcctgaccgccctgttcctgagagtgaagttcagcagaagcgccgacgcccctgcctaccagcagggacagaaccaactgtacaacgagctgaacctgggcagacgggaagagtacgacgtgctggacaagcggagaggcagggaccctgagatgggcggaaagccccagcggagaaagaacccccaggaaggactgtataacgaactccagaaagacaagatggccgaagcctacagcgagatcggcatgaagggcgagcggagaagaggcaagggccacgatggcctgtaccagggcctgagcaccgccaccaaggacacctatgacgccctgcacatgcaggccctgcctccaagaagggccaagcgatctggatctggagcaacaaacttctcactactcaaacaagcaggtgacgtggaggagaatcccgggcctactagtatggactggatttggcgcatccttttccttgtcggcgctgctaccggcgcgcattccttcgaacaggttcagctccagcagtctggacctggcctggtcaagcctagccagacactgtctctgacctgtgccatcagcggcgatagcgtgtcctctaatagagccgcctggaactggatcagacagagccctagcagaggactccagtggctgggcagaacctactaccgcagcaagtggtacaacgactacgccgtgtctctgcggagccggatcaccatcaatcccgtgaccagcaagaaccaggtggccctgcacatgaacagcgtgacccctgaagataccgccgtgtactactgtgccagagccggaattgtggtggtgcccggacctgagacattctactactacgaccacggcctggacgtgtggggccagggaacaacagtgactgtctcttctgcctctacaaagggaccctccgtgtttcctctggctcccagcagcaagtctacaagcggaggaacagccgctctgggctgcctggtcaaggattactttcccgagcctgtgaccgtgtcctggaatagcggagcactgacaagcggcgtgcacacctttccagccgtgctgcaaagcagcggcctgtactctctgagcagcgtggtcacagtgcctagctctagcctgggcacccagacctacatctgcaatgtgaaccacaagcctagcaacaccaaggtggacaagagagtggaacccaagagctgtggtacccagagttttgggttgttggaccctaaattgtgctatctgttggacggaatcctgttcatttacggagtgatcctgaccgcattgttcctgcgggttaagttttccagatccgcagacgcacccgcttaccaacaagggcagaaccaactctacaatgaacttaatttggggcggagggaagagtacgacgttctggacaaaaggaggggacgagatcccgagatgggcggaaagcctcagcgaaggaagaatccgcaagaggggctttataacgaactccagaaagataaaatggcagaagcctatagtgagattgggatgaagggagaaaggaggaggggtaaaggtcacgatgggttgtaccaaggattgagcacagccactaaagatacctatgatgcgctccacatgcaggccctgccgccaaga

SEQ ID NO: 39997 - DNA, 2490 bp, synthetic construct; identical to SEQ ID NO: 21909
  source 1..2490: mol_type = other DNA

SEQ ID NO: 39998 - DNA, 2616 bp, synthetic construct
  source 1..2616: mol_type = other DNA
atggccttaccagtgaccgccttgctcctgccgctggccttgctgctccacgccgccaggccggacatccagatgacacagagcccctctagcctgtctgccagcgtgggagacagagtgaccatcacctgtagagccagccagagcatcagaaactacctgaactggtatcagcaaaagcccggcaaggcccctgagctgctgattcatgctgcaagcagcctccagagcggcgtgccaagcagattttctggcagcggcagcggaaccgacttcaccctgacaatatctagcctccagcctgaggacttcgccagctactactgccagcagagctacagcgcccctcctatcacctttggacagggcaccagactggaaatcaagctcgaggaggacctgaagaacgtgttcccacctgaggtggccgtgttcgagcctagcgaggccgagatcagccacacccagaaagccaccctcgtgtgcctggctaccggcttctaccccgaccatgtggaactgtcttggtgggtcaacggcaaagaggtgcacagcggcgtgtctaccgacccccagccactgaaagaacagcccgccctgaacgacagccggtactgcctgagcagcagactgagagtgtccgccaccttctggcagaacccccggaaccacttcagatgccaggtgcagttctacggcctgagcgagaacgacgagtggacccaggacagagccaagcccgtgacccagatcgtgtctgccgaagcctggggcagagccgattgcggatcccagagcttcggcctgctggaccccaagctgtgctacctgctggatggcatcctgttcatctacggcgtgatcctgaccgccctgttcctgagagtgaagttcagcagaagcgccgacgcccctgcctaccagcagggacagaaccaactgtacaacgagctgaacctgggcagacgggaagagtacgacgtgctggacaagcggagaggcagggaccctgagatgggcggaaagccccagcggagaaagaacccccaggaaggactgtataacgaactccagaaagacaagatggccgaagcctacagcgagatcggcatgaagggcgagcggagaagaggcaagggccacgatggcctgtaccagggcctgagcaccgccaccaaggacacctatgacgccctgcacatgcaggccctgcctccaagaagggccaagcgatctggatctggagcaacaaacttctcactactcaaacaagcaggtgacgtggaggagaatcccgggcctactagtatggactggatttggcgcatccttttccttgtcggcgctgctaccggcgcgcattccttcgaacaggttcagctccagcagtctggacctggcctggtcaagcctagccagacactgtctctgacctgtgccatcagcggcgatagcgtgtcctctaatagagccgcctggaactggatcagacagagccctagcagaggactccagtggctgggcagaacctactaccgcagcaagtggtacaacgactacgccgtgtctctgcggagccggatcaccatcaatcccgtgaccagcaagaaccaggtggccctgcacatgaacagcgtgacccctgaagataccgccgtgtactactgtgccagagccggaattgtggtggtgcccggacctgagacattctactactacgaccacggcctggacgtgtggggccagggaacaacagtgactgtctcttctacgcgtatccagaaccctgatcctgccgtgtaccagctgcgggatagcaagagcagcgacaagagcgtgtgtctgttcaccgacttcgacagccagaccaacgtgtcccagagcaaggactccgacgtgtacatcaccgataagaccgtgctggacatgcggagcatggacttcaagagcaactccgccgtggcctggtccaacaagtccgatttcgcctgcgccaacgccttcaacaacagcattatccccgaggacacattcttcccaagccccgagagcagctgcggtacccagagttttgggttgttggaccctaaattgtgctatctgttggacggaatcctgttcatttacggagtgatcctgaccgcattgttcctgaggagcaagcggtcacggctgctccacagcgattacatgaatatgacaccacgaagaccgggtcctactcgcaaacactaccaaccctacgcacctccccgcgactttgcagcgtaccgatctcgggttaagttttccagatccgcagacgcacccgcttaccaacaagggcagaaccaactctacaatgaacttaatttggggcggagggaagagtacgacgttctggacaaaaggaggggacgagatcccgagatgggcggaaagcctcagcgaaggaagaatccgcaagaggggctttataacgaactccagaaagataaaatggcagaagcctatagtgagattgggatgaagggagaaaggaggaggggtaaaggtcacgatgggttgtaccaaggattgagcacagccactaaagatacctatgatgcgctccacatgcaggccctgccgccaaga

SEQ ID NO: 39999 - DNA, 2745 bp, synthetic construct
  source 1..2745: mol_type = other DNA
atggccttaccagtgaccgccttgctcctgccgctggccttgctgctccacgccgccaggccggacatccagatgacacagagcccctctagcctgtctgccagcgtgggagacagagtgaccatcacctgtagagccagccagagcatcagaaactacctgaactggtatcagcaaaagcccggcaaggcccctgagctgctgattcatgctgcaagcagcctccagagcggcgtgccaagcagattttctggcagcggcagcggaaccgacttcaccctgacaatatctagcctccagcctgaggacttcgccagctactactgccagcagagctacagcgcccctcctatcacctttggacagggcaccagactggaaatcaagctcgaggaggacctgaagaacgtgttcccacctgaggtggccgtgttcgagcctagcgaggccgagatcagccacacccagaaagccaccctcgtgtgcctggctaccggcttctaccccgaccatgtggaactgtcttggtgggtcaacggcaaagaggtgcacagcggcgtgtctaccgacccccagccactgaaagaacagcccgccctgaacgacagccggtactgcctgagcagcagactgagagtgtccgccaccttctggcagaacccccggaaccacttcagatgccaggtgcagttctacggcctgagcgagaacgacgagtggacccaggacagagccaagcccgtgacccagatcgtgtctgccgaagcctggggcagagccgattgcggatcccagagcttcggcctgctggaccccaagctgtgctacctgctggatggcatcctgttcatctacggcgtgatcctgaccgccctgttcctgaaacggggcagaaagaaactcctgtatatattcaaacaaccatttatgagaccagtacaaactactcaagaggaagatggctgtagctgccgatttccagaagaagaagaaggaggatgtgaactgagagtgaagttcagcagaagcgccgacgcccctgcctaccagcagggacagaaccaactgtacaacgagctgaacctgggcagacgggaagagtacgacgtgctggacaagcggagaggcagggaccctgagatgggcggaaagccccagcggagaaagaacccccaggaaggactgtataacgaactccagaaagacaagatggccgaagcctacagcgagatcggcatgaagggcgagcggagaagaggcaagggccacgatggcctgtaccagggcctgagcaccgccaccaaggacacctatgacgccctgcacatgcaggccctgcctccaagaagggccaagcgatctggatctggagcaacaaacttctcactactcaaacaagcaggtgacgtggaggagaatcccgggcctactagtatggactggatttggcgcatccttttccttgtcggcgctgctaccggcgcgcattccttcgaacaggttcagctccagcagtctggacctggcctggtcaagcctagccagacactgtctctgacctgtgccatcagcggcgatagcgtgtcctctaatagagccgcctggaactggatcagacagagccctagcagaggactccagtggctgggcagaacctactaccgcagcaagtggtacaacgactacgccgtgtctctgcggagccggatcaccatcaatcccgtgaccagcaagaaccaggtggccctgcacatgaacagcgtgacccctgaagataccgccgtgtactactgtgccagagccggaattgtggtggtgcccggacctgagacattctactactacgaccacggcctggacgtgtggggccagggaacaacagtgactgtctcttctacgcgtatccagaaccctgatcctgccgtgtaccagctgcgggatagcaagagcagcgacaagagcgtgtgtctgttcaccgacttcgacagccagaccaacgtgtcccagagcaaggactccgacgtgtacatcaccgataagaccgtgctggacatgcggagcatggacttcaagagcaactccgccgtggcctggtccaacaagtccgatttcgcctgcgccaacgccttcaacaacagcattatccccgaggacacattcttcccaagccccgagagcagctgcggtacccagagttttgggttgttggaccctaaattgtgctatctgttggacggaatcctgttcatttacggagtgatcctgaccgcattgttcctgaagagaggccggaagaagctgctgtacatcttcaagcagcctttcatgcggcccgtgcagaccacccaggaagaggacggctgctcctgccggttccccgaggaagaagaaggcggctgcgagctgcgggttaagttttccagatccgcagacgcacccgcttaccaacaagggcagaaccaactctacaatgaacttaatttggggcggagggaagagtacgacgttctggacaaaaggaggggacgagatcccgagatgggcggaaagcctcagcgaaggaagaatccgcaagaggggctttataacgaactccagaaagataaaatggcagaagcctatagtgagattgggatgaagggagaaaggaggaggggtaaaggtcacgatgggttgtaccaaggattgagcacagccactaaagatacctatgatgcgctccacatgcaggccctgccgccaaga

SEQ ID NO: 40000 - DNA, 1806 bp, synthetic construct
  source 1..1806: mol_type = other DNA
atggccttaccagtgaccgccttgctcctgccgctggccttgctgctccacgccgccaggccggacatccagatgacacagagcccctctagcctgtctgccagcgtgggagacagagtgaccatcacctgtagagccagccagagcatcagaaactacctgaactggtatcagcaaaagcccggcaaggcccctgagctgctgattcatgctgcaagcagcctccagagcggcgtgccaagcagattttctggcagcggcagcggaaccgacttcaccctgacaatatctagcctccagcctgaggacttcgccagctactactgccagcagagctacagcgcccctcctatcacctttggacagggcaccagactggaaatcaagctcgagcagagcttcggcctgctggaccccaagctgtgctacctgctggatggcatcctgttcatctacggcgtgatcctgaccgccctgttcctgagagtgaagttcagcagaagcgccgacgcccctgcctaccagcagggacagaaccaactgtacaacgagctgaacctgggcagacgggaagagtacgacgtgctggacaagcggagaggcagggaccctgagatgggcggaaagccccagcggagaaagaacccccaggaaggactgtataacgaactccagaaagacaagatggccgaagcctacagcgagatcggcatgaagggcgagcggagaagaggcaagggccacgatggcctgtaccagggcctgagcaccgccaccaaggacacctatgacgccctgcacatgcaggccctgcctccaagaagggccaagcgatctggatctggagcaacaaacttctcactactcaaacaagcaggtgacgtggaggagaatcccgggcctactagtatggactggatttggcgcatccttttccttgtcggcgctgctaccggcgcgcattccttcgaacaggttcagctccagcagtctggacctggcctggtcaagcctagccagacactgtctctgacctgtgccatcagcggcgatagcgtgtcctctaatagagccgcctggaactggatcagacagagccctagcagaggactccagtggctgggcagaacctactaccgcagcaagtggtacaacgactacgccgtgtctctgcggagccggatcaccatcaatcccgtgaccagcaagaaccaggtggccctgcacatgaacagcgtgacccctgaagataccgccgtgtactactgtgccagagccggaattgtggtggtgcccggacctgagacattctactactacgaccacggcctggacgtgtggggccagggaacaacagtgactgtctcttctacgcgtcagagttttgggttgttggaccctaaattgtgctatctgttggacggaatcctgttcatttacggagtgatcctgaccgcattgttcctgcgggttaagttttccagatccgcagacgcacccgcttaccaacaagggcagaaccaactctacaatgaacttaatttggggcggagggaagagtacgacgttctggacaaaaggaggggacgagatcccgagatgggcggaaagcctcagcgaaggaagaatccgcaagaggggctttataacgaactccagaaagataaaatggcagaagcctatagtgagattgggatgaagggagaaaggaggaggggtaaaggtcacgatgggttgtaccaaggattgagcacagccactaaagatacctatgatgcgctccacatgcaggccctgccgccaaga

SEQ ID NO: 40001 - DNA, 1980 bp, synthetic construct; identical to SEQ ID NO: 21916
  source 1..1980: mol_type = other DNA

SEQ ID NO: 40002 - DNA, 1914 bp, synthetic construct; identical to SEQ ID NO: 21917
  source 1..1914: mol_type = other DNA

SEQ ID NO: 40003 - DNA, 1914 bp, synthetic construct; identical to SEQ ID NO: 21918
  source 1..1914: mol_type = other DNA

SEQ ID NO: 40004 - DNA, 1392 bp, synthetic construct; identical to SEQ ID NO: 21919
  source 1..1392: mol_type = other DNA

SEQ ID NO: 40005 - DNA, 1287 bp, synthetic construct; identical to SEQ ID NO: 21920
  source 1..1287: mol_type = other DNA

SEQ ID NO: 40006 - DNA, 1317 bp, synthetic construct; identical to SEQ ID NO: 21921
  source 1..1317: mol_type = other DNA

SEQ ID NO: 40007 - DNA, 1266 bp, synthetic construct; identical to SEQ ID NO: 21922
  source 1..1266: mol_type = other DNA

SEQ ID NO: 40008 - DNA, 1551 bp, synthetic construct; identical to SEQ ID NO: 21927
  source 1..1551: mol_type = other DNA

SEQ ID NO: 40009 - DNA, 1476 bp, synthetic construct
  source 1..1476: mol_type = other DNA
atggccttaccagtgaccgccttgctcctgccgctggccttgctgctccacgccgccaggccggacatccagatgacacagagcccctctagcctgtctgccagcgtgggagacagagtgaccatcacctgtagagccagccagagcatcagaaactacctgaactggtatcagcaaaagcccggcaaggcccctgagctgctgattcatgctgcaagcagcctccagagcggcgtgccaagcagattttctggcagcggcagcggaaccgacttcaccctgacaatatctagcctccagcctgaggacttcgccagctactactgccagcagagctacagcgcccctcctatcacctttggacagggcaccagactggaaatcaagggcggaggcggaagtggaggcggaggatctggcggcggaggctctcaggttcagctccagcagtctggacctggcctggtcaagcctagccagacactgtctctgacctgtgccatcagcggcgatagcgtgtcctctaatagagccgcctggaactggatcagacagagccctagcagaggactccagtggctgggcagaacctactaccgcagcaagtggtacaacgactacgccgtgtctctgcggagccggatcaccatcaatcccgtgaccagcaagaaccaggtggccctgcacatgaacagcgtgacccctgaagataccgccgtgtactactgtgccagagccggaattgtggtggtgcccggacctgagacattctactactacgaccacggcctggacgtgtggggccagggaacaacagtgactgtctcttctacgcgtggaatgaggactgaggatcttcccaaagctgtcgtctttctcgaaccccaatggtatcgggtgctcgaaaaagactctgtgacactgaaatgccaaggggcctactctcccgaggacaactccacacagtggtttcataatgagtccctcatcagctctcaggccagctcttatttcattgatgccgctacagtggacgactccggcgagtatcggtgtcagaccaatctgtctacactgtctgaccccgtgcagcttgaggtccacattggatggttgctcttgcaagccccacgctgggttttcaaagaggaagatccaatccatctgcggtgccacagctggaaaaacaccgctctccacaaagtcacatacctgcaaaatggcaaaggacgcaaatacttccatcacaattccgatttttacattccgaaggctaccctgaaagacagcggcagctatttctgccggggactcgtcggctccaagaatgtgtcctccgaaaccgtgaatatcacgattacccaaggactggctgtgcctacaatctctagcttctttccgcctggataccaagtctccttctgtcttgtgatggtcctcctgtttgctgtggacacaggactgtacttttccgtg

SEQ ID NO: 40010 - DNA, 1479 bp, synthetic construct
  source 1..1479: mol_type = other DNA
atggccttaccagtgaccgccttgctcctgccgctggccttgctgctccacgccgccaggccggacatccagatgacacagagcccctctagcctgtctgccagcgtgggagacagagtgaccatcacctgtagagccagccagagcatcagaaactacctgaactggtatcagcaaaagcccggcaaggcccctgagctgctgattcatgctgcaagcagcctccagagcggcgtgccaagcagattttctggcagcggcagcggaaccgacttcaccctgacaatatctagcctccagcctgaggacttcgccagctactactgccagcagagctacagcgcccctcctatcacctttggacagggcaccagactggaaatcaagggcggaggcggaagtggaggcggaggatctggcggcggaggctctcaggttcagctccagcagtctggacctggcctggtcaagcctagccagacactgtctctgacctgtgccatcagcggcgatagcgtgtcctctaatagagccgcctggaactggatcagacagagccctagcagaggactccagtggctgggcagaacctactaccgcagcaagtggtacaacgactacgccgtgtctctgcggagccggatcaccatcaatcccgtgaccagcaagaaccaggtggccctgcacatgaacagcgtgacccctgaagataccgccgtgtactactgtgccagagccggaattgtggtggtgcccggacctgagacattctactactacgaccacggcctggacgtgtggggccagggaacaacagtgactgtctcttctacgcgtggaatgaggactgaggatcttcccaaagctgtcgtctttctcgaaccccaatggtatcgggtgctcgaaaaagactctgtgacactgaaatgccaaggggcctactctcccgaggacaactccacacagtggtttcataatgagtccctcatcagctctcaggccagctcttatttcattgatgccgctacagtggacgactccggcgagtatcggtgtcagaccaatctgtctacactgtctgaccccgtgcagcttgaggtccacattggatggttgctcttgcaagccccacgctgggttttcaaagaggaagatccaatccatctgcggtgccacagctggaaaaacaccgctctccacaaagtcacatacctgcaaaatggcaaaggacgcaaatacttccatcacaattccgatttttacattccgaaggctaccctgaaagacagcggcagctatttctgccggggactcgtcggctccaagaatgtgtcctccgaaaccgtgaatatcacgattacccaaggactggctgtgcctacaatctctagcttctttccgcctggataccaagtctccttctgtcttgtgatggtcctcctgtttgctgtggacacaggactgtacttttccgtgaaa

SEQ ID NO: 40011 - DNA, 2211 bp, synthetic construct
  source 1..2211: mol_type = other DNA
atggccttaccagtgaccgccttgctcctgccgctggccttgctgctccacgccgccaggccggacatccagatgacacagagcccctctagcctgtctgccagcgtgggagacagagtgaccatcacctgtagagccagccagagcatcagaaactacctgaactggtatcagcaaaagcccggcaaggcccctgagctgctgattcatgctgcaagcagcctccagagcggcgtgccaagcagattttctggcagcggcagcggaaccgacttcaccctgacaatatctagcctccagcctgaggacttcgccagctactactgccagcagagctacagcgcccctcctatcacctttggacagggcaccagactggaaatcaagctcgagggacagcctaaggccaatcctaccgtgacactgttccctccaagcagcgaagaactccaggccaacaaggccacacttgtgtgcctgatctccgacttctaccctggggctgtgacagtggcttggaaggccgatggatctcctgtgaaagccggcgtggaaaccaccaagccatccaagcagagcaacaacaaatacgccgccagctcctacctgagcctgacacctgagcagtggaagtcccacagatcctacagctgccaagtgacccacgaaggcagcaccgtggaaaagacagtggcccctacagagtgcagcggatcccagagcttcggcctgctggaccccaagctgtgctacctgctggatggcatcctgttcatctacggcgtgatcctgaccgccctgttcctgagagtgaagttcagcagaagcgccgacgcccctgcctaccagcagggacagaaccaactgtacaacgagctgaacctgggcagacgggaagagtacgacgtgctggacaagcggagaggcagggaccctgagatgggcggaaagccccagcggagaaagaacccccaggaaggactgtataacgaactccagaaagacaagatggccgaagcctacagcgagatcggcatgaagggcgagcggagaagaggcaagggccacgatggcctgtaccagggcctgagcaccgccaccaaggacacctatgacgccctgcacatgcaggccctgcctccaagaagggccaagcgatctggatctggagcaacaaacttctcactactcaaacaagcaggtgacgtggaggagaatcccgggcctactagtatggactggatttggcgcatccttttccttgtcggcgctgctaccggcgcgcattccttcgaacaggttcagctccagcagtctggacctggcctggtcaagcctagccagacactgtctctgacctgtgccatcagcggcgatagcgtgtcctctaatagagccgcctggaactggatcagacagagccctagcagaggactccagtggctgggcagaacctactaccgcagcaagtggtacaacgactacgccgtgtctctgcggagccggatcaccatcaatcccgtgaccagcaagaaccaggtggccctgcacatgaacagcgtgacccctgaagataccgccgtgtactactgtgccagagccggaattgtggtggtgcccggacctgagacattctactactacgaccacggcctggacgtgtggggccagggaacaacagtgactgtctcttctacgcgtgcctctacaaagggaccctccgtgtttcctctggctcccagcagcaagtctacaagcggaggaacagccgctctgggctgcctggtcaaggattactttcccgagcctgtgaccgtgtcctggaatagcggagcactgacaagcggcgtgcacacctttccagccgtgctgcaaagcagcggcctgtactctctgagcagcgtggtcacagtgcctagctctagcctgggcacccagacctacatctgcaatgtgaaccacaagcctagcaacaccaaggtggacaagagagtggaacccaagagctgtggtaccatcactcaaggtttggcagtgtcaaccatctcatcattctttccacctggctaccaagtgtccttctgcctggtcatggtgctgctgttcgccgtggataccggcctgtacttcagcgtcaagaccaacatccggtccagcaccagagactggaaggaccacaagttcaagtggcggaaggaccctcaggacaag

SEQ ID NO: 40012 - DNA, 2256 bp, synthetic construct
  source 1..2256: mol_type = other DNA
atggccttaccagtgaccgccttgctcctgccgctggccttgctgctccacgccgccaggccggacatccagatgacacagagcccctctagcctgtctgccagcgtgggagacagagtgaccatcacctgtagagccagccagagcatcagaaactacctgaactggtatcagcaaaagcccggcaaggcccctgagctgctgattcatgctgcaagcagcctccagagcggcgtgccaagcagattttctggcagcggcagcggaaccgacttcaccctgacaatatctagcctccagcctgaggacttcgccagctactactgccagcagagctacagcgcccctcctatcacctttggacagggcaccagactggaaatcaagctcgaggacctgaagaacgtgttcccacctgaggtggccgtgttcgagcctagcgaggccgagatcagccacacccagaaagccaccctcgtgtgcctggctaccggcttctaccccgaccatgtggaactgtcttggtgggtcaacggcaaagaggtgcacagcggcgtgtctaccgacccccagccactgaaagaacagcccgccctgaacgacagccggtactgcctgagcagcagactgagagtgtccgccaccttctggcagaacccccggaaccacttcagatgccaggtgcagttctacggcctgagcgagaacgacgagtggacccaggacagagccaagcccgtgacccagatcgtgtctgccgaagcctggggcagagccgattgcggatcccagagcttcggcctgctggaccccaagctgtgctacctgctggatggcatcctgttcatctacggcgtgatcctgaccgccctgttcctgagagtgaagttcagcagaagcgccgacgcccctgcctaccagcagggacagaaccaactgtacaacgagctgaacctgggcagacgggaagagtacgacgtgctggacaagcggagaggcagggaccctgagatgggcggaaagccccagcggagaaagaacccccaggaaggactgtataacgaactccagaaagacaagatggccgaagcctacagcgagatcggcatgaagggcgagcggagaagaggcaagggccacgatggcctgtaccagggcctgagcaccgccaccaaggacacctatgacgccctgcacatgcaggccctgcctccaagaagggccaagcgatctggatctggagcaacaaacttctcactactcaaacaagcaggtgacgtggaggagaatcccgggcctactagtatggactggatttggcgcatccttttccttgtcggcgctgctaccggcgcgcattccttcgaacaggttcagctccagcagtctggacctggcctggtcaagcctagccagacactgtctctgacctgtgccatcagcggcgatagcgtgtcctctaatagagccgcctggaactggatcagacagagccctagcagaggactccagtggctgggcagaacctactaccgcagcaagtggtacaacgactacgccgtgtctctgcggagccggatcaccatcaatcccgtgaccagcaagaaccaggtggccctgcacatgaacagcgtgacccctgaagataccgccgtgtactactgtgccagagccggaattgtggtggtgcccggacctgagacattctactactacgaccacggcctggacgtgtggggccagggaacaacagtgactgtctcttctacgcgtatccagaaccctgatcctgccgtgtaccagctgcgggatagcaagagcagcgacaagagcgtgtgtctgttcaccgacttcgacagccagaccaacgtgtcccagagcaaggactccgacgtgtacatcaccgataagaccgtgctggacatgcggagcatggacttcaagagcaactccgccgtggcctggtccaacaagtccgatttcgcctgcgccaacgccttcaacaacagcattatccccgaggacacattcttcccaagccccgagagcagctgcggtaccatcactcaaggtttggcagtgtcaaccatctcatcattctttccacctggctaccaagtgtccttctgcctggtcatggtgctgctgttcgccgtggataccggcctgtacttcagcgtcaagaccaacatccggtccagcaccagagactggaaggaccacaagttcaagtggcggaaggaccctcaggacaag

SEQ ID NO: 40013 - DNA, 2181 bp, synthetic construct
  source 1..2181: mol_type = other DNA
atggccttaccagtgaccgccttgctcctgccgctggccttgctgctccacgccgccaggccggacatccagatgacacagagcccctctagcctgtctgccagcgtgggagacagagtgaccatcacctgtagagccagccagagcatcagaaactacctgaactggtatcagcaaaagcccggcaaggcccctgagctgctgattcatgctgcaagcagcctccagagcggcgtgccaagcagattttctggcagcggcagcggaaccgacttcaccctgacaatatctagcctccagcctgaggacttcgccagctactactgccagcagagctacagcgcccctcctatcacctttggacagggcaccagactggaaatcaagctcgaggacctgaagaacgtgttcccacctgaggtggccgtgttcgagcctagcgaggccgagatcagccacacccagaaagccaccctcgtgtgcctggctaccggcttctaccccgaccatgtggaactgtcttggtgggtcaacggcaaagaggtgcacagcggcgtgtctaccgacccccagccactgaaagaacagcccgccctgaacgacagccggtactgcctgagcagcagactgagagtgtccgccaccttctggcagaacccccggaaccacttcagatgccaggtgcagttctacggcctgagcgagaacgacgagtggacccaggacagagccaagcccgtgacccagatcgtgtctgccgaagcctggggcagagccgattgcggatcccagagcttcggcctgctggaccccaagctgtgctacctgctggatggcatcctgttcatctacggcgtgatcctgaccgccctgttcctgagagtgaagttcagcagaagcgccgacgcccctgcctaccagcagggacagaaccaactgtacaacgagctgaacctgggcagacgggaagagtacgacgtgctggacaagcggagaggcagggaccctgagatgggcggaaagccccagcggagaaagaacccccaggaaggactgtataacgaactccagaaagacaagatggccgaagcctacagcgagatcggcatgaagggcgagcggagaagaggcaagggccacgatggcctgtaccagggcctgagcaccgccaccaaggacacctatgacgccctgcacatgcaggccctgcctccaagaagggccaagcgatctggatctggagcaacaaacttctcactactcaaacaagcaggtgacgtggaggagaatcccgggcctactagtatggactggatttggcgcatccttttccttgtcggcgctgctaccggcgcgcattccttcgaacaggttcagctccagcagtctggacctggcctggtcaagcctagccagacactgtctctgacctgtgccatcagcggcgatagcgtgtcctctaatagagccgcctggaactggatcagacagagccctagcagaggactccagtggctgggcagaacctactaccgcagcaagtggtacaacgactacgccgtgtctctgcggagccggatcaccatcaatcccgtgaccagcaagaaccaggtggccctgcacatgaacagcgtgacccctgaagataccgccgtgtactactgtgccagagccggaattgtggtggtgcccggacctgagacattctactactacgaccacggcctggacgtgtggggccagggaacaacagtgactgtctcttctacgcgtatccagaaccctgatcctgccgtgtaccagctgcgggatagcaagagcagcgacaagagcgtgtgtctgttcaccgacttcgacagccagaccaacgtgtcccagagcaaggactccgacgtgtacatcaccgataagaccgtgctggacatgcggagcatggacttcaagagcaactccgccgtggcctggtccaacaagtccgatttcgcctgcgccaacgccttcaacaacagcattatccccgaggacacattcttcccaagccccgagagcagctgcggtaccatcactcaaggtttggcagtgtcaaccatctcatcattctttccacctggctaccaagtgtccttctgcctggtcatggtgctgctgttcgccgtggataccggcctgtacttcagcgtc

SEQ ID NO: 40014 - DNA, 2184 bp, synthetic construct
  source 1..2184: mol_type = other DNA
atggccttaccagtgaccgccttgctcctgccgctggccttgctgctccacgccgccaggccggacatccagatgacacagagcccctctagcctgtctgccagcgtgggagacagagtgaccatcacctgtagagccagccagagcatcagaaactacctgaactggtatcagcaaaagcccggcaaggcccctgagctgctgattcatgctgcaagcagcctccagagcggcgtgccaagcagattttctggcagcggcagcggaaccgacttcaccctgacaatatctagcctccagcctgaggacttcgccagctactactgccagcagagctacagcgcccctcctatcacctttggacagggcaccagactggaaatcaagctcgaggacctgaagaacgtgttcccacctgaggtggccgtgttcgagcctagcgaggccgagatcagccacacccagaaagccaccctcgtgtgcctggctaccggcttctaccccgaccatgtggaactgtcttggtgggtcaacggcaaagaggtgcacagcggcgtgtctaccgacccccagccactgaaagaacagcccgccctgaacgacagccggtactgcctgagcagcagactgagagtgtccgccaccttctggcagaacccccggaaccacttcagatgccaggtgcagttctacggcctgagcgagaacgacgagtggacccaggacagagccaagcccgtgacccagatcgtgtctgccgaagcctggggcagagccgattgcggatcccagagcttcggcctgctggaccccaagctgtgctacctgctggatggcatcctgttcatctacggcgtgatcctgaccgccctgttcctgagagtgaagttcagcagaagcgccgacgcccctgcctaccagcagggacagaaccaactgtacaacgagctgaacctgggcagacgggaagagtacgacgtgctggacaagcggagaggcagggaccctgagatgggcggaaagccccagcggagaaagaacccccaggaaggactgtataacgaactccagaaagacaagatggccgaagcctacagcgagatcggcatgaagggcgagcggagaagaggcaagggccacgatggcctgtaccagggcctgagcaccgccaccaaggacacctatgacgccctgcacatgcaggccctgcctccaagaagggccaagcgatctggatctggagcaacaaacttctcactactcaaacaagcaggtgacgtggaggagaatcccgggcctactagtatggactggatttggcgcatccttttccttgtcggcgctgctaccggcgcgcattccttcgaacaggttcagctccagcagtctggacctggcctggtcaagcctagccagacactgtctctgacctgtgccatcagcggcgatagcgtgtcctctaatagagccgcctggaactggatcagacagagccctagcagaggactccagtggctgggcagaacctactaccgcagcaagtggtacaacgactacgccgtgtctctgcggagccggatcaccatcaatcccgtgaccagcaagaaccaggtggccctgcacatgaacagcgtgacccctgaagataccgccgtgtactactgtgccagagccggaattgtggtggtgcccggacctgagacattctactactacgaccacggcctggacgtgtggggccagggaacaacagtgactgtctcttctacgcgtatccagaaccctgatcctgccgtgtaccagctgcgggatagcaagagcagcgacaagagcgtgtgtctgttcaccgacttcgacagccagaccaacgtgtcccagagcaaggactccgacgtgtacatcaccgataagaccgtgctggacatgcggagcatggacttcaagagcaactccgccgtggcctggtccaacaagtccgatttcgcctgcgccaacgccttcaacaacagcattatccccgaggacacattcttcccaagccccgagagcagctgcggtaccatcactcaaggtttggcagtgtcaaccatctcatcattctttccacctggctaccaagtgtccttctgcctggtcatggtgctgctgttcgccgtggataccggcctgtacttcagcgtcaag

SEQ ID NO: 40015 - DNA, 2187 bp, synthetic construct
  source 1..2187: mol_type = other DNA
atggccttaccagtgaccgccttgctcctgccgctggccttgctgctccacgccgccaggccggacatccagatgacacagagcccctctagcctgtctgccagcgtgggagacagagtgaccatcacctgtagagccagccagagcatcagaaactacctgaactggtatcagcaaaagcccggcaaggcccctgagctgctgattcatgctgcaagcagcctccagagcggcgtgccaagcagattttctggcagcggcagcggaaccgacttcaccctgacaatatctagcctccagcctgaggacttcgccagctactactgccagcagagctacagcgcccctcctatcacctttggacagggcaccagactggaaatcaagctcgaggacctgaagaacgtgttcccacctgaggtggccgtgttcgagcctagcgaggccgagatcagccacacccagaaagccaccctcgtgtgcctggctaccggcttctaccccgaccatgtggaactgtcttggtgggtcaacggcaaagaggtgcacagcggcgtgtctaccgacccccagccactgaaagaacagcccgccctgaacgacagccggtactgcctgagcagcagactgagagtgtccgccaccttctggcagaacccccggaaccacttcagatgccaggtgcagttctacggcctgagcgagaacgacgagtggacccaggacagagccaagcccgtgacccagatcgtgtctgccgaagcctggggcagagccgattgcggatcccagagcttcggcctgctggaccccaagctgtgctacctgctggatggcatcctgttcatctacggcgtgatcctgaccgccctgttcctgagagtgaagttcagcagaagcgccgacgcccctgcctaccagcagggacagaaccaactgtacaacgagctgaacctgggcagacgggaagagtacgacgtgctggacaagcggagaggcagggaccctgagatgggcggaaagccccagcggagaaagaacccccaggaaggactgtataacgaactccagaaagacaagatggccgaagcctacagcgagatcggcatgaagggcgagcggagaagaggcaagggccacgatggcctgtaccagggcctgagcaccgccaccaaggacacctatgacgccctgcacatgcaggccctgcctccaagaagggccaagcgatctggatctggagcaacaaacttctcactactcaaacaagcaggtgacgtggaggagaatcccgggcctactagtatggactggatttggcgcatccttttccttgtcggcgctgctaccggcgcgcattccttcgaacaggttcagctccagcagtctggacctggcctggtcaagcctagccagacactgtctctgacctgtgccatcagcggcgatagcgtgtcctctaatagagccgcctggaactggatcagacagagccctagcagaggactccagtggctgggcagaacctactaccgcagcaagtggtacaacgactacgccgtgtctctgcggagccggatcaccatcaatcccgtgaccagcaagaaccaggtggccctgcacatgaacagcgtgacccctgaagataccgccgtgtactactgtgccagagccggaattgtggtggtgcccggacctgagacattctactactacgaccacggcctggacgtgtggggccagggaacaacagtgactgtctcttctacgcgtatccagaaccctgatcctgccgtgtaccagctgcgggatagcaagagcagcgacaagagcgtgtgtctgttcaccgacttcgacagccagaccaacgtgtcccagagcaaggactccgacgtgtacatcaccgataagaccgtgctggacatgcggagcatggacttcaagagcaactccgccgtggcctggtccaacaagtccgatttcgcctgcgccaacgccttcaacaacagcattatccccgaggacacattcttcccaagccccgagagcagctgcggtaccatcactcaaggtttggcagtgtcaaccatctcatcattctttccacctggctaccaagtgtccttctgcctggtcatggtgctgctgttcgccgtggataccggcctgtacttcagcgtcaagacc

SEQ ID NO: 40016 - DNA, 1998 bp, synthetic construct; identical to SEQ ID NO: 21946
  source 1..1998: mol_type = other DNA

SEQ ID NO: 40017 - DNA, 1905 bp, synthetic construct
  source 1..1905: mol_type = other DNA
atggccttaccagtgaccgccttgctcctgccgctggccttgctgctccacgccgccaggccggacatccagatgacacagagcccctctagcctgtctgccagcgtgggagacagagtgaccatcacctgtagagccagccagagcatcagaaactacctgaactggtatcagcaaaagcccggcaaggcccctgagctgctgattcatgctgcaagcagcctccagagcggcgtgccaagcagattttctggcagcggcagcggaaccgacttcaccctgacaatatctagcctccagcctgaggacttcgccagctactactgccagcagagctacagcgcccctcctatcacctttggacagggcaccagactggaaatcaagctcgaggacctgaagaacgtgttcccacctgaggtggccgtgttcgagcctagcgaggccgagatcagccacacccagaaagccaccctcgtgtgcctggctaccggcttctaccccgaccatgtggaactgtcttggtgggtcaacggcaaagaggtgcacagcggcgtgtgtaccgacccccagccactgaaagaacagcccgccctgaacgacagccggtactgcctgagcagcagactgagagtgtccgccaccttctggcagaacccccggaaccacttcagatgccaggtgcagttctacggcctgagcgagaacgacgagtggacccaggacagagccaagcccgtgacccagatcgtgtctgccgaagcctggggcagagccgattgcggctttaccagcgagagctaccagcagggcgtgctgagcgcctactacatgtacttgttgctgctgctgaagtccgtggtgtacttcgccatcatcacatgctgcctgctgcggagaaccgccttctgctgcaacggcgagaagtctagggccaagcgatctggatctggagcaacaaacttctcactactcaaacaagcaggtgacgtggaggagaatcccgggcctactagtatggactggatttggcgcatccttttccttgtcggcgctgctaccggcgcgcattccttcgaacaggttcagctccagcagtctggacctggcctggtcaagcctagccagacactgtctctgacctgtgccatcagcggcgatagcgtgtcctctaatagagccgcctggaactggatcagacagagccctagcagaggactccagtggctgggcagaacctactaccgcagcaagtggtacaacgactacgccgtgtctctgcggagccggatcaccatcaatcccgtgaccagcaagaaccaggtggccctgcacatgaacagcgtgacccctgaagataccgccgtgtactactgtgccagagccggaattgtggtggtgcccggacctgagacattctactactacgaccacggcctggacgtgtggggccagggaacaacagtgactgtctcttctacgcgtatccagaaccctgatcctgccgtgtaccagctgcgggatagcaagagcagcgacaagagcgtgtgtctgttcaccgacttcgacagccagaccaacgtgtcccagagcaaggactccgacgtgtacatcaccgataagtgcgtgctggacatgcggagcatggacttcaagagcaactccgccgtggcctggtccaacaagtccgatttcgcctgcgccaacgccttcaacaacagcattatccccgaggacacattcttcccaagccccgagagcagctgcgacgtgaagctggtggaaaagagcttcgagacagacaccaacctgaacttccagaacctgagcgtgatcggcttcagaatcctgctgctgaaagtggccggctttaacctgctgatgaccctgcggctgtggtccagc

SEQ ID NO: 40018 - DNA, 1926 bp, synthetic construct
  source 1..1926: mol_type = other DNA
atggccttaccagtgaccgccttgctcctgccgctggccttgctgctccacgccgccaggccggacatccagatgacacagagcccctctagcctgtctgccagcgtgggagacagagtgaccatcacctgtagagccagccagagcatcagaaactacctgaactggtatcagcaaaagcccggcaaggcccctgagctgctgattcatgctgcaagcagcctccagagcggcgtgccaagcagattttctggcagcggcagcggaaccgacttcaccctgacaatatctagcctccagcctgaggacttcgccagctactactgccagcagagctacagcgcccctcctatcacctttggacagggcaccagactggaaatcaagctcgaggacaagcagctggacgccgacgtgtcccccaagcctaccatcttcctgccctctatcgccgagacaaagctccagaaggccggcacctacctgtgcctgctggaaaagttcttcccagatgtgattaagatccactggcaggaaaagaagtccaacaccatcctgggcagccaggaaggcaacaccatgaagaccaacgacacctacatgaagttcagctggctgaccgtgcccgagaagtccctggacaaagaacacagatgcatcgtgcggcacgaaaacaacaagaacggcgtggaccaggaaatcatcttcccacccatcaagaccgatgtgattacaatggaccccaaggacaactgctccaaggacgccaacgataccctgctgctccagctgaccaacaccagcgcctactacatgtacgagatcctgctgggcaaggccaccctgtacgccgtgctggtgtctgccctggtgctgatggctatggtcaagcggaaggacagccggggaagggccaagcgatctggatctggagcaacaaacttctcactactcaaacaagcaggtgacgtggaggagaatcccgggcctactagtatggactggatttggcgcatccttttccttgtcggcgctgctaccggcgcgcattccttcgaacaggttcagctccagcagtctggacctggcctggtcaagcctagccagacactgtctctgacctgtgccatcagcggcgatagcgtgtcctctaatagagccgcctggaactggatcagacagagccctagcagaggactccagtggctgggcagaacctactaccgcagcaagtggtacaacgactacgccgtgtctctgcggagccggatcaccatcaatcccgtgaccagcaagaaccaggtggccctgcacatgaacagcgtgacccctgaagataccgccgtgtactactgtgccagagccggaattgtggtggtgcccggacctgagacattctactactacgaccacggcctggacgtgtggggccagggaacaacagtgactgtctcttctacgcgtagccagcctcacaccaagcccagcgtgttcgtgatgaagaacggcaccaacgtggcctgcctcgtgaaagagttctaccccaaggacatcaggatcaacctggtgtccagcaagaagatcaccgagttcgaccccgccatcgtgatctcccccagcggcaagtacaacgccgtgaagctggggaagtatgaggacagcaacagcgtgacctgctccgtgcagcacgacaacaagaccgtgcacagcaccgactttgaagtgaaaaccgactccaccgaccacgtgaagcccaaagagacagagaacaccaagcagcccagcaagagctgccacaagcccaaggccatcgtgcacaccgagaaagtgaacatgatgagcctgaccgtgatcggcttcagaatcctgctgctgaaagtggccggctttaacctgctgatgaccctgcggctgtggtccagctaa

SEQ ID NO: 40019 - DNA, 1926 bp, synthetic construct
  source 1..1926: mol_type = other DNA
atggccttaccagtgaccgccttgctcctgccgctggccttgctgctccacgccgccaggccggacatccagatgacacagagcccctctagcctgtctgccagcgtgggagacagagtgaccatcacctgtagagccagccagagcatcagaaactacctgaactggtatcagcaaaagcccggcaaggcccctgagctgctgattcatgctgcaagcagcctccagagcggcgtgccaagcagattttctggcagcggcagcggaaccgacttcaccctgacaatatctagcctccagcctgaggacttcgccagctactactgccagcagagctacagcgcccctcctatcacctttggacagggcaccagactggaaatcaagctcgaggacaagcagctggacgccgacgtgtcccccaagcctaccatcttcctgccctctatcgccgagacaaagctccagaaggccggcacctacctgtgcctgctggaaaagttcttcccagatgtgattaagatccactggcaggaaaagaagtccaacaccatcctgggcagccaggaaggcaacaccatgaagaccaacgacacctacatgaagttcagctggctgaccgtgcccgagaagtccctggacaaagaacacagatgcatcgtgcggcacgaaaacaacaagaacggcgtggaccaggaaatcatcttcccacccatcaagaccgatgtgattacaatggaccccaaggacaactgctccaaggacgccaacgataccctgctgctccagctgaccaacaccagcgccaccatcctgtacgagatcctgctgggcaaggccaccctgtacgccgtgctggtgtctgccctggtgctgatggctatggtcaagcggaaggacagccggggaagggccaagcgatctggatctggagcaacaaacttctcactactcaaacaagcaggtgacgtggaggagaatcccgggcctactagtatggactggatttggcgcatccttttccttgtcggcgctgctaccggcgcgcattccttcgaacaggttcagctccagcagtctggacctggcctggtcaagcctagccagacactgtctctgacctgtgccatcagcggcgatagcgtgtcctctaatagagccgcctggaactggatcagacagagccctagcagaggactccagtggctgggcagaacctactaccgcagcaagtggtacaacgactacgccgtgtctctgcggagccggatcaccatcaatcccgtgaccagcaagaaccaggtggccctgcacatgaacagcgtgacccctgaagataccgccgtgtactactgtgccagagccggaattgtggtggtgcccggacctgagacattctactactacgaccacggcctggacgtgtggggccagggaacaacagtgactgtctcttctacgcgtagccagcctcacaccaagcccagcgtgttcgtgatgaagaacggcaccaacgtggcctgcctcgtgaaagagttctaccccaaggacatcaggatcaacctggtgtccagcaagaagatcaccgagttcgaccccgccatcgtgatctcccccagcggcaagtacaacgccgtgaagctggggaagtatgaggacagcaacagcgtgacctgctccgtgcagcacgacaacaagaccgtgcacagcaccgactttgaagtgaaaaccgactccaccgaccacgtgaagcccaaagagacagagaacaccaagcagcccagcaagagctgccacaagcccaaggccatcgtgcacaccgagaaagtgaacatgatgagcctgaccgtgatcggcttcagaatcctgctgctgaaagtggccggctttaacctgctgatgaccctgcggctgtggtccagctaa

SEQ ID NO: 40020 - DNA, 1926 bp, synthetic construct
  source 1..1926: mol_type = other DNA
atggccttaccagtgaccgccttgctcctgccgctggccttgctgctccacgccgccaggccggacatccagatgacacagagcccctctagcctgtctgccagcgtgggagacagagtgaccatcacctgtagagccagccagagcatcagaaactacctgaactggtatcagcaaaagcccggcaaggcccctgagctgctgattcatgctgcaagcagcctccagagcggcgtgccaagcagattttctggcagcggcagcggaaccgacttcaccctgacaatatctagcctccagcctgaggacttcgccagctactactgccagcagagctacagcgcccctcctatcacctttggacagggcaccagactggaaatcaagctcgaggacaagcagctggacgccgacgtgtcccccaagcctaccatcttcctgccctctatcgccgagacaaagctccagaaggccggcacctacctgtgcctgctggaaaagttcttcccagatgtgattaagatccactggcaggaaaagaagtccaacaccatcctgggcagccaggaaggcaacaccatgaagaccaacgacacctacatgaagttcagctggctgaccgtgcccgagaagtccctggacaaagaacacagatgcatcgtgcggcacgaaaacaacaagaacggcgtggaccaggaaatcatcttcccacccatcaagaccgatgtgattacaatggaccccaaggacaactgctccaaggacgccaacgataccctgctgctccagctgaccaacaccagcgcctactacatgtacgagatcctgctgggcaaggccaccctgtacgccgtgctggtgtctgccctggtgctgatggctatggtcaagcggaaggacagccggggaagggccaagcgatctggatctggagcaacaaacttctcactactcaaacaagcaggtgacgtggaggagaatcccgggcctactagtatggactggatttggcgcatccttttccttgtcggcgctgctaccggcgcgcattccttcgaacaggttcagctccagcagtctggacctggcctggtcaagcctagccagacactgtctctgacctgtgccatcagcggcgatagcgtgtcctctaatagagccgcctggaactggatcagacagagccctagcagaggactccagtggctgggcagaacctactaccgcagcaagtggtacaacgactacgccgtgtctctgcggagccggatcaccatcaatcccgtgaccagcaagaaccaggtggccctgcacatgaacagcgtgacccctgaagataccgccgtgtactactgtgccagagccggaattgtggtggtgcccggacctgagacattctactactacgaccacggcctggacgtgtggggccagggaacaacagtgactgtctcttctacgcgtagccagcctcacaccaagcccagcgtgttcgtgatgaagaacggcaccaacgtggcctgcctcgtgaaagagttctaccccaaggacatcaggatcaacctggtgtccagcaagaagatcaccgagttcgaccccgccatcgtgatctcccccagcggcaagtacaacgccgtgaagctggggaagtacgaggacagcaacagcgtgacctgctccgtgcagcacgacaacaagaccgtgcacagcaccgactttgaagtgaaaaccgactccaccgaccacgtgaagcccaaagagacagagaacaccaagcagcccagcaagagctgccacaagcccaaggccatcgtgcacaccgagaaagtgaacatgatgagcctgaccgtgctgggcttcagaatcctgctgctgaaagtggccggctttaacctgctgatgaccctgcggctgtggtccagctaa

SEQ ID NO: 40021 - DNA, 1926 bp, synthetic construct
  source 1..1926: mol_type = other DNA
atggccttaccagtgaccgccttgctcctgccgctggccttgctgctccacgccgccaggccggacatccagatgacacagagcccctctagcctgtctgccagcgtgggagacagagtgaccatcacctgtagagccagccagagcatcagaaactacctgaactggtatcagcaaaagcccggcaaggcccctgagctgctgattcatgctgcaagcagcctccagagcggcgtgccaagcagattttctggcagcggcagcggaaccgacttcaccctgacaatatctagcctccagcctgaggacttcgccagctactactgccagcagagctacagcgcccctcctatcacctttggacagggcaccagactggaaatcaagctcgaggacaagcagctggacgccgacgtgtcccccaagcctaccatcttcctgccctctatcgccgagacaaagctccagaaggccggcacctacctgtgcctgctggaaaagttcttcccagatgtgattaagatccactggcaggaaaagaagtccaacaccatcctgggcagccaggaaggcaacaccatgaagaccaacgacacctacatgaagttcagctggctgaccgtgcccgagaagtccctggacaaagaacacagatgcatcgtgcggcacgaaaacaacaagaacggcgtggaccaggaaatcatcttcccacccatcaagaccgatgtgattacaatggaccccaaggacaactgctccaaggacgccaacgataccctgctgctccagctgaccaacaccagcgccaccatcctgtacgagatcctgctgggcaaggccaccctgtacgccgtgctggtgtctgccctggtgctgatggctatggtcaagcggaaggacagccggggaagggccaagcgatctggatctggagcaacaaacttctcactactcaaacaagcaggtgacgtggaggagaatcccgggcctactagtatggactggatttggcgcatccttttccttgtcggcgctgctaccggcgcgcattccttcgaacaggttcagctccagcagtctggacctggcctggtcaagcctagccagacactgtctctgacctgtgccatcagcggcgatagcgtgtcctctaatagagccgcctggaactggatcagacagagccctagcagaggactccagtggctgggcagaacctactaccgcagcaagtggtacaacgactacgccgtgtctctgcggagccggatcaccatcaatcccgtgaccagcaagaaccaggtggccctgcacatgaacagcgtgacccctgaagataccgccgtgtactactgtgccagagccggaattgtggtggtgcccggacctgagacattctactactacgaccacggcctggacgtgtggggccagggaacaacagtgactgtctcttctacgcgtagccagcctcacaccaagcccagcgtgttcgtgatgaagaacggcaccaacgtggcctgcctcgtgaaagagttctaccccaaggacatcaggatcaacctggtgtccagcaagaagatcaccgagttcgaccccgccatcgtgatctcccccagcggcaagtacaacgccgtgaagctggggaagtacgaggacagcaacagcgtgacctgctccgtgcagcacgacaacaagaccgtgcacagcaccgactttgaagtgaaaaccgactccaccgaccacgtgaagcccaaagagacagagaacaccaagcagcccagcaagagctgccacaagcccaaggccatcgtgcacaccgagaaagtgaacatgatgagcctgaccgtgctgggcttcagaatcctgctgctgaaagtggccggctttaacctgctgatgaccctgcggctgtggtccagctaa

SEQ ID NO: 40022 - DNA, 1908 bp, synthetic construct
  source 1..1908: mol_type = other DNA
atggccttaccagtgaccgccttgctcctgccgctggccttgctgctccacgccgccaggccggacatccagatgacacagagcccctctagcctgtctgccagcgtgggagacagagtgaccatcacctgtagagccagccagagcatcagaaactacctgaactggtatcagcaaaagcccggcaaggcccctgagctgctgattcatgctgcaagcagcctccagagcggcgtgccaagcagattttctggcagcggcagcggaaccgacttcaccctgacaatatctagcctccagcctgaggacttcgccagctactactgccagcagagctacagcgcccctcctatcacctttggacagggcaccagactggaaatcaagctcgaggacctgaagaacgtgttcccacctgaggtggccgtgttcgagcctagcgaggccgagatcagccacacccagaaagccaccctcgtgtgcctggctaccggcttctaccccgaccatgtggaactgtcttggtgggtcaacggcaaagaggtgcacagcggcgtgtgtaccgacccccagccactgaaagaacagcccgccctgaacgacagccggtactgcctgagcagcagactgagagtgtccgccaccttctggcagaacccccggaaccacttcagatgccaggtgcagttctacggcctgagcgagaacgacgagtggacccaggacagagccaagcccgtgacccagatcgtgtctgccgaagcctggggcagagccgattgcggctttaccagcgagagctaccagcagggcgtgctgagcgccaccatcctgtacttgttgctgctgctgaagtccgtggtgtacttcgccatcatcacatgctgcctgctgcggagaaccgccttctgctgcaacggcgagaagtctagggccaagcgatctggatctggagcaacaaacttctcactactcaaacaagcaggtgacgtggaggagaatcccgggcctactagtatggactggatttggcgcatccttttccttgtcggcgctgctaccggcgcgcattccttcgaacaggttcagctccagcagtctggacctggcctggtcaagcctagccagacactgtctctgacctgtgccatcagcggcgatagcgtgtcctctaatagagccgcctggaactggatcagacagagccctagcagaggactccagtggctgggcagaacctactaccgcagcaagtggtacaacgactacgccgtgtctctgcggagccggatcaccatcaatcccgtgaccagcaagaaccaggtggccctgcacatgaacagcgtgacccctgaagataccgccgtgtactactgtgccagagccggaattgtggtggtgcccggacctgagacattctactactacgaccacggcctggacgtgtggggccagggaacaacagtgactgtctcttctacgcgtatccagaaccctgatcctgccgtgtaccagctgcgggatagcaagagcagcgacaagagcgtgtgtctgttcaccgacttcgacagccagaccaacgtgtcccagagcaaggactccgacgtgtacatcaccgataagtgcgtgctggacatgcggagcatggacttcaagagcaactccgccgtggcctggtccaacaagtccgatttcgcctgcgccaacgccttcaacaacagcattatccccgaggacacattcttcccaagccccgagagcagctgcgacgtgaagctggtggaaaagagcttcgagacagacaccaacctgaacttccagaacctgagcgtgatcggcctgcggatgctgttcgccaaaaccgtggccgtgaacttcctgctgaccgccaagctgttcttcctctaa

SEQ ID NO: 40023 - DNA, 1995 bp, synthetic construct
  source 1..1995: mol_type = other DNA
atggccttaccagtgaccgccttgctcctgccgctggccttgctgctccacgccgccaggccggacatccagatgacacagagcccctctagcctgtctgccagcgtgggagacagagtgaccatcacctgtagagccagccagagcatcagaaactacctgaactggtatcagcaaaagcccggcaaggcccctgagctgctgattcatgctgcaagcagcctccagagcggcgtgccaagcagattttctggcagcggcagcggaaccgacttcaccctgacaatatctagcctccagcctgaggacttcgccagctactactgccagcagagctacagcgcccctcctatcacctttggacagggcaccagactggaaatcaagctcgaggacctgaagaacgtgttcccacctgaggtggccgtgttcgagcctagcgaggccgagatcagccacacccagaaagccaccctcgtgtgcctggctaccggcttctaccccgaccatgtggaactgtcttggtgggtcaacggcaaagaggtgcacagcggcgtgtctaccgacccccagccactgaaagaacagcccgccctgaacgacagccggtactgcctgagcagcagactgagagtgtccgccaccttctggcagaacccccggaaccacttcagatgccaggtgcagttctacggcctgagcgagaacgacgagtggacccaggacagagccaagcccgtgacccagatcgtgtctgccgaagcctggggcagagccgattgcggatcctccaaggacgccaacgataccctgctgctccagctgaccaacaccagcgcctactacatgtacttgttgctgctgctgaagtccgtggtgtacttcgccatcatcacatgctgcctgctgcggagaaccgccttctgctgcaacggcgagaagtctagggccaagcgatctggatctggagcaacaaacttctcactactcaaacaagcaggtgacgtggaggagaatcccgggcctactagtatggactggatttggcgcatccttttccttgtcggcgctgctaccggcgcgcattccttcgaacaggttcagctccagcagtctggacctggcctggtcaagcctagccagacactgtctctgacctgtgccatcagcggcgatagcgtgtcctctaatagagccgcctggaactggatcagacagagccctagcagaggactccagtggctgggcagaacctactaccgcagcaagtggtacaacgactacgccgtgtctctgcggagccggatcaccatcaatcccgtgaccagcaagaaccaggtggccctgcacatgaacagcgtgacccctgaagataccgccgtgtactactgtgccagagccggaattgtggtggtgcccggacctgagacattctactactacgaccacggcctggacgtgtggggccagggaacaacagtgactgtctcttctacgcgtatccagaaccctgatcctgccgtgtaccagctgcgggatagcaagagcagcgacaagagcgtgtgtctgttcaccgacttcgacagccagaccaacgtgtcccagagcaaggactccgacgtgtacatcaccgataagaccgtgctggacatgcggagcatggacttcaagagcaactccgccgtggcctggtccaacaagtccgatttcgcctgcgccaacgccttcaacaacagcattatccccgaggacacattcttcccaagccccgagagcagctgcggtaccgaagtgaaaaccgactccaccgaccacgtgaagcccaaagagacagagaacaccaagcagcccagcaagagctgccacaagcccaaggccatcgtgcacaccgagaaagtgaacatgatgagcctgaccgtgctgggcctgcggatgctgttcgccaaaaccgtggccgtgaacttcctgctgaccgccaagctgttcttcctctaa

SEQ ID NO: 40024 - DNA, 1905 bp, synthetic construct
  source 1..1905: mol_type = other DNA
atggccttaccagtgaccgccttgctcctgccgctggccttgctgctccacgccgccaggccggacatccagatgacacagagcccctctagcctgtctgccagcgtgggagacagagtgaccatcacctgtagagccagccagagcatcagaaactacctgaactggtatcagcaaaagcccggcaaggcccctgagctgctgattcatgctgcaagcagcctccagagcggcgtgccaagcagattttctggcagcggcagcggaaccgacttcaccctgacaatatctagcctccagcctgaggacttcgccagctactactgccagcagagctacagcgcccctcctatcacctttggacagggcaccagactggaaatcaagctcgaggacctgaagaacgtgttcccacctgaggtggccgtgttcgagcctagcgaggccgagatcagccacacccagaaagccaccctcgtgtgcctggctaccggcttctaccccgaccatgtggaactgtcttggtgggtcaacggcaaagaggtgcacagcggcgtgtgtaccgacccccagccactgaaagaacagcccgccctgaacgacagccggtactgcctgagcagcagactgagagtgtccgccaccttctggcagaacccccggaaccacttcagatgccaggtgcagttctacggcctgagcgagaacgacgagtggacccaggacagagccaagcccgtgacccagatcgtgtctgccgaagcctggggcagagccgattgcgacgtgaagctggtggaaaagagcttcgagacagacaccaacctgaacttccagaacctgagcgtgatcggcttcagaatcctgctgctgaaagtggccggctttaacctgctgatgaccctgcggctgtggtccagcagggccaagcgatctggatctggagcaacaaacttctcactactcaaacaagcaggtgacgtggaggagaatcccgggcctactagtatggactggatttggcgcatccttttccttgtcggcgctgctaccggcgcgcattccttcgaacaggttcagctccagcagtctggacctggcctggtcaagcctagccagacactgtctctgacctgtgccatcagcggcgatagcgtgtcctctaatagagccgcctggaactggatcagacagagccctagcagaggactccagtggctgggcagaacctactaccgcagcaagtggtacaacgactacgccgtgtctctgcggagccggatcaccatcaatcccgtgaccagcaagaaccaggtggccctgcacatgaacagcgtgacccctgaagataccgccgtgtactactgtgccagagccggaattgtggtggtgcccggacctgagacattctactactacgaccacggcctggacgtgtggggccagggaacaacagtgactgtctcttctacgcgtatccagaaccctgatcctgccgtgtaccagctgcgggatagcaagagcagcgacaagagcgtgtgtctgttcaccgacttcgacagccagaccaacgtgtcccagagcaaggactccgacgtgtacatcaccgataagtgcgtgctggacatgcggagcatggacttcaagagcaactccgccgtggcctggtccaacaagtccgatttcgcctgcgccaacgccttcaacaacagcattatccccgaggacacattcttcccaagccccgagagcagctgcggctttaccagcgagagctaccagcagggcgtgctgagcgccaccatcctgtacgagatcctgctgggcaaggccaccctgtacgccgtgctggtgtctgccctggtgctgatggctatggtcaagcggaaggacagccggggataa

SEQ ID NO: 40025 - DNA, 1905 bp, synthetic construct
  source 1..1905: mol_type = other DNA
atggccttaccagtgaccgccttgctcctgccgctggccttgctgctccacgccgccaggccggacatccagatgacacagagcccctctagcctgtctgccagcgtgggagacagagtgaccatcacctgtagagccagccagagcatcagaaactacctgaactggtatcagcaaaagcccggcaaggcccctgagctgctgattcatgctgcaagcagcctccagagcggcgtgccaagcagattttctggcagcggcagcggaaccgacttcaccctgacaatatctagcctccagcctgaggacttcgccagctactactgccagcagagctacagcgcccctcctatcacctttggacagggcaccagactggaaatcaagctcgaggacctgaagaacgtgttcccacctgaggtggccgtgttcgagcctagcgaggccgagatcagccacacccagaaagccaccctcgtgtgcctggctaccggcttctaccccgaccatgtggaactgtcttggtgggtcaacggcaaagaggtgcacagcggcgtgtgtaccgacccccagccactgaaagaacagcccgccctgaacgacagccggtactgcctgagcagcagactgagagtgtccgccaccttctggcagaacccccggaaccacttcagatgccaggtgcagttctacggcctgagcgagaacgacgagtggacccaggacagagccaagcccgtgacccagatcgtgtctgccgaagcctggggcagagccgattgcggctttaccagcgagagctaccagcagggcgtgctgagcgccaccaacctgagcgtgatcggcttcagaatcctgctgctgaaagtggccggctttaacctgctgatgaccctgcggctgtggtccagcagggccaagcgatctggatctggagcaacaaacttctcactactcaaacaagcaggtgacgtggaggagaatcccgggcctactagtatggactggatttggcgcatccttttccttgtcggcgctgctaccggcgcgcattccttcgaacaggttcagctccagcagtctggacctggcctggtcaagcctagccagacactgtctctgacctgtgccatcagcggcgatagcgtgtcctctaatagagccgcctggaactggatcagacagagccctagcagaggactccagtggctgggcagaacctactaccgcagcaagtggtacaacgactacgccgtgtctctgcggagccggatcaccatcaatcccgtgaccagcaagaaccaggtggccctgcacatgaacagcgtgacccctgaagataccgccgtgtactactgtgccagagccggaattgtggtggtgcccggacctgagacattctactactacgaccacggcctggacgtgtggggccagggaacaacagtgactgtctcttctacgcgtatccagaaccctgatcctgccgtgtaccagctgcgggatagcaagagcagcgacaagagcgtgtgtctgttcaccgacttcgacagccagaccaacgtgtcccagagcaaggactccgacgtgtacatcaccgataagtgcgtgctggacatgcggagcatggacttcaagagcaactccgccgtggcctggtccaacaagtccgatttcgcctgcgccaacgccttcaacaacagcattatccccgaggacacattcttcccaagccccgagagcagctgcgacgtgaagctggtggaaaagagcttcgagacagacaccaacctgaacttccagatcctgtacgagatcctgctgggcaaggccaccctgtacgccgtgctggtgtctgccctggtgctgatggctatggtcaagcggaaggacagccggggataa

SEQ ID NO: 40026 - DNA, 1905 bp, synthetic construct; identical to SEQ ID NO: 40024
  source 1..1905: mol_type = other DNA

SEQ ID NO: 40027 - DNA, 1905 bp, synthetic construct; identical to SEQ ID NO: 40025
  source 1..1905: mol_type = other DNA

SEQ ID NO: 40028 - DNA, 1902 bp, synthetic construct
  source 1..1902: mol_type = other DNA
atggccttaccagtgaccgccttgctcctgccgctggccttgctgctccacgccgccaggccggacatccagatgacacagagcccctctagcctgtctgccagcgtgggagacagagtgaccatcacctgtagagccagccagagcatcagaaactacctgaactggtatcagcaaaagcccggcaaggcccctgagctgctgattcatgctgcaagcagcctccagagcggcgtgccaagcagattttctggcagcggcagcggaaccgacttcaccctgacaatatctagcctccagcctgaggacttcgccagctactactgccagcagagctacagcgcccctcctatcacctttggacagggcaccagactggaaatcaagctcgaggacctgaagaacgtgttcccacctgaggtggccgtgttcgagcctagcgaggccgagatcagccacacccagaaagccaccctcgtgtgcctggctaccggcttctaccccgaccatgtggaactgtcttggtgggtcaacggcaaagaggtgcacagcggcgtgtgtaccgacccccagccactgaaagaacagcccgccctgaacgacagccggtactgcctgagcagcagactgagagtgtccgccaccttctggcagaacccccggaaccacttcagatgccaggtgcagttctacggcctgagcgagaacgacgagtggacccaggacagagccaagcccgtgacccagatcgtgtctgccgaagcctggggcagagccgattgcgacgtgaagctggtggaaaagagcttcgagacagacaccaacctgaacttccagaacctgagcgtgatcggcttcagaatcctgctgctgaaagtggccggctttaacctgctgatgaccctgcggctgtggtccagcagggccaagcgatctggatctggagcaacaaacttctcactactcaaacaagcaggtgacgtggaggagaatcccgggcctactagtatggactggatttggcgcatccttttccttgtcggcgctgctaccggcgcgcattccttcgaacaggttcagctccagcagtctggacctggcctggtcaagcctagccagacactgtctctgacctgtgccatcagcggcgatagcgtgtcctctaatagagccgcctggaactggatcagacagagccctagcagaggactccagtggctgggcagaacctactaccgcagcaagtggtacaacgactacgccgtgtctctgcggagccggatcaccatcaatcccgtgaccagcaagaaccaggtggccctgcacatgaacagcgtgacccctgaagataccgccgtgtactactgtgccagagccggaattgtggtggtgcccggacctgagacattctactactacgaccacggcctggacgtgtggggccagggaacaacagtgactgtctcttctacgcgtatccagaaccctgatcctgccgtgtaccagctgcgggatagcaagagcagcgacaagagcgtgtgtctgttcaccgacttcgacagccagaccaacgtgtcccagagcaaggactccgacgtgtacatcaccgataagtgcgtgctggacatgcggagcatggacttcaagagcaactccgccgtggcctggtccaacaagtccgatttcgcctgcgccaacgccttcaacaacagcattatccccgaggacacattcttcccaagccccgagagcagctgcggctttaccagcgagagctaccagcagggcgtgctgagcgccaccatcctgtacgagatcctgctgggcaaggccaccctgtacgccgtgctggtgtctgccctggtgctgatggctatggtcaagcggaaggacagccgggga

SEQ ID NO: 40029 - DNA, 1914 bp, synthetic construct
  source 1..1914: mol_type = other DNA
atggccttaccagtgaccgccttgctcctgccgctggccttgctgctccacgccgccaggccggacatccagatgacacagagcccctctagcctgtctgccagcgtgggagacagagtgaccatcacctgtagagccagccagagcatcagaaactacctgaactggtatcagcaaaagcccggcaaggcccctgagctgctgattcatgctgcaagcagcctccagagcggcgtgccaagcagattttctggcagcggcagcggaaccgacttcaccctgacaatatctagcctccagcctgaggacttcgccagctactactgccagcagagctacagcgcccctcctatcacctttggacagggcaccagactggaaatcaagctcgaggccgacgtgtcccccaagcctaccatcttcctgccctctatcgccgagacaaagctccagaaggccggcacctacctgtgcctgctggaaaagttcttcccagatgtgattaagatccactggcaggaaaagaagtccaacaccatcctgggcagccaggaaggcaacaccatgaagaccaacgacacctacatgaagttcagctggctgaccgtgcccgagaagtccctggacaaagaacacagatgcatcgtgcggcacgaaaacaacaagaacggcgtggaccaggaaatcatcttcccacccatcaagaccgatgtgattacaatggaccccaaggacaactgctccaaggacgccaacgataccctgctgctccagctgaccaacaccagcgcctactacatgtacttgttgctgctgctgaagtccgtggtgtacttcgccatcatcacatgctgcctgctgcggagaaccgccttctgctgcaacggcgagaagtctagggccaagcgatctggatctggagcaacaaacttctcactactcaaacaagcaggtgacgtggaggagaatcccgggcctactagtatggactggatttggcgcatccttttccttgtcggcgctgctaccggcgcgcattccttcgaacaggttcagctccagcagtctggacctggcctggtcaagcctagccagacactgtctctgacctgtgccatcagcggcgatagcgtgtcctctaatagagccgcctggaactggatcagacagagccctagcagaggactccagtggctgggcagaacctactaccgcagcaagtggtacaacgactacgccgtgtctctgcggagccggatcaccatcaatcccgtgaccagcaagaaccaggtggccctgcacatgaacagcgtgacccctgaagataccgccgtgtactactgtgccagagccggaattgtggtggtgcccggacctgagacattctactactacgaccacggcctggacgtgtggggccagggaacaacagtgactgtctcttctacgcgtagccagcctcacaccaagcccagcgtgttcgtgatgaagaacggcaccaacgtggcctgcctcgtgaaagagttctaccccaaggacatcaggatcaacctggtgtccagcaagaagatcaccgagttcgaccccgccatcgtgatctcccccagcggcaagtacaacgccgtgaagctggggaagtatgaggacagcaacagcgtgacctgctccgtgcagcacgacaacaagaccgtgcacagcaccgactttgaagtgaaaaccgactccaccgaccacgtgaagcccaaagagacagagaacaccaagcagcccagcaagagctgccacaagcccaaggccatcgtgcacaccgagaaagtgaacatgatgagcctgaccgtgatcggcttcagaatcctgctgctgaaagtggccggctttaacctgctgatgaccctgcggctgtggtccagctaa

SEQ ID NO: 40030 - DNA, 1914 bp, synthetic construct
  source 1..1914: mol_type = other DNA
atggccttaccagtgaccgccttgctcctgccgctggccttgctgctccacgccgccaggccggacatccagatgacacagagcccctctagcctgtctgccagcgtgggagacagagtgaccatcacctgtagagccagccagagcatcagaaactacctgaactggtatcagcaaaagcccggcaaggcccctgagctgctgattcatgctgcaagcagcctccagagcggcgtgccaagcagattttctggcagcggcagcggaaccgacttcaccctgacaatatctagcctccagcctgaggacttcgccagctactactgccagcagagctacagcgcccctcctatcacctttggacagggcaccagactggaaatcaagctcgaggccgacgtgtcccccaagcctaccatcttcctgccctctatcgccgagacaaagctccagaaggccggcacctacctgtgcctgctggaaaagttcttcccagatgtgattaagatccactggcaggaaaagaagtccaacaccatcctgggcagccaggaaggcaacaccatgaagaccaacgacacctacatgaagttcagctggctgaccgtgcccgagaagtccctggacaaagaacacagatgcatcgtgcggcacgaaaacaacaagaacggcgtggaccaggaaatcatcttcccacccatcaagaccgatgtgattacaatggaccccaaggacaactgctccaaggacgccaacgataccctgctgctccagctgaccaacaccagcgcctactacatgtacttgttgctgctgctgaagtccgtggtgtacttcgccatcatcacatgctgcctgctgcggagaaccgccttctgctgcaacggcgagaagtctagggccaagcgatctggatctggagcaacaaacttctcactactcaaacaagcaggtgacgtggaggagaatcccgggcctactagtatggactggatttggcgcatccttttccttgtcggcgctgctaccggcgcgcattccttcgaacaggttcagctccagcagtctggacctggcctggtcaagcctagccagacactgtctctgacctgtgccatcagcggcgatagcgtgtcctctaatagagccgcctggaactggatcagacagagccctagcagaggactccagtggctgggcagaacctactaccgcagcaagtggtacaacgactacgccgtgtctctgcggagccggatcaccatcaatcccgtgaccagcaagaaccaggtggccctgcacatgaacagcgtgacccctgaagataccgccgtgtactactgtgccagagccggaattgtggtggtgcccggacctgagacattctactactacgaccacggcctggacgtgtggggccagggaacaacagtgactgtctcttctacgcgtagccagcctcacaccaagcccagcgtgttcgtgatgaagaacggcaccaacgtggcctgcctcgtgaaagagttctaccccaaggacatcaggatcaacctggtgtccagcaagaagatcaccgagttcgaccccgccatcgtgatctcccccagcggcaagtacaacgccgtgaagctggggaagtacgaggacagcaacagcgtgacctgctccgtgcagcacgacaacaagaccgtgcacagcaccgactttgaagtgaaaaccgactccaccgaccacgtgaagcccaaagagacagagaacaccaagcagcccagcaagagctgccacaagcccaaggccatcgtgcacaccgagaaagtgaacatgatgagcctgaccgtgctgggcttcagaatcctgctgctgaaagtggccggctttaacctgctgatgaccctgcggctgtggtccagctaa

SEQ ID NO: 40031 - DNA, 1902 bp, synthetic construct; identical to SEQ ID NO: 40028
  source 1..1902: mol_type = other DNA

SEQ ID NO: 40032 - DNA, 1914 bp, synthetic construct
  source 1..1914: mol_type = other DNA
atggccttaccagtgaccgccttgctcctgccgctggccttgctgctccacgccgccaggccggacatccagatgacacagagcccctctagcctgtctgccagcgtgggagacagagtgaccatcacctgtagagccagccagagcatcagaaactacctgaactggtatcagcaaaagcccggcaaggcccctgagctgctgattcatgctgcaagcagcctccagagcggcgtgccaagcagattttctggcagcggcagcggaaccgacttcaccctgacaatatctagcctccagcctgaggacttcgccagctactactgccagcagagctacagcgcccctcctatcacctttggacagggcaccagactggaaatcaagctcgagatccagaaccctgatcctgccgtgtaccagctgcgggatagcaagagcagcgacaagagcgtgtgtctgttcaccgacttcgacagccagaccaacgtgtcccagagcaaggactccgacgtgtacatcaccgataagtgcgtgctggacatgcggagcatggacttcaagagcaactccgccgtggcctggtccaacaagtccgatttcgcctgcgccaacgccttcaacaacagcattatccccgaggacacattcttcccaagccccgagagcagctgcggctttaccagcgagagctaccagcagggcgtgctgagcgccaccatcctgtacgagatcctgctgggcaaggccaccctgtacgccgtgctggtgtctgccctggtgctgatggctatggtcaagcggaaggacagccggggacgcgccaagagaagcggatctggcgtgaagcagaccctgaatttcgacctgctgaagctggctggcgacgtggaatccaacccaggccctactagtatggactggatttggcgcatccttttccttgtcggcgctgctaccggcgcgcattccttcgaacaggttcagctccagcagtctggacctggcctggtcaagcctagccagacactgtctctgacctgtgccatcagcggcgatagcgtgtcctctaatagagccgcctggaactggatcagacagagccctagcagaggactccagtggctgggcagaacctactaccgcagcaagtggtacaacgactacgccgtgtctctgcggagccggatcaccatcaatcccgtgaccagcaagaaccaggtggccctgcacatgaacagcgtgacccctgaagataccgccgtgtactactgtgccagagccggaattgtggtggtgcccggacctgagacattctactactacgaccacggcctggacgtgtggggccagggaacaacagtgactgtctcttctacgcgtgaggacctgaagaacgtgttcccacctgaggtggccgtgttcgagcctagcgaggccgagatcagccacacccagaaagccaccctcgtgtgcctggctaccggcttctaccccgaccatgtggaactgtcttggtgggtcaacggcaaagaggtgcacagcggcgtgtgtaccgacccccagccactgaaagaacagcccgccctgaacgacagccggtactgcctgagcagcagactgagagtgtccgccaccttctggcagaacccccggaaccacttcagatgccaggtgcagttctacggcctgagcgagaacgacgagtggacccaggacagagccaagcccgtgacccagatcgtgtctgccgaagcctggggcagagccgattgcgacgtgaagctggtggaaaagagcttcgagacagacaccaacctgaacttccagaacctgagcgtgatcggcttcagaatcctgctgctgaaagtggccggctttaacctgctgatgaccctgcggctgtggtccagc

SEQ ID NO: 40033 - DNA, 2307 bp, synthetic construct
  source 1..2307: mol_type = other DNA
atggccttaccagtgaccgccttgctcctgccgctggccttgctgctccacgccgccaggccggaagtgcagctggttgaatctggcggaggactggttcagcctggcggatctctgagactgtcttgtgccgccagcggcttcagcttcagcgacttttggatgagctgggtccgacaggcccctggcaaaggacttgaatgggtcgccacaatcagccaggccggcagcgagaaggactacgtggactctgtgaagggcagattcaccatcagccgggacaacgccaagaagtccctgtacctccagatgaacagcctgagagccgaggacaccgccgtgtactattgtgcctctggcgtgtacagcttcgactacagaggccagggcaccctggtcacagtctcttctggtaccggcggaggcggatctggcggcggaggtagcggtggcggaggatctgaattcgacatccagatgacacagagcccctctagcctgtctgccagcgtgggagacagagtgaccatcacctgtagagccagccagagcatcagaaactacctgaactggtatcagcaaaagcccggcaaggcccctgagctgctgattcatgctgcaagcagcctccagagcggcgtgccaagcagattttctggcagcggcagcggaaccgacttcaccctgacaatatctagcctccagcctgaggacttcgccagctactactgccagcagagctacagcgcccctcctatcacctttggacagggcaccagactggaaatcaagctcgaggacctgaagaacgtgttcccacctgaggtggccgtgttcgagcctagcgaggccgagatcagccacacccagaaagccaccctcgtgtgcctggctaccggcttctaccccgaccatgtggaactgtcttggtgggtcaacggcaaagaggtgcacagcggcgtgtgtaccgacccccagccactgaaagaacagcccgccctgaacgacagccggtactgcctgagcagcagactgagagtgtccgccaccttctggcagaacccccggaaccacttcagatgccaggtgcagttctacggcctgagcgagaacgacgagtggacccaggacagagccaagcccgtgacccagatcgtgtctgccgaagcctggggcagagccgattgcgacgtgaagctggtggaaaagagcttcgagacagacaccaacctgaacttccagaacctgagcgtgatcggcttcagaatcctgctgctgaaagtggccggctttaacctgctgatgaccctgcggctgtggtccagcagggccaagcgatctggatctggagcaacaaacttctcactactcaaacaagcaggtgacgtggaggagaatcccgggcctactagtatggactggatttggcgcatccttttccttgtcggcgctgctaccggcgcgcattccttcgaacaggttcagctccagcagtctggacctggcctggtcaagcctagccagacactgtctctgacctgtgccatcagcggcgatagcgtgtcctctaatagagccgcctggaactggatcagacagagccctagcagaggactccagtggctgggcagaacctactaccgcagcaagtggtacaacgactacgccgtgtctctgcggagccggatcaccatcaatcccgtgaccagcaagaaccaggtggccctgcacatgaacagcgtgacccctgaagataccgccgtgtactactgtgccagagccggaattgtggtggtgcccggacctgagacattctactactacgaccacggcctggacgtgtggggccagggaacaacagtgactgtctcttctacgcgtatccagaaccctgatcctgccgtgtaccagctgcgggatagcaagagcagcgacaagagcgtgtgtctgttcaccgacttcgacagccagaccaacgtgtcccagagcaaggactccgacgtgtacatcaccgataagtgcgtgctggacatgcggagcatggacttcaagagcaactccgccgtggcctggtccaacaagtccgatttcgcctgcgccaacgccttcaacaacagcattatccccgaggacacattcttcccaagccccgagagcagctgcggctttaccagcgagagctaccagcagggcgtgctgagcgccaccatcctgtacgagatcctgctgggcaaggccaccctgtacgccgtgctggtgtctgccctggtgctgatggctatggtcaagcggaaggacagccgggga

SEQ ID NO: 40034 - DNA, 2319 bp, synthetic construct
  source 1..2319: mol_type = other DNA
atggccttaccagtgaccgccttgctcctgccgctggccttgctgctccacgccgccaggccggaagtgcagctggttgaatctggcggaggactggttcagcctggcggatctctgagactgtcttgtgccgccagcggcttcagcttcagcgacttttggatgagctgggtccgacaggcccctggcaaaggacttgaatgggtcgccacaatcagccaggccggcagcgagaaggactacgtggactctgtgaagggcagattcaccatcagccgggacaacgccaagaagtccctgtacctccagatgaacagcctgagagccgaggacaccgccgtgtactattgtgcctctggcgtgtacagcttcgactacagaggccagggcaccctggtcacagtctcttctggtaccggcggaggcggatctggcggcggaggtagcggtggcggaggatctgaattcgacatccagatgacacagagcccctctagcctgtctgccagcgtgggagacagagtgaccatcacctgtagagccagccagagcatcagaaactacctgaactggtatcagcaaaagcccggcaaggcccctgagctgctgattcatgctgcaagcagcctccagagcggcgtgccaagcagattttctggcagcggcagcggaaccgacttcaccctgacaatatctagcctccagcctgaggacttcgccagctactactgccagcagagctacagcgcccctcctatcacctttggacagggcaccagactggaaatcaagctcgagatccagaaccctgatcctgccgtgtaccagctgcgggatagcaagagcagcgacaagagcgtgtgtctgttcaccgacttcgacagccagaccaacgtgtcccagagcaaggactccgacgtgtacatcaccgataagtgcgtgctggacatgcggagcatggacttcaagagcaactccgccgtggcctggtccaacaagtccgatttcgcctgcgccaacgccttcaacaacagcattatccccgaggacacattcttcccaagccccgagagcagctgcggctttaccagcgagagctaccagcagggcgtgctgagcgccaccatcctgtacgagatcctgctgggcaaggccaccctgtacgccgtgctggtgtctgccctggtgctgatggctatggtcaagcggaaggacagccggggacgcgccaagagaagcggatctggcgtgaagcagaccctgaatttcgacctgctgaagctggctggcgacgtggaatccaacccaggccctactagtatggactggatttggcgcatccttttccttgtcggcgctgctaccggcgcgcattccttcgaacaggttcagctccagcagtctggacctggcctggtcaagcctagccagacactgtctctgacctgtgccatcagcggcgatagcgtgtcctctaatagagccgcctggaactggatcagacagagccctagcagaggactccagtggctgggcagaacctactaccgcagcaagtggtacaacgactacgccgtgtctctgcggagccggatcaccatcaatcccgtgaccagcaagaaccaggtggccctgcacatgaacagcgtgacccctgaagataccgccgtgtactactgtgccagagccggaattgtggtggtgcccggacctgagacattctactactacgaccacggcctggacgtgtggggccagggaacaacagtgactgtctcttctacgcgtgaggacctgaagaacgtgttcccacctgaggtggccgtgttcgagcctagcgaggccgagatcagccacacccagaaagccaccctcgtgtgcctggctaccggcttctaccccgaccatgtggaactgtcttggtgggtcaacggcaaagaggtgcacagcggcgtgtgtaccgacccccagccactgaaagaacagcccgccctgaacgacagccggtactgcctgagcagcagactgagagtgtccgccaccttctggcagaacccccggaaccacttcagatgccaggtgcagttctacggcctgagcgagaacgacgagtggacccaggacagagccaagcccgtgacccagatcgtgtctgccgaagcctggggcagagccgattgcgacgtgaagctggtggaaaagagcttcgagacagacaccaacctgaacttccagaacctgagcgtgatcggcttcagaatcctgctgctgaaagtggccggctttaacctgctgatgaccctgcggctgtggtccagc

SEQ ID NO: 40035 - DNA, 2718 bp, synthetic construct
  source 1..2718: mol_type = other DNA
atggccttaccagtgaccgccttgctcctgccgctggccttgctgctccacgccgccaggccggaagtgcagctggttgaatctggcggaggactggttcagcctggcggatctctgagactgtcttgtgccgccagcggcttcagcttcagcgacttttggatgagctgggtccgacaggcccctggcaaaggacttgaatgggtcgccacaatcagccaggccggcagcgagaaggactacgtggactctgtgaagggcagattcaccatcagccgggacaacgccaagaagtccctgtacctccagatgaacagcctgagagccgaggacaccgccgtgtactattgtgcctctggcgtgtacagcttcgactacagaggccagggcaccctggtcacagtctcttctggtaccggcggaggcggatctggcggcggaggtagcggtggcggaggatctgaattcgacatccagatgacacagagcccctctagcctgtctgccagcgtgggagacagagtgaccatcacctgtagagccagccagagcatcagaaactacctgaactggtatcagcaaaagcccggcaaggcccctgagctgctgattcatgctgcaagcagcctccagagcggcgtgccaagcagattttctggcagcggcagcggaaccgacttcaccctgacaatatctagcctccagcctgaggacttcgccagctactactgccagcagagctacagcgcccctcctatcacctttggacagggcaccagactggaaatcaagctcgaggacctgaagaacgtgttcccacctgaggtggccgtgttcgagcctagcgaggccgagatcagccacacccagaaagccaccctcgtgtgcctggctaccggcttctaccccgaccatgtggaactgtcttggtgggtcaacggcaaagaggtgcacagcggcgtgtgtaccgacccccagccactgaaagaacagcccgccctgaacgacagccggtactgcctgagcagcagactgagagtgtccgccaccttctggcagaacccccggaaccacttcagatgccaggtgcagttctacggcctgagcgagaacgacgagtggacccaggacagagccaagcccgtgacccagatcgtgtctgccgaagcctggggcagagccgattgcgacgtgaagctggtggaaaagagcttcgagacagacaccaacctgaacttccagaacctgagcgtgatcggcttcagaatcctgctgctgaaagtggccggctttaacctgctgatgaccctgcggctgtggtccagcagggccaagcgatctggatctggagcaacaaacttctcactactcaaacaagcaggtgacgtggaggagaatcccgggcctactagtatggactggatttggcgcatccttttccttgtcggcgctgctaccggcgcgcattccgggccccagctccagctgcaagagtctggacctggcctggtcaagcctagcgagacactgagcctgacctgtaccgtgtccggcgatagcatcagcagcggcgattactactggggctggatcagacagcctcctggcaaaggactggaatggatcggccacatctactacagcggcgtgacctactacaaccccagcctgaagtccagagtgaccatcagcgtggacaccagccggaaccagttctccctgaagctgtctagcgtgacagccgccgataccgccgtgtactactgcaccagagaggacagcagcaactggcggagtagaggccagggaacactggtcacagttagctctggatccggcggaggcggaagtggaggcggaggatctggcggcggaggctctttcgaacaggttcagctccagcagtctggacctggcctggtcaagcctagccagacactgtctctgacctgtgccatcagcggcgatagcgtgtcctctaatagagccgcctggaactggatcagacagagccctagcagaggactccagtggctgggcagaacctactaccgcagcaagtggtacaacgactacgccgtgtctctgcggagccggatcaccatcaatcccgtgaccagcaagaaccaggtggccctgcacatgaacagcgtgacccctgaagataccgccgtgtactactgtgccagagccggaattgtggtggtgcccggacctgagacattctactactacgaccacggcctggacgtgtggggccagggaacaacagtgactgtctcttctacgcgtatccagaaccctgatcctgccgtgtaccagctgcgggatagcaagagcagcgacaagagcgtgtgtctgttcaccgacttcgacagccagaccaacgtgtcccagagcaaggactccgacgtgtacatcaccgataagtgcgtgctggacatgcggagcatggacttcaagagcaactccgccgtggcctggtccaacaagtccgatttcgcctgcgccaacgccttcaacaacagcattatccccgaggacacattcttcccaagccccgagagcagctgcggctttaccagcgagagctaccagcagggcgtgctgagcgccaccatcctgtacgagatcctgctgggcaaggccaccctgtacgccgtgctggtgtctgccctggtgctgatggctatggtcaagcggaaggacagccgggga

SEQ ID NO: 40036 - DNA, 2730 bp, synthetic construct
  source 1..2730: mol_type = other DNA
atggccttaccagtgaccgccttgctcctgccgctggccttgctgctccacgccgccaggccggaagtgcagctggttgaatctggcggaggactggttcagcctggcggatctctgagactgtcttgtgccgccagcggcttcagcttcagcgacttttggatgagctgggtccgacaggcccctggcaaaggacttgaatgggtcgccacaatcagccaggccggcagcgagaaggactacgtggactctgtgaagggcagattcaccatcagccgggacaacgccaagaagtccctgtacctccagatgaacagcctgagagccgaggacaccgccgtgtactattgtgcctctggcgtgtacagcttcgactacagaggccagggcaccctggtcacagtctcttctggtaccggcggaggcggatctggcggcggaggtagcggtggcggaggatctgaattcgacatccagatgacacagagcccctctagcctgtctgccagcgtgggagacagagtgaccatcacctgtagagccagccagagcatcagaaactacctgaactggtatcagcaaaagcccggcaaggcccctgagctgctgattcatgctgcaagcagcctccagagcggcgtgccaagcagattttctggcagcggcagcggaaccgacttcaccctgacaatatctagcctccagcctgaggacttcgccagctactactgccagcagagctacagcgcccctcctatcacctttggacagggcaccagactggaaatcaagctcgagatccagaaccctgatcctgccgtgtaccagctgcgggatagcaagagcagcgacaagagcgtgtgtctgttcaccgacttcgacagccagaccaacgtgtcccagagcaaggactccgacgtgtacatcaccgataagtgcgtgctggacatgcggagcatggacttcaagagcaactccgccgtggcctggtccaacaagtccgatttcgcctgcgccaacgccttcaacaacagcattatccccgaggacacattcttcccaagccccgagagcagctgcggctttaccagcgagagctaccagcagggcgtgctgagcgccaccatcctgtacgagatcctgctgggcaaggccaccctgtacgccgtgctggtgtctgccctggtgctgatggctatggtcaagcggaaggacagccggggacgcgccaagagaagcggatctggcgtgaagcagaccctgaatttcgacctgctgaagctggctggcgacgtggaatccaacccaggccctactagtatggactggatttggcgcatccttttccttgtcggcgctgctaccggcgcgcattccgggccccagctccagctgcaagagtctggacctggcctggtcaagcctagcgagacactgagcctgacctgtaccgtgtccggcgatagcatcagcagcggcgattactactggggctggatcagacagcctcctggcaaaggactggaatggatcggccacatctactacagcggcgtgacctactacaaccccagcctgaagtccagagtgaccatcagcgtggacaccagccggaaccagttctccctgaagctgtctagcgtgacagccgccgataccgccgtgtactactgcaccagagaggacagcagcaactggcggagtagaggccagggaacactggtcacagttagctctggatccggcggaggcggaagtggaggcggaggatctggcggcggaggctctttcgaacaggttcagctccagcagtctggacctggcctggtcaagcctagccagacactgtctctgacctgtgccatcagcggcgatagcgtgtcctctaatagagccgcctggaactggatcagacagagccctagcagaggactccagtggctgggcagaacctactaccgcagcaagtggtacaacgactacgccgtgtctctgcggagccggatcaccatcaatcccgtgaccagcaagaaccaggtggccctgcacatgaacagcgtgacccctgaagataccgccgtgtactactgtgccagagccggaattgtggtggtgcccggacctgagacattctactactacgaccacggcctggacgtgtggggccagggaacaacagtgactgtctcttctacgcgtgaggacctgaagaacgtgttcccacctgaggtggccgtgttcgagcctagcgaggccgagatcagccacacccagaaagccaccctcgtgtgcctggctaccggcttctaccccgaccatgtggaactgtcttggtgggtcaacggcaaagaggtgcacagcggcgtgtgtaccgacccccagccactgaaagaacagcccgccctgaacgacagccggtactgcctgagcagcagactgagagtgtccgccaccttctggcagaacccccggaaccacttcagatgccaggtgcagttctacggcctgagcgagaacgacgagtggacccaggacagagccaagcccgtgacccagatcgtgtctgccgaagcctggggcagagccgattgcgacgtgaagctggtggaaaagagcttcgagacagacaccaacctgaacttccagaacctgagcgtgatcggcttcagaatcctgctgctgaaagtggccggctttaacctgctgatgaccctgcggctgtggtccagc

SEQ ID NO: 40037 - DNA, 2112 bp, synthetic construct
  source 1..2112: mol_type = other DNA
atggccttaccagtgaccgccttgctcctgccgctggccttgctgctccacgccgccaggccggacatccagatgacacagagcccctctagcctgtctgccagcgtgggagacagagtgaccatcacctgtagagccagccagagcatcagaaactacctgaactggtatcagcaaaagcccggcaaggcccctgagctgctgattcatgctgcaagcagcctccagagcggcgtgccaagcagattttctggcagcggcagcggaaccgacttcaccctgacaatatctagcctccagcctgaggacttcgccagctactactgccagcagagctacagcgcccctcctatcacctttggacagggcaccagactggaaatcaagctcgaggacctgaagaacgtgttcccacctgaggtggccgtgttcgagcctagcgaggccgagatcagccacacccagaaagccaccctcgtgtgcctggctaccggcttctaccccgaccatgtggaactgtcttggtgggtcaacggcaaagaggtgcacagcggcgtgtgtaccgacccccagccactgaaagaacagcccgccctgaacgacagccggtactgcctgagcagcagactgagagtgtccgccaccttctggcagaacccccggaaccacttcagatgccaggtgcagttctacggcctgagcgagaacgacgagtggacccaggacagagccaagcccgtgacccagatcgtgtctgccgaagcctggggcagagccgattgcgacgtgaagctggtggaaaagagcttcgagacagacaccaacctgaacttccagaacctgagcgtgatcggcttcagaatcctgctgctgaaagtggccggctttaacctgctgatgaccctgcggctgtggtccagcagggccaagcgatctggatctggagcaacaaacttctcactactcaaacaagcaggtgacgtggaggagaatcccgggcctactagtatggactggatttggcgcatccttttccttgtcggcgctgctaccggcgcccattccgggcccatggaccccgacctggaaatcagagccgccttcctgcggcagagaaacacagccctgagaacagaggtggccgagctggaacaagaggtgcagcggctggaaaacgaggtgtcccagtacgagacaagatacggccctctcggaggcggaaaaggatccggcggcggaggatctggcggaggcggatctgggggcggaggctctttcgaacaggttcagctccagcagtctggacctggcctggtcaagcctagccagacactgtctctgacctgtgccatcagcggcgatagcgtgtcctctaatagagccgcctggaactggatcagacagagccctagcagaggactccagtggctgggcagaacctactaccgcagcaagtggtacaacgactacgccgtgtctctgcggagccggatcaccatcaatcccgtgaccagcaagaaccaggtggccctgcacatgaacagcgtgacccctgaagataccgccgtgtactactgtgccagagccggaattgtggtggtgcccggacctgagacattctactactacgaccacggcctggacgtgtggggccagggaacaacagtgactgtctcttctacgcgtatccagaaccctgatcctgccgtgtaccagctgcgggatagcaagagcagcgacaagagcgtgtgtctgttcaccgacttcgacagccagaccaacgtgtcccagagcaaggactccgacgtgtacatcaccgataagtgcgtgctggacatgcggagcatggacttcaagagcaactccgccgtggcctggtccaacaagtccgatttcgcctgcgccaacgccttcaacaacagcattatccccgaggacacattcttcccaagccccgagagcagctgcggctttaccagcgagagctaccagcagggcgtgctgagcgccaccatcctgtacgagatcctgctgggcaaggccaccctgtacgccgtgctggtgtctgccctggtgctgatggctatggtcaagcggaaggacagccgggga

SEQ ID NO: 40038 - DNA, 2124 bp, synthetic construct
  source 1..2124: mol_type = other DNA
atggccttaccagtgaccgccttgctcctgccgctggccttgctgctccacgccgccaggccggacatccagatgacacagagcccctctagcctgtctgccagcgtgggagacagagtgaccatcacctgtagagccagccagagcatcagaaactacctgaactggtatcagcaaaagcccggcaaggcccctgagctgctgattcatgctgcaagcagcctccagagcggcgtgccaagcagattttctggcagcggcagcggaaccgacttcaccctgacaatatctagcctccagcctgaggacttcgccagctactactgccagcagagctacagcgcccctcctatcacctttggacagggcaccagactggaaatcaagctcgagatccagaaccctgatcctgccgtgtaccagctgcgggatagcaagagcagcgacaagagcgtgtgtctgttcaccgacttcgacagccagaccaacgtgtcccagagcaaggactccgacgtgtacatcaccgataagtgcgtgctggacatgcggagcatggacttcaagagcaactccgccgtggcctggtccaacaagtccgatttcgcctgcgccaacgccttcaacaacagcattatccccgaggacacattcttcccaagccccgagagcagctgcggctttaccagcgagagctaccagcagggcgtgctgagcgccaccatcctgtacgagatcctgctgggcaaggccaccctgtacgccgtgctggtgtctgccctggtgctgatggctatggtcaagcggaaggacagccggggacgcgccaagagaagcggatctggcgtgaagcagaccctgaatttcgacctgctgaagctggctggcgacgtggaatccaacccaggccctactagtatggactggatttggcgcatccttttccttgtcggcgctgctaccggcgcccattccgggcccatggaccccgacctggaaatcagagccgccttcctgcggcagagaaacacagccctgagaacagaggtggccgagctggaacaagaggtgcagcggctggaaaacgaggtgtcccagtacgagacaagatacggccctctcggaggcggaaaaggatccggcggcggaggatctggcggaggcggatctgggggcggaggctctttcgaacaggttcagctccagcagtctggacctggcctggtcaagcctagccagacactgtctctgacctgtgccatcagcggcgatagcgtgtcctctaatagagccgcctggaactggatcagacagagccctagcagaggactccagtggctgggcagaacctactaccgcagcaagtggtacaacgactacgccgtgtctctgcggagccggatcaccatcaatcccgtgaccagcaagaaccaggtggccctgcacatgaacagcgtgacccctgaagataccgccgtgtactactgtgccagagccggaattgtggtggtgcccggacctgagacattctactactacgaccacggcctggacgtgtggggccagggaacaacagtgactgtctcttctacgcgtgaggacctgaagaacgtgttcccacctgaggtggccgtgttcgagcctagcgaggccgagatcagccacacccagaaagccaccctcgtgtgcctggctaccggcttctaccccgaccatgtggaactgtcttggtgggtcaacggcaaagaggtgcacagcggcgtgtgtaccgacccccagccactgaaagaacagcccgccctgaacgacagccggtactgcctgagcagcagactgagagtgtccgccaccttctggcagaacccccggaaccacttcagatgccaggtgcagttctacggcctgagcgagaacgacgagtggacccaggacagagccaagcccgtgacccagatcgtgtctgccgaagcctggggcagagccgattgcgacgtgaagctggtggaaaagagcttcgagacagacaccaacctgaacttccagaacctgagcgtgatcggcttcagaatcctgctgctgaaagtggccggctttaacctgctgatgaccctgcggctgtggtccagc

SEQ ID NO: 40039 - DNA, 2043 bp, synthetic construct
  source 1..2043: mol_type = other DNA
atggccttaccagtgaccgccttgctcctgccgctggccttgctgctccacgccgccaggccggacatccagatgacacagagcccctctagcctgtctgccagcgtgggagacagagtgaccatcacctgtagagccagccagagcatcagaaactacctgaactggtatcagcaaaagcccggcaaggcccctgagctgctgattcatgctgcaagcagcctccagagcggcgtgccaagcagattttctggcagcggcagcggaaccgacttcaccctgacaatatctagcctccagcctgaggacttcgccagctactactgccagcagagctacagcgcccctcctatcacctttggacagggcaccagactggaaatcaagctcgaggacctgaagaacgtgttcccacctgaggtggccgtgttcgagcctagcgaggccgagatcagccacacccagaaagccaccctcgtgtgcctggctaccggcttctaccccgaccatgtggaactgtcttggtgggtcaacggcaaagaggtgcacagcggcgtgtgtaccgacccccagccactgaaagaacagcccgccctgaacgacagccggtactgcctgagcagcagactgagagtgtccgccaccttctggcagaacccccggaaccacttcagatgccaggtgcagttctacggcctgagcgagaacgacgagtggacccaggacagagccaagcccgtgacccagatcgtgtctgccgaagcctggggcagagccgattgcgacgtgaagctggtggaaaagagcttcgagacagacaccaacctgaacttccagaacctgagcgtgatcggcttcagaatcctgctgctgaaagtggccggctttaacctgctgatgaccctgcggctgtggtccagcagggccaagcgatctggatctggagcaacaaacttctcactactcaaacaagcaggtgacgtggaggagaatcccgggcctactagtatggactggatttggcgcatccttttccttgtcggcgctgctaccggcgcccattccgggcccgaagttgctgccctcgagaaggaggtagcagctttggaaaaagaagtcgcagcccttgagaaagaagttgcggctctggagaagggatccggcggcggaggatctggcggaggcggatctgggggcggaggctctttcgaacaggttcagctccagcagtctggacctggcctggtcaagcctagccagacactgtctctgacctgtgccatcagcggcgatagcgtgtcctctaatagagccgcctggaactggatcagacagagccctagcagaggactccagtggctgggcagaacctactaccgcagcaagtggtacaacgactacgccgtgtctctgcggagccggatcaccatcaatcccgtgaccagcaagaaccaggtggccctgcacatgaacagcgtgacccctgaagataccgccgtgtactactgtgccagagccggaattgtggtggtgcccggacctgagacattctactactacgaccacggcctggacgtgtggggccagggaacaacagtgactgtctcttctacgcgtatccagaaccctgatcctgccgtgtaccagctgcgggatagcaagagcagcgacaagagcgtgtgtctgttcaccgacttcgacagccagaccaacgtgtcccagagcaaggactccgacgtgtacatcaccgataagtgcgtgctggacatgcggagcatggacttcaagagcaactccgccgtggcctggtccaacaagtccgatttcgcctgcgccaacgccttcaacaacagcattatccccgaggacacattcttcccaagccccgagagcagctgcggctttaccagcgagagctaccagcagggcgtgctgagcgccaccatcctgtacgagatcctgctgggcaaggccaccctgtacgccgtgctggtgtctgccctggtgctgatggctatggtcaagcggaaggacagccgggga

SEQ ID NO: 40040 - DNA, 2055 bp, synthetic construct
  source 1..2055: mol_type = other DNA
atggccttaccagtgaccgccttgctcctgccgctggccttgctgctccacgccgccaggccggacatccagatgacacagagcccctctagcctgtctgccagcgtgggagacagagtgaccatcacctgtagagccagccagagcatcagaaactacctgaactggtatcagcaaaagcccggcaaggcccctgagctgctgattcatgctgcaagcagcctccagagcggcgtgccaagcagattttctggcagcggcagcggaaccgacttcaccctgacaatatctagcctccagcctgaggacttcgccagctactactgccagcagagctacagcgcccctcctatcacctttggacagggcaccagactggaaatcaagctcgagatccagaaccctgatcctgccgtgtaccagctgcgggatagcaagagcagcgacaagagcgtgtgtctgttcaccgacttcgacagccagaccaacgtgtcccagagcaaggactccgacgtgtacatcaccgataagtgcgtgctggacatgcggagcatggacttcaagagcaactccgccgtggcctggtccaacaagtccgatttcgcctgcgccaacgccttcaacaacagcattatccccgaggacacattcttcccaagccccgagagcagctgcggctttaccagcgagagctaccagcagggcgtgctgagcgccaccatcctgtacgagatcctgctgggcaaggccaccctgtacgccgtgctggtgtctgccctggtgctgatggctatggtcaagcggaaggacagccggggacgcgccaagagaagcggatctggcgtgaagcagaccctgaatttcgacctgctgaagctggctggcgacgtggaatccaacccaggccctactagtatggactggatttggcgcatccttttccttgtcggcgctgctaccggcgcccattccgggcccgaagttgctgccctcgagaaggaggtagcagctttggaaaaagaagtcgcagcccttgagaaagaagttgcggctctggagaagggatccggcggcggaggatctggcggaggcggatctgggggcggaggctctttcgaacaggttcagctccagcagtctggacctggcctggtcaagcctagccagacactgtctctgacctgtgccatcagcggcgatagcgtgtcctctaatagagccgcctggaactggatcagacagagccctagcagaggactccagtggctgggcagaacctactaccgcagcaagtggtacaacgactacgccgtgtctctgcggagccggatcaccatcaatcccgtgaccagcaagaaccaggtggccctgcacatgaacagcgtgacccctgaagataccgccgtgtactactgtgccagagccggaattgtggtggtgcccggacctgagacattctactactacgaccacggcctggacgtgtggggccagggaacaacagtgactgtctcttctacgcgtgaggacctgaagaacgtgttcccacctgaggtggccgtgttcgagcctagcgaggccgagatcagccacacccagaaagccaccctcgtgtgcctggctaccggcttctaccccgaccatgtggaactgtcttggtgggtcaacggcaaagaggtgcacagcggcgtgtgtaccgacccccagccactgaaagaacagcccgccctgaacgacagccggtactgcctgagcagcagactgagagtgtccgccaccttctggcagaacccccggaaccacttcagatgccaggtgcagttctacggcctgagcgagaacgacgagtggacccaggacagagccaagcccgtgacccagatcgtgtctgccgaagcctggggcagagccgattgcgacgtgaagctggtggaaaagagcttcgagacagacaccaacctgaacttccagaacctgagcgtgatcggcttcagaatcctgctgctgaaagtggccggctttaacctgctgatgaccctgcggctgtggtccagc

SEQ ID NO: 40041 - DNA, 2313 bp, synthetic construct
  source 1..2313: mol_type = other DNA
atggccttaccagtgaccgccttgctcctgccgctggccttgctgctccacgccgccaggccggacatccagatgacacagagcccctctagcctgtctgccagcgtgggagacagagtgaccatcacctgtagagccagccagagcatcagaaactacctgaactggtatcagcaaaagcccggcaaggcccctgagctgctgattcatgctgcaagcagcctccagagcggcgtgccaagcagattttctggcagcggcagcggaaccgacttcaccctgacaatatctagcctccagcctgaggacttcgccagctactactgccagcagagctacagcgcccctcctatcacctttggacagggcaccagactggaaatcaagctcgaggacctgaagaacgtgttcccacctgaggtggccgtgttcgagcctagcgaggccgagatcagccacacccagaaagccaccctcgtgtgcctggctaccggcttctaccccgaccatgtggaactgtcttggtgggtcaacggcaaagaggtgcacagcggcgtgtgtaccgacccccagccactgaaagaacagcccgccctgaacgacagccggtactgcctgagcagcagactgagagtgtccgccaccttctggcagaacccccggaaccacttcagatgccaggtgcagttctacggcctgagcgagaacgacgagtggacccaggacagagccaagcccgtgacccagatcgtgtctgccgaagcctggggcagagccgattgcgacgtgaagctggtggaaaagagcttcgagacagacaccaacctgaacttccagaacctgagcgtgatcggcttcagaatcctgctgctgaaagtggccggctttaacctgctgatgaccctgcggctgtggtccagcagggccaagcgatctggatctggagcaacaaacttctcactactcaaacaagcaggtgacgtggaggagaatcccgggcctactagtatggactggatttggcgcatccttttccttgtcggcgctgctaccggcgcccattccgggccccaggttcagctgcaagagtctggcggaggacttgctcaagctggcggaagcctgagactgtcttgtgccgcctctggcagaaccttcagcatgggctggtttagacaggcccctggcaaagagagagagttcgtcgccgccatcacatacagcggcggcagcccttactacgcctcttctgtcagaggccggttcaccatcagccgggacaacgccaagaacaccgtgtacctccagatgaacagcctgaagccagaggacaccgccgtgtactactgtgccgccaatccaacctacggcagcgactggaatgccgagaattggggccagggcacccaagtgacagtgtctagtggatccggcggcggaggatctggcggaggcggatctgggggcggaggctctttcgaacaggttcagctccagcagtctggacctggcctggtcaagcctagccagacactgtctctgacctgtgccatcagcggcgatagcgtgtcctctaatagagccgcctggaactggatcagacagagccctagcagaggactccagtggctgggcagaacctactaccgcagcaagtggtacaacgactacgccgtgtctctgcggagccggatcaccatcaatcccgtgaccagcaagaaccaggtggccctgcacatgaacagcgtgacccctgaagataccgccgtgtactactgtgccagagccggaattgtggtggtgcccggacctgagacattctactactacgaccacggcctggacgtgtggggccagggaacaacagtgactgtctcttctacgcgtatccagaaccctgatcctgccgtgtaccagctgcgggatagcaagagcagcgacaagagcgtgtgtctgttcaccgacttcgacagccagaccaacgtgtcccagagcaaggactccgacgtgtacatcaccgataagtgcgtgctggacatgcggagcatggacttcaagagcaactccgccgtggcctggtccaacaagtccgatttcgcctgcgccaacgccttcaacaacagcattatccccgaggacacattcttcccaagccccgagagcagctgcggctttaccagcgagagctaccagcagggcgtgctgagcgccaccatcctgtacgagatcctgctgggcaaggccaccctgtacgccgtgctggtgtctgccctggtgctgatggctatggtcaagcggaaggacagccgggga

SEQ ID NO: 40042 - DNA, 2325 bp, synthetic construct
  source 1..2325: mol_type = other DNA
atggccttaccagtgaccgccttgctcctgccgctggccttgctgctccacgccgccaggccggacatccagatgacacagagcccctctagcctgtctgccagcgtgggagacagagtgaccatcacctgtagagccagccagagcatcagaaactacctgaactggtatcagcaaaagcccggcaaggcccctgagctgctgattcatgctgcaagcagcctccagagcggcgtgccaagcagattttctggcagcggcagcggaaccgacttcaccctgacaatatctagcctccagcctgaggacttcgccagctactactgccagcagagctacagcgcccctcctatcacctttggacagggcaccagactggaaatcaagctcgagatccagaaccctgatcctgccgtgtaccagctgcgggatagcaagagcagcgacaagagcgtgtgtctgttcaccgacttcgacagccagaccaacgtgtcccagagcaaggactccgacgtgtacatcaccgataagtgcgtgctggacatgcggagcatggacttcaagagcaactccgccgtggcctggtccaacaagtccgatttcgcctgcgccaacgccttcaacaacagcattatccccgaggacacattcttcccaagccccgagagcagctgcggctttaccagcgagagctaccagcagggcgtgctgagcgccaccatcctgtacgagatcctgctgggcaaggccaccctgtacgccgtgctggtgtctgccctggtgctgatggctatggtcaagcggaaggacagccggggacgcgccaagagaagcggatctggcgtgaagcagaccctgaatttcgacctgctgaagctggctggcgacgtggaatccaacccaggccctactagtatggactggatttggcgcatccttttccttgtcggcgctgctaccggcgcccattccgggccccaggttcagctgcaagagtctggcggaggacttgctcaagctggcggaagcctgagactgtcttgtgccgcctctggcagaaccttcagcatgggctggtttagacaggcccctggcaaagagagagagttcgtcgccgccatcacatacagcggcggcagcccttactacgcctcttctgtcagaggccggttcaccatcagccgggacaacgccaagaacaccgtgtacctccagatgaacagcctgaagccagaggacaccgccgtgtactactgtgccgccaatccaacctacggcagcgactggaatgccgagaattggggccagggcacccaagtgacagtgtctagtggatccggcggcggaggatctggcggaggcggatctgggggcggaggctctttcgaacaggttcagctccagcagtctggacctggcctggtcaagcctagccagacactgtctctgacctgtgccatcagcggcgatagcgtgtcctctaatagagccgcctggaactggatcagacagagccctagcagaggactccagtggctgggcagaacctactaccgcagcaagtggtacaacgactacgccgtgtctctgcggagccggatcaccatcaatcccgtgaccagcaagaaccaggtggccctgcacatgaacagcgtgacccctgaagataccgccgtgtactactgtgccagagccggaattgtggtggtgcccggacctgagacattctactactacgaccacggcctggacgtgtggggccagggaacaacagtgactgtctcttctacgcgtgaggacctgaagaacgtgttcccacctgaggtggccgtgttcgagcctagcgaggccgagatcagccacacccagaaagccaccctcgtgtgcctggctaccggcttctaccccgaccatgtggaactgtcttggtgggtcaacggcaaagaggtgcacagcggcgtgtgtaccgacccccagccactgaaagaacagcccgccctgaacgacagccggtactgcctgagcagcagactgagagtgtccgccaccttctggcagaacccccggaaccacttcagatgccaggtgcagttctacggcctgagcgagaacgacgagtggacccaggacagagccaagcccgtgacccagatcgtgtctgccgaagcctggggcagagccgattgcgacgtgaagctggtggaaaagagcttcgagacagacaccaacctgaacttccagaacctgagcgtgatcggcttcagaatcctgctgctgaaagtggccggctttaacctgctgatgaccctgcggctgtggtccagc

SEQ ID NO: 40043 - DNA, 2331 bp, synthetic construct
  source 1..2331: mol_type = other DNA
atggccttaccagtgaccgccttgctcctgccgctggccttgctgctccacgccgccaggccggaagtgcaactggtggaatctggaggctctctggtgcagccagggggaagcctgagactgtcttgtgccgcttccggcttcaccttcgacgactacgccatgagctgggtgcgccaggtgccaggcaaaggcctggaatgggtgtccagcatcaactggagcggcacccacaccgattacgccgactccgtgaaaggcagattcacaatcagcagaaacaacgccaacaataccctgtacctgcagatgaactccctgaagtctgaggatacagcagtgtattattgcgccaagaactggcgggacgccggcaccacttggtttgagaaaagcggctctgccggacagggaacccaagtgacagtgtcctccggtaccggcggaggcggatctggcggcggaggtagcggtggcggaggatctgaattcgacatccagatgacacagagcccctctagcctgtctgccagcgtgggagacagagtgaccatcacctgtagagccagccagagcatcagaaactacctgaactggtatcagcaaaagcccggcaaggcccctgagctgctgattcatgctgcaagcagcctccagagcggcgtgccaagcagattttctggcagcggcagcggaaccgacttcaccctgacaatatctagcctccagcctgaggacttcgccagctactactgccagcagagctacagcgcccctcctatcacctttggacagggcaccagactggaaatcaagctcgaggacctgaagaacgtgttcccacctgaggtggccgtgttcgagcctagcgaggccgagatcagccacacccagaaagccaccctcgtgtgcctggctaccggcttctaccccgaccatgtggaactgtcttggtgggtcaacggcaaagaggtgcacagcggcgtgtgtaccgacccccagccactgaaagaacagcccgccctgaacgacagccggtactgcctgagcagcagactgagagtgtccgccaccttctggcagaacccccggaaccacttcagatgccaggtgcagttctacggcctgagcgagaacgacgagtggacccaggacagagccaagcccgtgacccagatcgtgtctgccgaagcctggggcagagccgattgcgacgtgaagctggtggaaaagagcttcgagacagacaccaacctgaacttccagaacctgagcgtgatcggcttcagaatcctgctgctgaaagtggccggctttaacctgctgatgaccctgcggctgtggtccagcagggccaagcgatctggatctggagcaacaaacttctcactactcaaacaagcaggtgacgtggaggagaatcccgggcctactagtatggactggatttggcgcatccttttccttgtcggcgctgctaccggcgcgcattccttcgaacaggttcagctccagcagtctggacctggcctggtcaagcctagccagacactgtctctgacctgtgccatcagcggcgatagcgtgtcctctaatagagccgcctggaactggatcagacagagccctagcagaggactccagtggctgggcagaacctactaccgcagcaagtggtacaacgactacgccgtgtctctgcggagccggatcaccatcaatcccgtgaccagcaagaaccaggtggccctgcacatgaacagcgtgacccctgaagataccgccgtgtactactgtgccagagccggaattgtggtggtgcccggacctgagacattctactactacgaccacggcctggacgtgtggggccagggaacaacagtgactgtctcttctacgcgtatccagaaccctgatcctgccgtgtaccagctgcgggatagcaagagcagcgacaagagcgtgtgtctgttcaccgacttcgacagccagaccaacgtgtcccagagcaaggactccgacgtgtacatcaccgataagtgcgtgctggacatgcggagcatggacttcaagagcaactccgccgtggcctggtccaacaagtccgatttcgcctgcgccaacgccttcaacaacagcattatccccgaggacacattcttcccaagccccgagagcagctgcggctttaccagcgagagctaccagcagggcgtgctgagcgccaccatcctgtacgagatcctgctgggcaaggccaccctgtacgccgtgctggtgtctgccctggtgctgatggctatggtcaagcggaaggacagccgggga

SEQ ID NO: 40044 - DNA, 2343 bp, synthetic construct
  source 1..2343: mol_type = other DNA
atggccttaccagtgaccgccttgctcctgccgctggccttgctgctccacgccgccaggccggaagtgcaactggtggaatctggaggctctctggtgcagccagggggaagcctgagactgtcttgtgccgcttccggcttcaccttcgacgactacgccatgagctgggtgcgccaggtgccaggcaaaggcctggaatgggtgtccagcatcaactggagcggcacccacaccgattacgccgactccgtgaaaggcagattcacaatcagcagaaacaacgccaacaataccctgtacctgcagatgaactccctgaagtctgaggatacagcagtgtattattgcgccaagaactggcgggacgccggcaccacttggtttgagaaaagcggctctgccggacagggaacccaagtgacagtgtcctccggtaccggcggaggcggatctggcggcggaggtagcggtggcggaggatctgaattcgacatccagatgacacagagcccctctagcctgtctgccagcgtgggagacagagtgaccatcacctgtagagccagccagagcatcagaaactacctgaactggtatcagcaaaagcccggcaaggcccctgagctgctgattcatgctgcaagcagcctccagagcggcgtgccaagcagattttctggcagcggcagcggaaccgacttcaccctgacaatatctagcctccagcctgaggacttcgccagctactactgccagcagagctacagcgcccctcctatcacctttggacagggcaccagactggaaatcaagctcgagatccagaaccctgatcctgccgtgtaccagctgcgggatagcaagagcagcgacaagagcgtgtgtctgttcaccgacttcgacagccagaccaacgtgtcccagagcaaggactccgacgtgtacatcaccgataagtgcgtgctggacatgcggagcatggacttcaagagcaactccgccgtggcctggtccaacaagtccgatttcgcctgcgccaacgccttcaacaacagcattatccccgaggacacattcttcccaagccccgagagcagctgcggctttaccagcgagagctaccagcagggcgtgctgagcgccaccatcctgtacgagatcctgctgggcaaggccaccctgtacgccgtgctggtgtctgccctggtgctgatggctatggtcaagcggaaggacagccggggacgcgccaagagaagcggatctggcgtgaagcagaccctgaatttcgacctgctgaagctggctggcgacgtggaatccaacccaggccctactagtatggactggatttggcgcatccttttccttgtcggcgctgctaccggcgcgcattccttcgaacaggttcagctccagcagtctggacctggcctggtcaagcctagccagacactgtctctgacctgtgccatcagcggcgatagcgtgtcctctaatagagccgcctggaactggatcagacagagccctagcagaggactccagtggctgggcagaacctactaccgcagcaagtggtacaacgactacgccgtgtctctgcggagccggatcaccatcaatcccgtgaccagcaagaaccaggtggccctgcacatgaacagcgtgacccctgaagataccgccgtgtactactgtgccagagccggaattgtggtggtgcccggacctgagacattctactactacgaccacggcctggacgtgtggggccagggaacaacagtgactgtctcttctacgcgtgaggacctgaagaacgtgttcccacctgaggtggccgtgttcgagcctagcgaggccgagatcagccacacccagaaagccaccctcgtgtgcctggctaccggcttctaccccgaccatgtggaactgtcttggtgggtcaacggcaaagaggtgcacagcggcgtgtgtaccgacccccagccactgaaagaacagcccgccctgaacgacagccggtactgcctgagcagcagactgagagtgtccgccaccttctggcagaacccccggaaccacttcagatgccaggtgcagttctacggcctgagcgagaacgacgagtggacccaggacagagccaagcccgtgacccagatcgtgtctgccgaagcctggggcagagccgattgcgacgtgaagctggtggaaaagagcttcgagacagacaccaacctgaacttccagaacctgagcgtgatcggcttcagaatcctgctgctgaaagtggccggctttaacctgctgatgaccctgcggctgtggtccagc

SEQ ID NO: 40045 - DNA, 2325 bp, synthetic construct
  source 1..2325: mol_type = other DNA
atggccttaccagtgaccgccttgctcctgccgctggccttgctgctccacgccgccaggccggaagttcagctgcttgagtctggcggaggactggttcaacctggcggaagcctgagactgtcttgtgccgccagcggcttcatcttcagcagctacgccatgagctgggtccgacaggctcctggaaagggccaagaatgggtttccggcgttagcggcacaggcgtgaacacctactacgccgatagcgtgaagggcagattcaccatcagccgggacaacagcaagaacaccctgtacctccagatgaacagcctgagagccgaggacaccgccgtgtactattgtgcctctggcaaaggctgggacagcggctcttggtacgaggactatagaggccagggcaccctggtcacagtttcttcaggtaccggcggaggcggatctggcggcggaggtagcggtggcggaggatctgaattcgacatccagatgacacagagcccctctagcctgtctgccagcgtgggagacagagtgaccatcacctgtagagccagccagagcatcagaaactacctgaactggtatcagcaaaagcccggcaaggcccctgagctgctgattcatgctgcaagcagcctccagagcggcgtgccaagcagattttctggcagcggcagcggaaccgacttcaccctgacaatatctagcctccagcctgaggacttcgccagctactactgccagcagagctacagcgcccctcctatcacctttggacagggcaccagactggaaatcaagctcgaggacctgaagaacgtgttcccacctgaggtggccgtgttcgagcctagcgaggccgagatcagccacacccagaaagccaccctcgtgtgcctggctaccggcttctaccccgaccatgtggaactgtcttggtgggtcaacggcaaagaggtgcacagcggcgtgtgtaccgacccccagccactgaaagaacagcccgccctgaacgacagccggtactgcctgagcagcagactgagagtgtccgccaccttctggcagaacccccggaaccacttcagatgccaggtgcagttctacggcctgagcgagaacgacgagtggacccaggacagagccaagcccgtgacccagatcgtgtctgccgaagcctggggcagagccgattgcgacgtgaagctggtggaaaagagcttcgagacagacaccaacctgaacttccagaacctgagcgtgatcggcttcagaatcctgctgctgaaagtggccggctttaacctgctgatgaccctgcggctgtggtccagcagggccaagcgatctggatctggagcaacaaacttctcactactcaaacaagcaggtgacgtggaggagaatcccgggcctactagtatggactggatttggcgcatccttttccttgtcggcgctgctaccggcgcgcattccttcgaacaggttcagctccagcagtctggacctggcctggtcaagcctagccagacactgtctctgacctgtgccatcagcggcgatagcgtgtcctctaatagagccgcctggaactggatcagacagagccctagcagaggactccagtggctgggcagaacctactaccgcagcaagtggtacaacgactacgccgtgtctctgcggagccggatcaccatcaatcccgtgaccagcaagaaccaggtggccctgcacatgaacagcgtgacccctgaagataccgccgtgtactactgtgccagagccggaattgtggtggtgcccggacctgagacattctactactacgaccacggcctggacgtgtggggccagggaacaacagtgactgtctcttctacgcgtatccagaaccctgatcctgccgtgtaccagctgcgggatagcaagagcagcgacaagagcgtgtgtctgttcaccgacttcgacagccagaccaacgtgtcccagagcaaggactccgacgtgtacatcaccgataagtgcgtgctggacatgcggagcatggacttcaagagcaactccgccgtggcctggtccaacaagtccgatttcgcctgcgccaacgccttcaacaacagcattatccccgaggacacattcttcccaagccccgagagcagctgcggctttaccagcgagagctaccagcagggcgtgctgagcgccaccatcctgtacgagatcctgctgggcaaggccaccctgtacgccgtgctggtgtctgccctggtgctgatggctatggtcaagcggaaggacagccgggga

SEQ ID NO: 40046 - DNA, 2337 bp, synthetic construct
  source 1..2337: mol_type = other DNA
atggccttaccagtgaccgccttgctcctgccgctggccttgctgctccacgccgccaggccggaagttcagctgcttgagtctggcggaggactggttcaacctggcggaagcctgagactgtcttgtgccgccagcggcttcatcttcagcagctacgccatgagctgggtccgacaggctcctggaaagggccaagaatgggtttccggcgttagcggcacaggcgtgaacacctactacgccgatagcgtgaagggcagattcaccatcagccgggacaacagcaagaacaccctgtacctccagatgaacagcctgagagccgaggacaccgccgtgtactattgtgcctctggcaaaggctgggacagcggctcttggtacgaggactatagaggccagggcaccctggtcacagtttcttcaggtaccggcggaggcggatctggcggcggaggtagcggtggcggaggatctgaattcgacatccagatgacacagagcccctctagcctgtctgccagcgtgggagacagagtgaccatcacctgtagagccagccagagcatcagaaactacctgaactggtatcagcaaaagcccggcaaggcccctgagctgctgattcatgctgcaagcagcctccagagcggcgtgccaagcagattttctggcagcggcagcggaaccgacttcaccctgacaatatctagcctccagcctgaggacttcgccagctactactgccagcagagctacagcgcccctcctatcacctttggacagggcaccagactggaaatcaagctcgagatccagaaccctgatcctgccgtgtaccagctgcgggatagcaagagcagcgacaagagcgtgtgtctgttcaccgacttcgacagccagaccaacgtgtcccagagcaaggactccgacgtgtacatcaccgataagtgcgtgctggacatgcggagcatggacttcaagagcaactccgccgtggcctggtccaacaagtccgatttcgcctgcgccaacgccttcaacaacagcattatccccgaggacacattcttcccaagccccgagagcagctgcggctttaccagcgagagctaccagcagggcgtgctgagcgccaccatcctgtacgagatcctgctgggcaaggccaccctgtacgccgtgctggtgtctgccctggtgctgatggctatggtcaagcggaaggacagccggggacgcgccaagagaagcggatctggcgtgaagcagaccctgaatttcgacctgctgaagctggctggcgacgtggaatccaacccaggccctactagtatggactggatttggcgcatccttttccttgtcggcgctgctaccggcgcgcattccttcgaacaggttcagctccagcagtctggacctggcctggtcaagcctagccagacactgtctctgacctgtgccatcagcggcgatagcgtgtcctctaatagagccgcctggaactggatcagacagagccctagcagaggactccagtggctgggcagaacctactaccgcagcaagtggtacaacgactacgccgtgtctctgcggagccggatcaccatcaatcccgtgaccagcaagaaccaggtggccctgcacatgaacagcgtgacccctgaagataccgccgtgtactactgtgccagagccggaattgtggtggtgcccggacctgagacattctactactacgaccacggcctggacgtgtggggccagggaacaacagtgactgtctcttctacgcgtgaggacctgaagaacgtgttcccacctgaggtggccgtgttcgagcctagcgaggccgagatcagccacacccagaaagccaccctcgtgtgcctggctaccggcttctaccccgaccatgtggaactgtcttggtgggtcaacggcaaagaggtgcacagcggcgtgtgtaccgacccccagccactgaaagaacagcccgccctgaacgacagccggtactgcctgagcagcagactgagagtgtccgccaccttctggcagaacccccggaaccacttcagatgccaggtgcagttctacggcctgagcgagaacgacgagtggacccaggacagagccaagcccgtgacccagatcgtgtctgccgaagcctggggcagagccgattgcgacgtgaagctggtggaaaagagcttcgagacagacaccaacctgaacttccagaacctgagcgtgatcggcttcagaatcctgctgctgaaagtggccggctttaacctgctgatgaccctgcggctgtggtccagc

SEQ ID NO: 40047 - DNA, 2229 bp, synthetic construct
  source 1..2229: mol_type = other DNA
atggccttaccagtgaccgccttgctcctgccgctggccttgctgctccacgccgccaggccgatgctgcccgctcctaagaatctggtggtgtccagaatcaccgaggacagcgccagactgtcttggacagctcctgatgccgccttcgacagcttccccatccggtacatcgagacactgatctggggcgaagccatctggctggatgtgcctggaagcgagagaagctacgacctgaccggactgaagcctggcacagagtatgccgtggtcatcaccggcgtgaaaggcggcagattctctagccctctggtggcctctttcaccaccggtaccggcggaggcggatctggcggcggaggtagcggtggcggaggatctgaattcgacatccagatgacacagagcccctctagcctgtctgccagcgtgggagacagagtgaccatcacctgtagagccagccagagcatcagaaactacctgaactggtatcagcaaaagcccggcaaggcccctgagctgctgattcatgctgcaagcagcctccagagcggcgtgccaagcagattttctggcagcggcagcggaaccgacttcaccctgacaatatctagcctccagcctgaggacttcgccagctactactgccagcagagctacagcgcccctcctatcacctttggacagggcaccagactggaaatcaagctcgaggacctgaagaacgtgttcccacctgaggtggccgtgttcgagcctagcgaggccgagatcagccacacccagaaagccaccctcgtgtgcctggctaccggcttctaccccgaccatgtggaactgtcttggtgggtcaacggcaaagaggtgcacagcggcgtgtgtaccgacccccagccactgaaagaacagcccgccctgaacgacagccggtactgcctgagcagcagactgagagtgtccgccaccttctggcagaacccccggaaccacttcagatgccaggtgcagttctacggcctgagcgagaacgacgagtggacccaggacagagccaagcccgtgacccagatcgtgtctgccgaagcctggggcagagccgattgcgacgtgaagctggtggaaaagagcttcgagacagacaccaacctgaacttccagaacctgagcgtgatcggcttcagaatcctgctgctgaaagtggccggctttaacctgctgatgaccctgcggctgtggtccagcagggccaagcgatctggatctggagcaacaaacttctcactactcaaacaagcaggtgacgtggaggagaatcccgggcctactagtatggactggatttggcgcatccttttccttgtcggcgctgctaccggcgcgcattccttcgaacaggttcagctccagcagtctggacctggcctggtcaagcctagccagacactgtctctgacctgtgccatcagcggcgatagcgtgtcctctaatagagccgcctggaactggatcagacagagccctagcagaggactccagtggctgggcagaacctactaccgcagcaagtggtacaacgactacgccgtgtctctgcggagccggatcaccatcaatcccgtgaccagcaagaaccaggtggccctgcacatgaacagcgtgacccctgaagataccgccgtgtactactgtgccagagccggaattgtggtggtgcccggacctgagacattctactactacgaccacggcctggacgtgtggggccagggaacaacagtgactgtctcttctacgcgtatccagaaccctgatcctgccgtgtaccagctgcgggatagcaagagcagcgacaagagcgtgtgtctgttcaccgacttcgacagccagaccaacgtgtcccagagcaaggactccgacgtgtacatcaccgataagtgcgtgctggacatgcggagcatggacttcaagagcaactccgccgtggcctggtccaacaagtccgatttcgcctgcgccaacgccttcaacaacagcattatccccgaggacacattcttcccaagccccgagagcagctgcggctttaccagcgagagctaccagcagggcgtgctgagcgccaccatcctgtacgagatcctgctgggcaaggccaccctgtacgccgtgctggtgtctgccctggtgctgatggctatggtcaagcggaaggacagccgggga

SEQ ID NO: 40048 - DNA, 2241 bp, synthetic construct
  source 1..2241: mol_type = other DNA
atggccttaccagtgaccgccttgctcctgccgctggccttgctgctccacgccgccaggccgatgctgcccgctcctaagaatctggtggtgtccagaatcaccgaggacagcgccagactgtcttggacagctcctgatgccgccttcgacagcttccccatccggtacatcgagacactgatctggggcgaagccatctggctggatgtgcctggaagcgagagaagctacgacctgaccggactgaagcctggcacagagtatgccgtggtcatcaccggcgtgaaaggcggcagattctctagccctctggtggcctctttcaccaccggtaccggcggaggcggatctggcggcggaggtagcggtggcggaggatctgaattcgacatccagatgacacagagcccctctagcctgtctgccagcgtgggagacagagtgaccatcacctgtagagccagccagagcatcagaaactacctgaactggtatcagcaaaagcccggcaaggcccctgagctgctgattcatgctgcaagcagcctccagagcggcgtgccaagcagattttctggcagcggcagcggaaccgacttcaccctgacaatatctagcctccagcctgaggacttcgccagctactactgccagcagagctacagcgcccctcctatcacctttggacagggcaccagactggaaatcaagctcgagatccagaaccctgatcctgccgtgtaccagctgcgggatagcaagagcagcgacaagagcgtgtgtctgttcaccgacttcgacagccagaccaacgtgtcccagagcaaggactccgacgtgtacatcaccgataagtgcgtgctggacatgcggagcatggacttcaagagcaactccgccgtggcctggtccaacaagtccgatttcgcctgcgccaacgccttcaacaacagcattatccccgaggacacattcttcccaagccccgagagcagctgcggctttaccagcgagagctaccagcagggcgtgctgagcgccaccatcctgtacgagatcctgctgggcaaggccaccctgtacgccgtgctggtgtctgccctggtgctgatggctatggtcaagcggaaggacagccggggacgcgccaagagaagcggatctggcgtgaagcagaccctgaatttcgacctgctgaagctggctggcgacgtggaatccaacccaggccctactagtatggactggatttggcgcatccttttccttgtcggcgctgctaccggcgcgcattccttcgaacaggttcagctccagcagtctggacctggcctggtcaagcctagccagacactgtctctgacctgtgccatcagcggcgatagcgtgtcctctaatagagccgcctggaactggatcagacagagccctagcagaggactccagtggctgggcagaacctactaccgcagcaagtggtacaacgactacgccgtgtctctgcggagccggatcaccatcaatcccgtgaccagcaagaaccaggtggccctgcacatgaacagcgtgacccctgaagataccgccgtgtactactgtgccagagccggaattgtggtggtgcccggacctgagacattctactactacgaccacggcctggacgtgtggggccagggaacaacagtgactgtctcttctacgcgtgaggacctgaagaacgtgttcccacctgaggtggccgtgttcgagcctagcgaggccgagatcagccacacccagaaagccaccctcgtgtgcctggctaccggcttctaccccgaccatgtggaactgtcttggtgggtcaacggcaaagaggtgcacagcggcgtgtgtaccgacccccagccactgaaagaacagcccgccctgaacgacagccggtactgcctgagcagcagactgagagtgtccgccaccttctggcagaacccccggaaccacttcagatgccaggtgcagttctacggcctgagcgagaacgacgagtggacccaggacagagccaagcccgtgacccagatcgtgtctgccgaagcctggggcagagccgattgcgacgtgaagctggtggaaaagagcttcgagacagacaccaacctgaacttccagaacctgagcgtgatcggcttcagaatcctgctgctgaaagtggccggctttaacctgctgatgaccctgcggctgtggtccagc

SEQ ID NO: 40049 - DNA, 2316 bp, synthetic construct
  source 1..2316: mol_type = other DNA
atggccttaccagtgaccgccttgctcctgccgctggccttgctgctccacgccgccaggccggaggtgcagctggttgaatctggcggaggactggttcagcctggcggatctctgagactgtcttgtgccgccagcggcttcaacatcaaggatacctgtatcggctgggttcgcagagcccctggcaaagaggaagaactggtcgccaaaatctgcaagtacagcggccacaccagatacgccgacagcgtgaagggcagattcaccatcagcgccgacaccagcaagaacaccgcctacctccagatgaacagcctgagagccgaggacaccgccgtgtactattgtgccgctgtgtccgtcagagatgggcactacaattactggggccagggcaccaccgtgaccgtttcttcaggtaccggcggaggcggatctggcggcggaggtagcggtggcggaggatctgaattcgacatccagatgacacagagcccctctagcctgtctgccagcgtgggagacagagtgaccatcacctgtagagccagccagagcatcagaaactacctgaactggtatcagcaaaagcccggcaaggcccctgagctgctgattcatgctgcaagcagcctccagagcggcgtgccaagcagattttctggcagcggcagcggaaccgacttcaccctgacaatatctagcctccagcctgaggacttcgccagctactactgccagcagagctacagcgcccctcctatcacctttggacagggcaccagactggaaatcaagctcgaggacctgaagaacgtgttcccacctgaggtggccgtgttcgagcctagcgaggccgagatcagccacacccagaaagccaccctcgtgtgcctggctaccggcttctaccccgaccatgtggaactgtcttggtgggtcaacggcaaagaggtgcacagcggcgtgtgtaccgacccccagccactgaaagaacagcccgccctgaacgacagccggtactgcctgagcagcagactgagagtgtccgccaccttctggcagaacccccggaaccacttcagatgccaggtgcagttctacggcctgagcgagaacgacgagtggacccaggacagagccaagcccgtgacccagatcgtgtctgccgaagcctggggcagagccgattgcgacgtgaagctggtggaaaagagcttcgagacagacaccaacctgaacttccagaacctgagcgtgatcggcttcagaatcctgctgctgaaagtggccggctttaacctgctgatgaccctgcggctgtggtccagcagggccaagcgatctggatctggagcaacaaacttctcactactcaaacaagcaggtgacgtggaggagaatcccgggcctactagtatggactggatttggcgcatccttttccttgtcggcgctgctaccggcgcgcattccttcgaacaggttcagctccagcagtctggacctggcctggtcaagcctagccagacactgtctctgacctgtgccatcagcggcgatagcgtgtcctctaatagagccgcctggaactggatcagacagagccctagcagaggactccagtggctgggcagaacctactaccgcagcaagtggtacaacgactacgccgtgtctctgcggagccggatcaccatcaatcccgtgaccagcaagaaccaggtggccctgcacatgaacagcgtgacccctgaagataccgccgtgtactactgtgccagagccggaattgtggtggtgcccggacctgagacattctactactacgaccacggcctggacgtgtggggccagggaacaacagtgactgtctcttctacgcgtatccagaaccctgatcctgccgtgtaccagctgcgggatagcaagagcagcgacaagagcgtgtgtctgttcaccgacttcgacagccagaccaacgtgtcccagagcaaggactccgacgtgtacatcaccgataagtgcgtgctggacatgcggagcatggacttcaagagcaactccgccgtggcctggtccaacaagtccgatttcgcctgcgccaacgccttcaacaacagcattatccccgaggacacattcttcccaagccccgagagcagctgcggctttaccagcgagagctaccagcagggcgtgctgagcgccaccatcctgtacgagatcctgctgggcaaggccaccctgtacgccgtgctggtgtctgccctggtgctgatggctatggtcaagcggaaggacagccgggga

SEQ ID NO: 40050 - DNA, 2328 bp, synthetic construct
  source 1..2328: mol_type = other DNA
atggccttaccagtgaccgccttgctcctgccgctggccttgctgctccacgccgccaggccggaggtgcagctggttgaatctggcggaggactggttcagcctggcggatctctgagactgtcttgtgccgccagcggcttcaacatcaaggatacctgtatcggctgggttcgcagagcccctggcaaagaggaagaactggtcgccaaaatctgcaagtacagcggccacaccagatacgccgacagcgtgaagggcagattcaccatcagcgccgacaccagcaagaacaccgcctacctccagatgaacagcctgagagccgaggacaccgccgtgtactattgtgccgctgtgtccgtcagagatgggcactacaattactggggccagggcaccaccgtgaccgtttcttcaggtaccggcggaggcggatctggcggcggaggtagcggtggcggaggatctgaattcgacatccagatgacacagagcccctctagcctgtctgccagcgtgggagacagagtgaccatcacctgtagagccagccagagcatcagaaactacctgaactggtatcagcaaaagcccggcaaggcccctgagctgctgattcatgctgcaagcagcctccagagcggcgtgccaagcagattttctggcagcggcagcggaaccgacttcaccctgacaatatctagcctccagcctgaggacttcgccagctactactgccagcagagctacagcgcccctcctatcacctttggacagggcaccagactggaaatcaagctcgagatccagaaccctgatcctgccgtgtaccagctgcgggatagcaagagcagcgacaagagcgtgtgtctgttcaccgacttcgacagccagaccaacgtgtcccagagcaaggactccgacgtgtacatcaccgataagtgcgtgctggacatgcggagcatggacttcaagagcaactccgccgtggcctggtccaacaagtccgatttcgcctgcgccaacgccttcaacaacagcattatccccgaggacacattcttcccaagccccgagagcagctgcggctttaccagcgagagctaccagcagggcgtgctgagcgccaccatcctgtacgagatcctgctgggcaaggccaccctgtacgccgtgctggtgtctgccctggtgctgatggctatggtcaagcggaaggacagccggggacgcgccaagagaagcggatctggcgtgaagcagaccctgaatttcgacctgctgaagctggctggcgacgtggaatccaacccaggccctactagtatggactggatttggcgcatccttttccttgtcggcgctgctaccggcgcgcattccttcgaacaggttcagctccagcagtctggacctggcctggtcaagcctagccagacactgtctctgacctgtgccatcagcggcgatagcgtgtcctctaatagagccgcctggaactggatcagacagagccctagcagaggactccagtggctgggcagaacctactaccgcagcaagtggtacaacgactacgccgtgtctctgcggagccggatcaccatcaatcccgtgaccagcaagaaccaggtggccctgcacatgaacagcgtgacccctgaagataccgccgtgtactactgtgccagagccggaattgtggtggtgcccggacctgagacattctactactacgaccacggcctggacgtgtggggccagggaacaacagtgactgtctcttctacgcgtgaggacctgaagaacgtgttcccacctgaggtggccgtgttcgagcctagcgaggccgagatcagccacacccagaaagccaccctcgtgtgcctggctaccggcttctaccccgaccatgtggaactgtcttggtgggtcaacggcaaagaggtgcacagcggcgtgtgtaccgacccccagccactgaaagaacagcccgccctgaacgacagccggtactgcctgagcagcagactgagagtgtccgccaccttctggcagaacccccggaaccacttcagatgccaggtgcagttctacggcctgagcgagaacgacgagtggacccaggacagagccaagcccgtgacccagatcgtgtctgccgaagcctggggcagagccgattgcgacgtgaagctggtggaaaagagcttcgagacagacaccaacctgaacttccagaacctgagcgtgatcggcttcagaatcctgctgctgaaagtggccggctttaacctgctgatgaccctgcggctgtggtccagc

SEQ ID NO: 40051 - DNA, 3432 bp, synthetic construct
  source 1..3432: mol_type = other DNA
atggccttaccagtgaccgccttgctcctgccgctggccttgctgctccacgccgccaggccggaagtgcagctggttgaatctggcggaggactggttcaggctggcggatctctgagactgtcttgtgccgccagcggcagaacctttagcatgggctggtttagacaggcccctggcaaagagagagagttcgtcgccgccatcacatactctggcggcagcccttactacgccgactctgtgaagggcagattcaccatcagccgggacaacgccaagaacaccgtgtacctccagatgaacagcctgaagcctgaggacaccgccgtgtactactgcgccgccaatccaacatacggcagcgactggaacgccgagaattggggccagggaacccaagtgacagtgtctagcggtaccggcggaggcggatctggcggcggaggtagcggtggcggaggatctgaattcgacatccagatgacacagagcccctctagcctgtctgccagcgtgggagacagagtgaccatcacctgtagagccagccagagcatcagaaactacctgaactggtatcagcaaaagcccggcaaggcccctgagctgctgattcatgctgcaagcagcctccagagcggcgtgccaagcagattttctggcagcggcagcggaaccgacttcaccctgacaatatctagcctccagcctgaggacttcgccagctactactgccagcagagctacagcgcccctcctatcacctttggacagggcaccagactggaaatcaagctcgaggacctgaagaacgtgttcccacctgaggtggccgtgttcgagcctagcgaggccgagatcagccacacccagaaagccaccctcgtgtgcctggctaccggcttctaccccgaccatgtggaactgtcttggtgggtcaacggcaaagaggtgcacagcggcgtgtgtaccgacccccagccactgaaagaacagcccgccctgaacgacagccggtactgcctgagcagcagactgagagtgtccgccaccttctggcagaacccccggaaccacttcagatgccaggtgcagttctacggcctgagcgagaacgacgagtggacccaggacagagccaagcccgtgacccagatcgtgtctgccgaagcctggggcagagccgattgcgacgtgaagctggtggaaaagagcttcgagacagacaccaacctgaacttccagaacctgagcgtgatcggcttcagaatcctgctgctgaaagtggccggctttaacctgctgatgaccctgcggctgtggtccagcagggccaagcgatctggatctggagcaacaaacttctcactactcaaacaagcaggtgacgtggaggagaatcccgggcctactagtgccaccatggactggatttggcgcatccttttccttgtcggcgctgctaccggcgcccattccgggcccgaagtgcaactggttgaatccggtggcggcctggtgcaagcaggcggatctctcagacttagctgtgccgcctccggcagaaccttcacaatgggatggtttaggcaggctccagggaaagagagagagttcgtcgccgccatctctctgtctcccacactggcctactacgccgactctgtgaaaggccggttcaccatctccagagataatgccaagaacaccgtggtgctgcaaatgaactctctgaaacccgaggatacagccctgtactattgtgccgctgaccggaagtccgtgatgagcatcagacccgattactggggacagggcacacaagtcacagtgtcctctggatccggcggcggaggatctggcggaggcggatctgggggcggaggctctttcgaacaggttcagctccagcagtctggacctggcctggtcaagcctagccagacactgtctctgacctgtgccatcagcggcgatagcgtgtcctctaatagagccgcctggaactggatcagacagagccctagcagaggactccagtggctgggcagaacctactaccgcagcaagtggtacaacgactacgccgtgtctctgcggagccggatcaccatcaatcccgtgaccagcaagaaccaggtggccctgcacatgaacagcgtgacccctgaagataccgccgtgtactactgtgccagagccggaattgtggtggtgcccggacctgagacattctactactacgaccacggcctggacgtgtggggccagggaacaacagtgactgtctcttctacgcgtatccagaaccctgatcctgccgtgtaccagctgcgggatagcaagagcagcgacaagagcgtgtgtctgttcaccgacttcgacagccagaccaacgtgtcccagagcaaggactccgacgtgtacatcaccgataagtgcgtgctggacatgcggagcatggacttcaagagcaactccgccgtggcctggtccaacaagtccgatttcgcctgcgccaacgccttcaacaacagcattatccccgaggacacattcttcccaagccccgagagcagctgcggctttaccagcgagagctaccagcagggcgtgctgagcgccaccatcctgtacgagatcctgctgggcaaggccaccctgtacgccgtgctggtgtctgccctggtgctgatggctatggtcaagcggaaggacagccggggacgcgccaagagaagcggatctggcgtgaagcagaccctgaatttcgacctgctgaagctggctggcgacgtggaatccaacccaggcccttctagaggccatatgaccgagtacaagcccacggtgcgcctcgccacccgcgacgacgtccccagggccgtacgcaccctcgccgccgcgttcgccgactaccccgccacgcgccacaccgtcgatccggaccgccacatcgagcgggtcaccgagctgcaagaactcttcctcacgcgcgtcgggctcgacatcggcaaggtgtgggtcgcggacgacggcgccgcggtggcggtctggaccacgccggagagcgtcgaagcgggggcggtgttcgccgagatcggcccgcgcatggccgagttgagcggttcccggctggccgcgcagcaacagatggaaggcctcctggcgccgcaccggcccaaggagcccgcgtggttcctggccaccgtcggcgtctcgcccgaccaccagggcaagggtctgggcagcgccgtcgtgctccccggagtggaggcggccgagcgcgccggggtgcccgccttcctggagacctccgcgccccgcaacctccccttctacgagcggctcggcttcaccgtcaccgccgacgtcgaggtgcccgaaggaccgcgcacctggtgcatgacccgcaagcccggtgcctga

SEQ ID NO: 40052 - DNA, 2346 bp, synthetic construct
  source 1..2346: mol_type = other DNA
atggccttaccagtgaccgccttgctcctgccgctggccttgctgctccacgccgccaggccggaagtgcagctggttgaatctggcggaggactggttcagcctggcggatctctgagactgtcttgtgccgcctctggcttcgccagcgactactatatcatcggctggttcagacaggcccctggcaaagagagagagggcgtcagctgtatcagcagcagatacgccaacaccaactacgccgacagcgtgaagggcagattcaccatcagccgggacaacgccaagaacaccgtgtacctccagatgaacagcctgaagcctgaggacaccgccgtgtactactgtgccgccgacaccagaagatacacctgtcctgacattgccaccatgcaccggaacttcgattcttggggccagggcacactggtcaccgtttcttctggtaccggcggaggcggatctggcggcggaggtagcggtggcggaggatctgaattcgacatccagatgacacagagcccctctagcctgtctgccagcgtgggagacagagtgaccatcacctgtagagccagccagagcatcagaaactacctgaactggtatcagcaaaagcccggcaaggcccctgagctgctgattcatgctgcaagcagcctccagagcggcgtgccaagcagattttctggcagcggcagcggaaccgacttcaccctgacaatatctagcctccagcctgaggacttcgccagctactactgccagcagagctacagcgcccctcctatcacctttggacagggcaccagactggaaatcaagctcgaggacctgaagaacgtgttcccacctgaggtggccgtgttcgagcctagcgaggccgagatcagccacacccagaaagccaccctcgtgtgcctggctaccggcttctaccccgaccatgtggaactgtcttggtgggtcaacggcaaagaggtgcacagcggcgtgtgtaccgacccccagccactgaaagaacagcccgccctgaacgacagccggtactgcctgagcagcagactgagagtgtccgccaccttctggcagaacccccggaaccacttcagatgccaggtgcagttctacggcctgagcgagaacgacgagtggacccaggacagagccaagcccgtgacccagatcgtgtctgccgaagcctggggcagagccgattgcgacgtgaagctggtggaaaagagcttcgagacagacaccaacctgaacttccagaacctgagcgtgatcggcttcagaatcctgctgctgaaagtggccggctttaacctgctgatgaccctgcggctgtggtccagcagggccaagcgatctggatctggagcaacaaacttctcactactcaaacaagcaggtgacgtggaggagaatcccgggcctactagtatggactggatttggcgcatccttttccttgtcggcgctgctaccggcgcgcattccttcgaacaggttcagctccagcagtctggacctggcctggtcaagcctagccagacactgtctctgacctgtgccatcagcggcgatagcgtgtcctctaatagagccgcctggaactggatcagacagagccctagcagaggactccagtggctgggcagaacctactaccgcagcaagtggtacaacgactacgccgtgtctctgcggagccggatcaccatcaatcccgtgaccagcaagaaccaggtggccctgcacatgaacagcgtgacccctgaagataccgccgtgtactactgtgccagagccggaattgtggtggtgcccggacctgagacattctactactacgaccacggcctggacgtgtggggccagggaacaacagtgactgtctcttctacgcgtatccagaaccctgatcctgccgtgtaccagctgcgggatagcaagagcagcgacaagagcgtgtgtctgttcaccgacttcgacagccagaccaacgtgtcccagagcaaggactccgacgtgtacatcaccgataagtgcgtgctggacatgcggagcatggacttcaagagcaactccgccgtggcctggtccaacaagtccgatttcgcctgcgccaacgccttcaacaacagcattatccccgaggacacattcttcccaagccccgagagcagctgcggctttaccagcgagagctaccagcagggcgtgctgagcgccaccatcctgtacgagatcctgctgggcaaggccaccctgtacgccgtgctggtgtctgccctggtgctgatggctatggtcaagcggaaggacagccggggataa

SEQ ID NO: 40053 - DNA, 2346 bp, synthetic construct
  source 1..2346: mol_type = other DNA
atggccttaccagtgaccgccttgctcctgccgctggccttgctgctccacgccgccaggccggaagtgcagctggttgaatctggcggaggactggttcagcctggcggatctctgagactgagctgtgaagccagcggcttcgccagcgacgattacatcatcggctggttcagacaggcccctggcaaagagagagagggcgtcagctgcatcagctctaagtacgccaacaccgtgtacaccgacagcgtgaagggcagattcagactgagcagaggcaccgccaagaataccgtgtacctccagatgagcgccctgaagcctgaggataccgccgtgtactactgcgctatggacagccgcagagtgacatgccctgagatcagcaccatgcaccggaacttcgattcttggggccagggcacactggtcacagtgtcatctggtaccggcggaggcggatctggcggcggaggtagcggtggcggaggatctgaattcgacatccagatgacacagagcccctctagcctgtctgccagcgtgggagacagagtgaccatcacctgtagagccagccagagcatcagaaactacctgaactggtatcagcaaaagcccggcaaggcccctgagctgctgattcatgctgcaagcagcctccagagcggcgtgccaagcagattttctggcagcggcagcggaaccgacttcaccctgacaatatctagcctccagcctgaggacttcgccagctactactgccagcagagctacagcgcccctcctatcacctttggacagggcaccagactggaaatcaagctcgaggacctgaagaacgtgttcccacctgaggtggccgtgttcgagcctagcgaggccgagatcagccacacccagaaagccaccctcgtgtgcctggctaccggcttctaccccgaccatgtggaactgtcttggtgggtcaacggcaaagaggtgcacagcggcgtgtgtaccgacccccagccactgaaagaacagcccgccctgaacgacagccggtactgcctgagcagcagactgagagtgtccgccaccttctggcagaacccccggaaccacttcagatgccaggtgcagttctacggcctgagcgagaacgacgagtggacccaggacagagccaagcccgtgacccagatcgtgtctgccgaagcctggggcagagccgattgcgacgtgaagctggtggaaaagagcttcgagacagacaccaacctgaacttccagaacctgagcgtgatcggcttcagaatcctgctgctgaaagtggccggctttaacctgctgatgaccctgcggctgtggtccagcagggccaagcgatctggatctggagcaacaaacttctcactactcaaacaagcaggtgacgtggaggagaatcccgggcctactagtatggactggatttggcgcatccttttccttgtcggcgctgctaccggcgcgcattccttcgaacaggttcagctccagcagtctggacctggcctggtcaagcctagccagacactgtctctgacctgtgccatcagcggcgatagcgtgtcctctaatagagccgcctggaactggatcagacagagccctagcagaggactccagtggctgggcagaacctactaccgcagcaagtggtacaacgactacgccgtgtctctgcggagccggatcaccatcaatcccgtgaccagcaagaaccaggtggccctgcacatgaacagcgtgacccctgaagataccgccgtgtactactgtgccagagccggaattgtggtggtgcccggacctgagacattctactactacgaccacggcctggacgtgtggggccagggaacaacagtgactgtctcttctacgcgtatccagaaccctgatcctgccgtgtaccagctgcgggatagcaagagcagcgacaagagcgtgtgtctgttcaccgacttcgacagccagaccaacgtgtcccagagcaaggactccgacgtgtacatcaccgataagtgcgtgctggacatgcggagcatggacttcaagagcaactccgccgtggcctggtccaacaagtccgatttcgcctgcgccaacgccttcaacaacagcattatccccgaggacacattcttcccaagccccgagagcagctgcggctttaccagcgagagctaccagcagggcgtgctgagcgccaccatcctgtacgagatcctgctgggcaaggccaccctgtacgccgtgctggtgtctgccctggtgctgatggctatggtcaagcggaaggacagccggggataa

SEQ ID NO: 40054 - DNA, 2343 bp, synthetic construct
  source 1..2343: mol_type = other DNA
atggccttaccagtgaccgccttgctcctgccgctggccttgctgctccacgccgccaggccggaagtgcagctggttgaatctggcggaggactggttcagcctggcggatctctgagactgtcttgtgccgcctctggcttcgccagcgactactatatcatcggctggttcagacaggcccctggcaaagagagagagggcgtcagctgtatcagcagcagatacgccaacaccaactacgccgacagcgtgaagggcagattcaccatcagccgggacaacgccaagaacaccgtgtacctccagatgaacagcctgaagcctgaggacaccgccgtgtactactgtgccgccgacaccagaagatacacctgtcctgacattgccaccatgcaccggaacttcgattcttggggccagggcacactggtcaccgtttcttctggtaccggcggaggcggatctggcggcggaggtagcggtggcggaggatctgaattcgacatccagatgacacagagcccctctagcctgtctgccagcgtgggagacagagtgaccatcacctgtagagccagccagagcatcagaaactacctgaactggtatcagcaaaagcccggcaaggcccctgagctgctgattcatgctgcaagcagcctccagagcggcgtgccaagcagattttctggcagcggcagcggaaccgacttcaccctgacaatatctagcctccagcctgaggacttcgccagctactactgccagcagagctacagcgcccctcctatcacctttggacagggcaccagactggaaatcaagctcgagatccagaaccctgatcctgccgtgtaccagctgcgggatagcaagagcagcgacaagagcgtgtgtctgttcaccgacttcgacagccagaccaacgtgtcccagagcaaggactccgacgtgtacatcaccgataagtgcgtgctggacatgcggagcatggacttcaagagcaactccgccgtggcctggtccaacaagtccgatttcgcctgcgccaacgccttcaacaacagcattatccccgaggacacattcttcccaagccccgagagcagctgcggctttaccagcgagagctaccagcagggcgtgctgagcgccaccatcctgtacgagatcctgctgggcaaggccaccctgtacgccgtgctggtgtctgccctggtgctgatggctatggtcaagcggaaggacagccggggaagggccaagcgatctggatctggagcaacaaacttctcactactcaaacaagcaggtgacgtggaggagaatcccgggcctactagtatggactggatttggcgcatccttttccttgtcggcgctgctaccggcgcgcattccttcgaacaggttcagctccagcagtctggacctggcctggtcaagcctagccagacactgtctctgacctgtgccatcagcggcgatagcgtgtcctctaatagagccgcctggaactggatcagacagagccctagcagaggactccagtggctgggcagaacctactaccgcagcaagtggtacaacgactacgccgtgtctctgcggagccggatcaccatcaatcccgtgaccagcaagaaccaggtggccctgcacatgaacagcgtgacccctgaagataccgccgtgtactactgtgccagagccggaattgtggtggtgcccggacctgagacattctactactacgaccacggcctggacgtgtggggccagggaacaacagtgactgtctcttctacgcgtgacctgaagaacgtgttcccacctgaggtggccgtgttcgagcctagcgaggccgagatcagccacacccagaaagccaccctcgtgtgcctggctaccggcttctaccccgaccatgtggaactgtcttggtgggtcaacggcaaagaggtgcacagcggcgtgtgtaccgacccccagccactgaaagaacagcccgccctgaacgacagccggtactgcctgagcagcagactgagagtgtccgccaccttctggcagaacccccggaaccacttcagatgccaggtgcagttctacggcctgagcgagaacgacgagtggacccaggacagagccaagcccgtgacccagatcgtgtctgccgaagcctggggcagagccgattgcgacgtgaagctggtggaaaagagcttcgagacagacaccaacctgaacttccagaacctgagcgtgatcggcttcagaatcctgctgctgaaagtggccggctttaacctgctgatgaccctgcggctgtggtccagc

SEQ ID NO: 40055 - DNA, 2343 bp, synthetic construct
  source 1..2343: mol_type = other DNA
atggccttaccagtgaccgccttgctcctgccgctggccttgctgctccacgccgccaggccggaagtgcagctggttgaatctggcggaggactggttcagcctggcggatctctgagactgagctgtgaagccagcggcttcgccagcgacgattacatcatcggctggttcagacaggcccctggcaaagagagagagggcgtcagctgcatcagctctaagtacgccaacaccgtgtacaccgacagcgtgaagggcagattcagactgagcagaggcaccgccaagaataccgtgtacctccagatgagcgccctgaagcctgaggataccgccgtgtactactgcgctatggacagccgcagagtgacatgccctgagatcagcaccatgcaccggaacttcgattcttggggccagggcacactggtcacagtgtcatctggtaccggcggaggcggatctggcggcggaggtagcggtggcggaggatctgaattcgacatccagatgacacagagcccctctagcctgtctgccagcgtgggagacagagtgaccatcacctgtagagccagccagagcatcagaaactacctgaactggtatcagcaaaagcccggcaaggcccctgagctgctgattcatgctgcaagcagcctccagagcggcgtgccaagcagattttctggcagcggcagcggaaccgacttcaccctgacaatatctagcctccagcctgaggacttcgccagctactactgccagcagagctacagcgcccctcctatcacctttggacagggcaccagactggaaatcaagctcgagatccagaaccctgatcctgccgtgtaccagctgcgggatagcaagagcagcgacaagagcgtgtgtctgttcaccgacttcgacagccagaccaacgtgtcccagagcaaggactccgacgtgtacatcaccgataagtgcgtgctggacatgcggagcatggacttcaagagcaactccgccgtggcctggtccaacaagtccgatttcgcctgcgccaacgccttcaacaacagcattatccccgaggacacattcttcccaagccccgagagcagctgcggctttaccagcgagagctaccagcagggcgtgctgagcgccaccatcctgtacgagatcctgctgggcaaggccaccctgtacgccgtgctggtgtctgccctggtgctgatggctatggtcaagcggaaggacagccggggaagggccaagcgatctggatctggagcaacaaacttctcactactcaaacaagcaggtgacgtggaggagaatcccgggcctactagtatggactggatttggcgcatccttttccttgtcggcgctgctaccggcgcgcattccttcgaacaggttcagctccagcagtctggacctggcctggtcaagcctagccagacactgtctctgacctgtgccatcagcggcgatagcgtgtcctctaatagagccgcctggaactggatcagacagagccctagcagaggactccagtggctgggcagaacctactaccgcagcaagtggtacaacgactacgccgtgtctctgcggagccggatcaccatcaatcccgtgaccagcaagaaccaggtggccctgcacatgaacagcgtgacccctgaagataccgccgtgtactactgtgccagagccggaattgtggtggtgcccggacctgagacattctactactacgaccacggcctggacgtgtggggccagggaacaacagtgactgtctcttctacgcgtgacctgaagaacgtgttcccacctgaggtggccgtgttcgagcctagcgaggccgagatcagccacacccagaaagccaccctcgtgtgcctggctaccggcttctaccccgaccatgtggaactgtcttggtgggtcaacggcaaagaggtgcacagcggcgtgtgtaccgacccccagccactgaaagaacagcccgccctgaacgacagccggtactgcctgagcagcagactgagagtgtccgccaccttctggcagaacccccggaaccacttcagatgccaggtgcagttctacggcctgagcgagaacgacgagtggacccaggacagagccaagcccgtgacccagatcgtgtctgccgaagcctggggcagagccgattgcgacgtgaagctggtggaaaagagcttcgagacagacaccaacctgaacttccagaacctgagcgtgatcggcttcagaatcctgctgctgaaagtggccggctttaacctgctgatgaccctgcggctgtggtccagc

SEQ ID NO: 40056 - DNA, 2316 bp, synthetic construct
  source 1..2316: mol_type = other DNA
atggccttaccagtgaccgccttgctcctgccgctggccttgctgctccacgccgccaggccgcaagtcaaactggaagaaagcggtggcggcctggtgcaacctggcgaatctctgagactgagctgtagcgccagcggctccatcttcaaggtgttcagagtgttcgccatgagctggtacaggcaaggccctggcaagcagagagagctggtcgcctctatcagcagcggcgagacaaccacatacgccgaatctgtgaaaggccggttcaccatcagccgggataatgccaagaataccgcctatctccagatggactccctgaagcctgaagatacagctgtgtactactgcaacgccgaccataccttcaccggcgatttttggggccagggaacccaagtgaccgtgtctagtggtaccggcggaggcggatctggcggcggaggtagcggtggcggaggatctgaattcgacatccagatgacacagagcccctctagcctgtctgccagcgtgggagacagagtgaccatcacctgtagagccagccagagcatcagaaactacctgaactggtatcagcaaaagcccggcaaggcccctgagctgctgattcatgctgcaagcagcctccagagcggcgtgccaagcagattttctggcagcggcagcggaaccgacttcaccctgacaatatctagcctccagcctgaggacttcgccagctactactgccagcagagctacagcgcccctcctatcacctttggacagggcaccagactggaaatcaagctcgagatccagaaccctgatcctgccgtgtaccagctgcgggatagcaagagcagcgacaagagcgtgtgtctgttcaccgacttcgacagccagaccaacgtgtcccagagcaaggactccgacgtgtacatcaccgataagtgcgtgctggacatgcggagcatggacttcaagagcaactccgccgtggcctggtccaacaagtccgatttcgcctgcgccaacgccttcaacaacagcattatccccgaggacacattcttcccaagccccgagagcagctgcggctttaccagcgagagctaccagcagggcgtgctgagcgccaccatcctgtacgagatcctgctgggcaaggccaccctgtacgccgtgctggtgtctgccctggtgctgatggctatggtcaagcggaaggacagccggggaagggccaagcgatctggatctggagcaacaaacttctcactactcaaacaagcaggtgacgtggaggagaatcccgggcctactagtatggactggatttggcgcatccttttccttgtcggcgctgctaccggcgcgcattccttcgaacaggttcagctccagcagtctggacctggcctggtcaagcctagccagacactgtctctgacctgtgccatcagcggcgatagcgtgtcctctaatagagccgcctggaactggatcagacagagccctagcagaggactccagtggctgggcagaacctactaccgcagcaagtggtacaacgactacgccgtgtctctgcggagccggatcaccatcaatcccgtgaccagcaagaaccaggtggccctgcacatgaacagcgtgacccctgaagataccgccgtgtactactgtgccagagccggaattgtggtggtgcccggacctgagacattctactactacgaccacggcctggacgtgtggggccagggaacaacagtgactgtctcttctacgcgtgacctgaagaacgtgttcccacctgaggtggccgtgttcgagcctagcgaggccgagatcagccacacccagaaagccaccctcgtgtgcctggctaccggcttctaccccgaccatgtggaactgtcttggtgggtcaacggcaaagaggtgcacagcggcgtgtgtaccgacccccagccactgaaagaacagcccgccctgaacgacagccggtactgcctgagcagcagactgagagtgtccgccaccttctggcagaacccccggaaccacttcagatgccaggtgcagttctacggcctgagcgagaacgacgagtggacccaggacagagccaagcccgtgacccagatcgtgtctgccgaagcctggggcagagccgattgcgacgtgaagctggtggaaaagagcttcgagacagacaccaacctgaacttccagaacctgagcgtgatcggcttcagaatcctgctgctgaaagtggccggctttaacctgctgatgaccctgcggctgtggtccagc

SEQ ID NO: 40057 - DNA, 2322 bp, synthetic construct
  source 1..2322: mol_type = other DNA
atggccttaccagtgaccgccttgctcctgccgctggccttgctgctccacgccgccaggccggacatccagatgacacagagcccctctagcctgtctgccagcgtgggagacagagtgaccatcacctgtagagccagccagagcatcagaaactacctgaactggtatcagcaaaagcccggcaaggcccctgagctgctgattcatgctgcaagcagcctccagagcggcgtgccaagcagattttctggcagcggcagcggaaccgacttcaccctgacaatatctagcctccagcctgaggacttcgccagctactactgccagcagagctacagcgcccctcctatcacctttggacagggcaccagactggaaatcaagctcgaggacctgaagaacgtgttcccacctgaggtggccgtgttcgagcctagcgaggccgagatcagccacacccagaaagccaccctcgtgtgcctggctaccggcttctaccccgaccatgtggaactgtcttggtgggtcaacggcaaagaggtgcacagcggcgtgtgtaccgacccccagccactgaaagaacagcccgccctgaacgacagccggtactgcctgagcagcagactgagagtgtccgccaccttctggcagaacccccggaaccacttcagatgccaggtgcagttctacggcctgagcgagaacgacgagtggacccaggacagagccaagcccgtgacccagatcgtgtctgccgaagcctggggcagagccgattgcgacgtgaagctggtggaaaagagcttcgagacagacaccaacctgaacttccagaacctgagcgtgatcggcttcagaatcctgctgctgaaagtggccggctttaacctgctgatgaccctgcggctgtggtccagcagggccaagcgatctggatctggagcaacaaacttctcactactcaaacaagcaggtgacgtggaggagaatcccgggcctactagtgccaccatggactggatttggcgcatccttttccttgtcggcgctgctaccggcgcccattccgggcccgaagtgcagctggttgaatctggcggaggactggttcaggctggcggatctctgagactgtcttgtgccgccagcggcagaacctttagcatgggctggtttagacaggcccctggcaaagagagagagttcgtcgccgccatcacatactctggcggcagcccttactacgccgactctgtgaagggcagattcaccatcagccgggacaacgccaagaacaccgtgtacctccagatgaacagcctgaagcctgaggacaccgccgtgtactactgcgccgccaatccaacatacggcagcgactggaacgccgagaattggggccagggaacccaagtgacagtgtctagcggatccggcggcggaggatctggcggaggcggatctgggggcggaggctctttcgaacaggttcagctccagcagtctggacctggcctggtcaagcctagccagacactgtctctgacctgtgccatcagcggcgatagcgtgtcctctaatagagccgcctggaactggatcagacagagccctagcagaggactccagtggctgggcagaacctactaccgcagcaagtggtacaacgactacgccgtgtctctgcggagccggatcaccatcaatcccgtgaccagcaagaaccaggtggccctgcacatgaacagcgtgacccctgaagataccgccgtgtactactgtgccagagccggaattgtggtggtgcccggacctgagacattctactactacgaccacggcctggacgtgtggggccagggaacaacagtgactgtctcttctacgcgtatccagaaccctgatcctgccgtgtaccagctgcgggatagcaagagcagcgacaagagcgtgtgtctgttcaccgacttcgacagccagaccaacgtgtcccagagcaaggactccgacgtgtacatcaccgataagtgcgtgctggacatgcggagcatggacttcaagagcaactccgccgtggcctggtccaacaagtccgatttcgcctgcgccaacgccttcaacaacagcattatccccgaggacacattcttcccaagccccgagagcagctgcggctttaccagcgagagctaccagcagggcgtgctgagcgccaccatcctgtacgagatcctgctgggcaaggccaccctgtacgccgtgctggtgtctgccctggtgctgatggctatggtcaagcggaaggacagccggggataa

SEQ ID NO: 40058 - DNA, 2325 bp, synthetic construct
  source 1..2325: mol_type = other DNA
atggccttaccagtgaccgccttgctcctgccgctggccttgctgctccacgccgccaggccggacatccagatgacacagagcccctctagcctgtctgccagcgtgggagacagagtgaccatcacctgtagagccagccagagcatcagaaactacctgaactggtatcagcaaaagcccggcaaggcccctgagctgctgattcatgctgcaagcagcctccagagcggcgtgccaagcagattttctggcagcggcagcggaaccgacttcaccctgacaatatctagcctccagcctgaggacttcgccagctactactgccagcagagctacagcgcccctcctatcacctttggacagggcaccagactggaaatcaagctcgaggacctgaagaacgtgttcccacctgaggtggccgtgttcgagcctagcgaggccgagatcagccacacccagaaagccaccctcgtgtgcctggctaccggcttctaccccgaccatgtggaactgtcttggtgggtcaacggcaaagaggtgcacagcggcgtgtgtaccgacccccagccactgaaagaacagcccgccctgaacgacagccggtactgcctgagcagcagactgagagtgtccgccaccttctggcagaacccccggaaccacttcagatgccaggtgcagttctacggcctgagcgagaacgacgagtggacccaggacagagccaagcccgtgacccagatcgtgtctgccgaagcctggggcagagccgattgcgacgtgaagctggtggaaaagagcttcgagacagacaccaacctgaacttccagaacctgagcgtgatcggcttcagaatcctgctgctgaaagtggccggctttaacctgctgatgaccctgcggctgtggtccagcagggccaagcgatctggatctggagcaacaaacttctcactactcaaacaagcaggtgacgtggaggagaatcccgggcctactagtgccaccatggactggatttggcgcatccttttccttgtcggcgctgctaccggcgcccattccgggcccgaagtgcaactggtggaatctgggggcggactggtgcagccaggcggaagtctgaggctgtcttgtgccgcctccggcagcatcttcggcttcaacgacatggcctggtatcggcaggctcccggaaaacagcgcgagctggtggctctgattagcagagtgggcgtgaccagcagcgccgactctgtgaagggcagattcacaatctccagagtgaacgccaaggatacagtgtacctccagatgaactctctgaaacctgaggatacagcagtgtactattgctacatggaccagcggctggacggcagcacactggcctactggggacagggaactcaagtgacagtgtctagcggatccggcggcggaggatctggcggaggcggatctgggggcggaggctctttcgaacaggttcagctccagcagtctggacctggcctggtcaagcctagccagacactgtctctgacctgtgccatcagcggcgatagcgtgtcctctaatagagccgcctggaactggatcagacagagccctagcagaggactccagtggctgggcagaacctactaccgcagcaagtggtacaacgactacgccgtgtctctgcggagccggatcaccatcaatcccgtgaccagcaagaaccaggtggccctgcacatgaacagcgtgacccctgaagataccgccgtgtactactgtgccagagccggaattgtggtggtgcccggacctgagacattctactactacgaccacggcctggacgtgtggggccagggaacaacagtgactgtctcttctacgcgtatccagaaccctgatcctgccgtgtaccagctgcgggatagcaagagcagcgacaagagcgtgtgtctgttcaccgacttcgacagccagaccaacgtgtcccagagcaaggactccgacgtgtacatcaccgataagtgcgtgctggacatgcggagcatggacttcaagagcaactccgccgtggcctggtccaacaagtccgatttcgcctgcgccaacgccttcaacaacagcattatccccgaggacacattcttcccaagccccgagagcagctgcggctttaccagcgagagctaccagcagggcgtgctgagcgccaccatcctgtacgagatcctgctgggcaaggccaccctgtacgccgtgctggtgtctgccctggtgctgatggctatggtcaagcggaaggacagccggggataa

SEQ ID NO: 40059 - DNA, 2313 bp, synthetic construct
  source 1..2313: mol_type = other DNA
atggccttaccagtgaccgccttgctcctgccgctggccttgctgctccacgccgccaggccggacatccagatgacacagagcccctctagcctgtctgccagcgtgggagacagagtgaccatcacctgtagagccagccagagcatcagaaactacctgaactggtatcagcaaaagcccggcaaggcccctgagctgctgattcatgctgcaagcagcctccagagcggcgtgccaagcagattttctggcagcggcagcggaaccgacttcaccctgacaatatctagcctccagcctgaggacttcgccagctactactgccagcagagctacagcgcccctcctatcacctttggacagggcaccagactggaaatcaagctcgaggacctgaagaacgtgttcccacctgaggtggccgtgttcgagcctagcgaggccgagatcagccacacccagaaagccaccctcgtgtgcctggctaccggcttctaccccgaccatgtggaactgtcttggtgggtcaacggcaaagaggtgcacagcggcgtgtgtaccgacccccagccactgaaagaacagcccgccctgaacgacagccggtactgcctgagcagcagactgagagtgtccgccaccttctggcagaacccccggaaccacttcagatgccaggtgcagttctacggcctgagcgagaacgacgagtggacccaggacagagccaagcccgtgacccagatcgtgtctgccgaagcctggggcagagccgattgcgacgtgaagctggtggaaaagagcttcgagacagacaccaacctgaacttccagaacctgagcgtgatcggcttcagaatcctgctgctgaaagtggccggctttaacctgctgatgaccctgcggctgtggtccagcagggccaagcgatctggatctggagcaacaaacttctcactactcaaacaagcaggtgacgtggaggagaatcccgggcctactagtgccaccatggactggatttggcgcatccttttccttgtcggcgctgctaccggcgcccattccgggcccgaggtgcagctggttgaatctggcggaggactggttcaggctggcggatctctgagactgtcttgtgccgccagcggctctgtgttcagcggcaatgtgatgggctggtacagacaggcccctggcaaagaaagagagtgggttgccgccattgccagcggcggcagcatctactacagagactctgtgaagggcagattcaccatcagccgggacaacgccaagaacaccgtgtacctccagatgaacagcctgaagcctgaggacaccgccgtgtactactgcaactctcaccctcctacactgccctattggggcctgggaacccaagtgacagtgtcctctggatccggcggcggaggatctggcggaggcggatctgggggcggaggctctttcgaacaggttcagctccagcagtctggacctggcctggtcaagcctagccagacactgtctctgacctgtgccatcagcggcgatagcgtgtcctctaatagagccgcctggaactggatcagacagagccctagcagaggactccagtggctgggcagaacctactaccgcagcaagtggtacaacgactacgccgtgtctctgcggagccggatcaccatcaatcccgtgaccagcaagaaccaggtggccctgcacatgaacagcgtgacccctgaagataccgccgtgtactactgtgccagagccggaattgtggtggtgcccggacctgagacattctactactacgaccacggcctggacgtgtggggccagggaacaacagtgactgtctcttctacgcgtatccagaaccctgatcctgccgtgtaccagctgcgggatagcaagagcagcgacaagagcgtgtgtctgttcaccgacttcgacagccagaccaacgtgtcccagagcaaggactccgacgtgtacatcaccgataagtgcgtgctggacatgcggagcatggacttcaagagcaactccgccgtggcctggtccaacaagtccgatttcgcctgcgccaacgccttcaacaacagcattatccccgaggacacattcttcccaagccccgagagcagctgcggctttaccagcgagagctaccagcagggcgtgctgagcgccaccatcctgtacgagatcctgctgggcaaggccaccctgtacgccgtgctggtgtctgccctggtgctgatggctatggtcaagcggaaggacagccggggataa

SEQ ID NO: 40060 - DNA, 2307 bp, synthetic construct
  source 1..2307: mol_type = other DNA
atggccttaccagtgaccgccttgctcctgccgctggccttgctgctccacgccgccaggccggacatccagatgacacagagcccctctagcctgtctgccagcgtgggagacagagtgaccatcacctgtagagccagccagagcatcagaaactacctgaactggtatcagcaaaagcccggcaaggcccctgagctgctgattcatgctgcaagcagcctccagagcggcgtgccaagcagattttctggcagcggcagcggaaccgacttcaccctgacaatatctagcctccagcctgaggacttcgccagctactactgccagcagagctacagcgcccctcctatcacctttggacagggcaccagactggaaatcaagctcgaggacctgaagaacgtgttcccacctgaggtggccgtgttcgagcctagcgaggccgagatcagccacacccagaaagccaccctcgtgtgcctggctaccggcttctaccccgaccatgtggaactgtcttggtgggtcaacggcaaagaggtgcacagcggcgtgtgtaccgacccccagccactgaaagaacagcccgccctgaacgacagccggtactgcctgagcagcagactgagagtgtccgccaccttctggcagaacccccggaaccacttcagatgccaggtgcagttctacggcctgagcgagaacgacgagtggacccaggacagagccaagcccgtgacccagatcgtgtctgccgaagcctggggcagagccgattgcgacgtgaagctggtggaaaagagcttcgagacagacaccaacctgaacttccagaacctgagcgtgatcggcttcagaatcctgctgctgaaagtggccggctttaacctgctgatgaccctgcggctgtggtccagcagggccaagcgatctggatctggagcaacaaacttctcactactcaaacaagcaggtgacgtggaggagaatcccgggcctactagtgccaccatggactggatttggcgcatccttttccttgtcggcgctgctaccggcgcccattccgggcccgaagttcagctgctggaatctggcggaggactcgttcaacctggcggctctctgagactgagctgtgccgcttctggcttcagcttctctagctacgccctgagctgggttcgacaagctcccggaaagggccttgaatgggtgtccagcatcggcgagaatgacggcaccacagactatgccgatgccgtgaaaggccggtttaccatcagcagagacaattccaagaacacgctctatctgcaaatgaactccctgcgcgtggaagatacagccgtgtattattgcgtgaaggacggcatccactggggacagggaaccctggttacagtgtctagcggatccggcggcggaggatctggcggaggcggatctgggggcggaggctctttcgaacaggttcagctccagcagtctggacctggcctggtcaagcctagccagacactgtctctgacctgtgccatcagcggcgatagcgtgtcctctaatagagccgcctggaactggatcagacagagccctagcagaggactccagtggctgggcagaacctactaccgcagcaagtggtacaacgactacgccgtgtctctgcggagccggatcaccatcaatcccgtgaccagcaagaaccaggtggccctgcacatgaacagcgtgacccctgaagataccgccgtgtactactgtgccagagccggaattgtggtggtgcccggacctgagacattctactactacgaccacggcctggacgtgtggggccagggaacaacagtgactgtctcttctacgcgtatccagaaccctgatcctgccgtgtaccagctgcgggatagcaagagcagcgacaagagcgtgtgtctgttcaccgacttcgacagccagaccaacgtgtcccagagcaaggactccgacgtgtacatcaccgataagtgcgtgctggacatgcggagcatggacttcaagagcaactccgccgtggcctggtccaacaagtccgatttcgcctgcgccaacgccttcaacaacagcattatccccgaggacacattcttcccaagccccgagagcagctgcggctttaccagcgagagctaccagcagggcgtgctgagcgccaccatcctgtacgagatcctgctgggcaaggccaccctgtacgccgtgctggtgtctgccctggtgctgatggctatggtcaagcggaaggacagccggggataa

SEQ ID NO: 40061 - DNA, 3414 bp, synthetic construct
  source 1..3414: mol_type = other DNA
atgggacccagactgctgttttgggctctgctgtgtctgctcggcacaggacctgttgaagctggcgtgacacagagccccacacacctgattaagaccagaggccagcaggccacactgagatgcagccctatcagcggccacaccagcgtgtactggtatcagcaggctctcggactgggcctccagttcctgctttggtacgacgagggcgaagagagaaaccggggcaacttccctcctcggttttccggcagacagttccccaactacagcagcgagctgaacgtgaacgccctggaactggaagatagcgccctgtacctgtgtgcctcttctcttggtggacctcgcggactggctggactgagaggggatgagcagtttttcggccctggcaccagactgaccgtgctggaaggtaccggcggaggcggatctggcggcggagaattcgacatccagatgacacagagcccctctagcctgtctgccagcgtgggagacagagtgaccatcacctgtagagccagccagagcatcagaaactacctgaactggtatcagcaaaagcccggcaaggcccctgagctgctgattcatgctgcaagcagcctccagagcggcgtgccaagcagattttctggcagcggcagcggaaccgacttcaccctgacaatatctagcctccagcctgaggacttcgccagctactactgccagcagagctacagcgcccctcctatcacctttggacagggcaccagactggaaatcaagctcgaggacctgaagaacgtgttcccacctgaggtggccgtgttcgagcctagcgaggccgagatcagccacacccagaaagccaccctcgtgtgcctggctaccggcttctaccccgaccatgtggaactgtcttggtgggtcaacggcaaagaggtgcacagcggcgtgtgtaccgacccccagccactgaaagaacagcccgccctgaacgacagccggtactgcctgagcagcagactgagagtgtccgccaccttctggcagaacccccggaaccacttcagatgccaggtgcagttctacggcctgagcgagaacgacgagtggacccaggacagagccaagcccgtgacccagatcgtgtctgccgaagcctggggcagagccgattgcgacgtgaagctggtggaaaagagcttcgagacagacaccaacctgaacttccagaacctgagcgtgatcggcttcagaatcctgctgctgaaagtggccggctttaacctgctgatgaccctgcggctgtggtccagcagggccaagcgatctggatctggagcaacaaacttctcactactcaaacaagcaggtgacgtggaggagaatcccgggcctactagtgccaccatggactggatttggcgcatccttttccttgtcggcgctgctaccggcgcccattccgggcccgaagtgcagctggttgaatctggcggaggactggttcaggctggcggatctctgagactgtcttgtgccgccagcggcagaacctttagcatgggctggtttagacaggcccctggcaaagagagagagttcgtcgccgccatcacatactctggcggcagcccttactacgccgactctgtgaagggcagattcaccatcagccgggacaacgccaagaacaccgtgtacctccagatgaacagcctgaagcctgaggacaccgccgtgtactactgcgccgccaatccaacatacggcagcgactggaacgccgagaattggggccagggaacccaagtgacagtgtctagcggatccggcggcggaggatctggcggaggcggatctgggggcggaggctctttcgaacaggttcagctccagcagtctggacctggcctggtcaagcctagccagacactgtctctgacctgtgccatcagcggcgatagcgtgtcctctaatagagccgcctggaactggatcagacagagccctagcagaggactccagtggctgggcagaacctactaccgcagcaagtggtacaacgactacgccgtgtctctgcggagccggatcaccatcaatcccgtgaccagcaagaaccaggtggccctgcacatgaacagcgtgacccctgaagataccgccgtgtactactgtgccagagccggaattgtggtggtgcccggacctgagacattctactactacgaccacggcctggacgtgtggggccagggaacaacagtgactgtctcttctacgcgtatccagaaccctgatcctgccgtgtaccagctgcgggatagcaagagcagcgacaagagcgtgtgtctgttcaccgacttcgacagccagaccaacgtgtcccagagcaaggactccgacgtgtacatcaccgataagtgcgtgctggacatgcggagcatggacttcaagagcaactccgccgtggcctggtccaacaagtccgatttcgcctgcgccaacgccttcaacaacagcattatccccgaggacacattcttcccaagccccgagagcagctgcggctttaccagcgagagctaccagcagggcgtgctgagcgccaccatcctgtacgagatcctgctgggcaaggccaccctgtacgccgtgctggtgtctgccctggtgctgatggctatggtcaagcggaaggacagccggggacgcgccaagagaagcggatctggcgtgaagcagaccctgaatttcgacctgctgaagctggctggcgacgtggaatccaacccaggcccttctagaggccatatgaccgagtacaagcccacggtgcgcctcgccacccgcgacgacgtccccagggccgtacgcaccctcgccgccgcgttcgccgactaccccgccacgcgccacaccgtcgatccggaccgccacatcgagcgggtcaccgagctgcaagaactcttcctcacgcgcgtcgggctcgacatcggcaaggtgtgggtcgcggacgacggcgccgcggtggcggtctggaccacgccggagagcgtcgaagcgggggcggtgttcgccgagatcggcccgcgcatggccgagttgagcggttcccggctggccgcgcagcaacagatggaaggcctcctggcgccgcaccggcccaaggagcccgcgtggttcctggccaccgtcggcgtctcgcccgaccaccagggcaagggtctgggcagcgccgtcgtgctccccggagtggaggcggccgagcgcgccggggtgcccgccttcctggagacctccgcgccccgcaacctccccttctacgagcggctcggcttcaccgtcaccgccgacgtcgaggtgcccgaaggaccgcgcacctggtgcatgacccgcaagcccggtgcctga

SEQ ID NO: 40062 - DNA, 3411 bp, synthetic construct
  source 1..3411: mol_type = other DNA
atgggacccagactgctgttttgggctctgctgtgtctgctcggcacaggacctgttgaagctggcgtgacacagagccccacacacctgattaagaccagaggccagcaggccacactgagatgcagccctatcagcggccacaccagcgtgtactggtatcagcaggctctcggactgggcctccagttcctgctttggtacgacgagggcgaagagagaaaccggggcaacttccctcctcggttttccggcagacagttccccaactacagcagcgagctgaacgtgaacgccctggaactggaagatagcgccctgtacctgtgtgccagctctctcggcggagatgaactgggagccgatggcaacgagcagttctttggccctggcaccagactgaccgtgctggaaggtaccggcggaggcggatctggcggcggaagcgaattcgacatccagatgacacagagcccctctagcctgtctgccagcgtgggagacagagtgaccatcacctgtagagccagccagagcatcagaaactacctgaactggtatcagcaaaagcccggcaaggcccctgagctgctgattcatgctgcaagcagcctccagagcggcgtgccaagcagattttctggcagcggcagcggaaccgacttcaccctgacaatatctagcctccagcctgaggacttcgccagctactactgccagcagagctacagcgcccctcctatcacctttggacagggcaccagactggaaatcaagctcgaggacctgaagaacgtgttcccacctgaggtggccgtgttcgagcctagcgaggccgagatcagccacacccagaaagccaccctcgtgtgcctggctaccggcttctaccccgaccatgtggaactgtcttggtgggtcaacggcaaagaggtgcacagcggcgtgtgtaccgacccccagccactgaaagaacagcccgccctgaacgacagccggtactgcctgagcagcagactgagagtgtccgccaccttctggcagaacccccggaaccacttcagatgccaggtgcagttctacggcctgagcgagaacgacgagtggacccaggacagagccaagcccgtgacccagatcgtgtctgccgaagcctggggcagagccgattgcgacgtgaagctggtggaaaagagcttcgagacagacaccaacctgaacttccagaacctgagcgtgatcggcttcagaatcctgctgctgaaagtggccggctttaacctgctgatgaccctgcggctgtggtccagcagggccaagcgatctggatctggagcaacaaacttctcactactcaaacaagcaggtgacgtggaggagaatcccgggcctactagtgccaccatggactggatttggcgcatccttttccttgtcggcgctgctaccggcgcccattccgggcccgaagtgcagctggttgaatctggcggaggactggttcaggctggcggatctctgagactgtcttgtgccgccagcggcagaacctttagcatgggctggtttagacaggcccctggcaaagagagagagttcgtcgccgccatcacatactctggcggcagcccttactacgccgactctgtgaagggcagattcaccatcagccgggacaacgccaagaacaccgtgtacctccagatgaacagcctgaagcctgaggacaccgccgtgtactactgcgccgccaatccaacatacggcagcgactggaacgccgagaattggggccagggaacccaagtgacagtgtctagcggatccggcggcggaggatctggcggaggcggatctgggggcggaggctctttcgaacaggttcagctccagcagtctggacctggcctggtcaagcctagccagacactgtctctgacctgtgccatcagcggcgatagcgtgtcctctaatagagccgcctggaactggatcagacagagccctagcagaggactccagtggctgggcagaacctactaccgcagcaagtggtacaacgactacgccgtgtctctgcggagccggatcaccatcaatcccgtgaccagcaagaaccaggtggccctgcacatgaacagcgtgacccctgaagataccgccgtgtactactgtgccagagccggaattgtggtggtgcccggacctgagacattctactactacgaccacggcctggacgtgtggggccagggaacaacagtgactgtctcttctacgcgtatccagaaccctgatcctgccgtgtaccagctgcgggatagcaagagcagcgacaagagcgtgtgtctgttcaccgacttcgacagccagaccaacgtgtcccagagcaaggactccgacgtgtacatcaccgataagtgcgtgctggacatgcggagcatggacttcaagagcaactccgccgtggcctggtccaacaagtccgatttcgcctgcgccaacgccttcaacaacagcattatccccgaggacacattcttcccaagccccgagagcagctgcggctttaccagcgagagctaccagcagggcgtgctgagcgccaccatcctgtacgagatcctgctgggcaaggccaccctgtacgccgtgctggtgtctgccctggtgctgatggctatggtcaagcggaaggacagccggggacgcgccaagagaagcggatctggcgtgaagcagaccctgaatttcgacctgctgaagctggctggcgacgtggaatccaacccaggcccttctagaggccatatgaccgagtacaagcccacggtgcgcctcgccacccgcgacgacgtccccagggccgtacgcaccctcgccgccgcgttcgccgactaccccgccacgcgccacaccgtcgatccggaccgccacatcgagcgggtcaccgagctgcaagaactcttcctcacgcgcgtcgggctcgacatcggcaaggtgtgggtcgcggacgacggcgccgcggtggcggtctggaccacgccggagagcgtcgaagcgggggcggtgttcgccgagatcggcccgcgcatggccgagttgagcggttcccggctggccgcgcagcaacagatggaaggcctcctggcgccgcaccggcccaaggagcccgcgtggttcctggccaccgtcggcgtctcgcccgaccaccagggcaagggtctgggcagcgccgtcgtgctccccggagtggaggcggccgagcgcgccggggtgcccgccttcctggagacctccgcgccccgcaacctccccttctacgagcggctcggcttcaccgtcaccgccgacgtcgaggtgcccgaaggaccgcgcacctggtgcatgacccgcaagcccggtgcctga

SEQ ID NO: 40063 - DNA, 2886 bp, synthetic construct
  source 1..2886: mol_type = other DNA
atggccttaccagtgaccgccttgctcctgccgctggccttgctgctccacgccgccaggccggacatccagatgacacagagcccctctagcctgtctgccagcgtgggagacagagtgaccatcacctgtagagccagccagagcatcagaaactacctgaactggtatcagcaaaagcccggcaaggcccctgagctgctgattcatgctgcaagcagcctccagagcggcgtgccaagcagattttctggcagcggcagcggaaccgacttcaccctgacaatatctagcctccagcctgaggacttcgccagctactactgccagcagagctacagcgcccctcctatcacctttggacagggcaccagactggaaatcaagctcgaggacctgaagaacgtgttcccacctgaggtggccgtgttcgagcctagcgaggccgagatcagccacacccagaaagccaccctcgtgtgcctggctaccggcttctaccccgaccatgtggaactgtcttggtgggtcaacggcaaagaggtgcacagcggcgtgtgtaccgacccccagccactgaaagaacagcccgccctgaacgacagccggtactgcctgagcagcagactgagagtgtccgccaccttctggcagaacccccggaaccacttcagatgccaggtgcagttctacggcctgagcgagaacgacgagtggacccaggacagagccaagcccgtgacccagatcgtgtctgccgaagcctggggcagagccgattgcgacgtgaagctggtggaaaagagcttcgagacagacaccaacctgaacttccagaacctgagcgtgatcggcttcagaatcctgctgctgaaagtggccggctttaacctgctgatgaccctgcggctgtggtccagcagggccaagcgatctggatctggagcaacaaacttctcactactcaaacaagcaggtgacgtggaggagaatcccgggcctactagtgccaccatggactggatttggcgcatccttttccttgtcggcgctgctaccggcgcccattccgggcccatgggaagctggcttgagttctaccacagactcaacgccattgacagcaggctgtgggcacttggcggaagcgaagctgaactcgccgcttttgaaaaagaaattgccgctttcgagtccgagcttcaggcttacaaaggcaaagggaatcctgaggtcgagagcctgagagatcacgctgcccacattagagagtggttgcaggcataccggcacaatggatccggcggcggaggatctggcggaggcggatctgggggcggaggctctttcgaacaggttcagctccagcagtctggacctggcctggtcaagcctagccagacactgtctctgacctgtgccatcagcggcgatagcgtgtcctctaatagagccgcctggaactggatcagacagagccctagcagaggactccagtggctgggcagaacctactaccgcagcaagtggtacaacgactacgccgtgtctctgcggagccggatcaccatcaatcccgtgaccagcaagaaccaggtggccctgcacatgaacagcgtgacccctgaagataccgccgtgtactactgtgccagagccggaattgtggtggtgcccggacctgagacattctactactacgaccacggcctggacgtgtggggccagggaacaacagtgactgtctcttctacgcgtatccagaaccctgatcctgccgtgtaccagctgcgggatagcaagagcagcgacaagagcgtgtgtctgttcaccgacttcgacagccagaccaacgtgtcccagagcaaggactccgacgtgtacatcaccgataagtgcgtgctggacatgcggagcatggacttcaagagcaactccgccgtggcctggtccaacaagtccgatttcgcctgcgccaacgccttcaacaacagcattatccccgaggacacattcttcccaagccccgagagcagctgcggctttaccagcgagagctaccagcagggcgtgctgagcgccaccatcctgtacgagatcctgctgggcaaggccaccctgtacgccgtgctggtgtctgccctggtgctgatggctatggtcaagcggaaggacagccggggacgcgccaagagaagcggatctggcgtgaagcagaccctgaatttcgacctgctgaagctggctggcgacgtggaatccaacccaggcccttctagaggccatatgaccgagtacaagcccacggtgcgcctcgccacccgcgacgacgtccccagggccgtacgcaccctcgccgccgcgttcgccgactaccccgccacgcgccacaccgtcgatccggaccgccacatcgagcgggtcaccgagctgcaagaactcttcctcacgcgcgtcgggctcgacatcggcaaggtgtgggtcgcggacgacggcgccgcggtggcggtctggaccacgccggagagcgtcgaagcgggggcggtgttcgccgagatcggcccgcgcatggccgagttgagcggttcccggctggccgcgcagcaacagatggaaggcctcctggcgccgcaccggcccaaggagcccgcgtggttcctggccaccgtcggcgtctcgcccgaccaccagggcaagggtctgggcagcgccgtcgtgctccccggagtggaggcggccgagcgcgccggggtgcccgccttcctggagacctccgcgccccgcaacctccccttctacgagcggctcggcttcaccgtcaccgccgacgtcgaggtgcccgaaggaccgcgcacctggtgcatgacccgcaagcccggtgcctga

SEQ ID NO: 40064 - DNA, 2886 bp, synthetic construct
  source 1..2886: mol_type = other DNA
atggccttaccagtgaccgccttgctcctgccgctggccttgctgctccacgccgccaggccggcatgcatgggcagttggttcgagttctacgaccggctgaatgccatcgacgccagactgtgggctctcggaggatctgaagctgagctggccgccttcgagaaagagatcgccgcctttgagagcgagctgcaagcctacaaaggcaagggcaaccccgaggtggaaaacctgagagtgcacgccgctgccatcagagaatggctccaggcttacagacacaacggtaccggcggaggcggatctggcggcggaggtagcggtggcggaggatctgaattcgacatccagatgacacagagcccctctagcctgtctgccagcgtgggagacagagtgaccatcacctgtagagccagccagagcatcagaaactacctgaactggtatcagcaaaagcccggcaaggcccctgagctgctgattcatgctgcaagcagcctccagagcggcgtgccaagcagattttctggcagcggcagcggaaccgacttcaccctgacaatatctagcctccagcctgaggacttcgccagctactactgccagcagagctacagcgcccctcctatcacctttggacagggcaccagactggaaatcaagctcgaggacctgaagaacgtgttcccacctgaggtggccgtgttcgagcctagcgaggccgagatcagccacacccagaaagccaccctcgtgtgcctggctaccggcttctaccccgaccatgtggaactgtcttggtgggtcaacggcaaagaggtgcacagcggcgtgtgtaccgacccccagccactgaaagaacagcccgccctgaacgacagccggtactgcctgagcagcagactgagagtgtccgccaccttctggcagaacccccggaaccacttcagatgccaggtgcagttctacggcctgagcgagaacgacgagtggacccaggacagagccaagcccgtgacccagatcgtgtctgccgaagcctggggcagagccgattgcgacgtgaagctggtggaaaagagcttcgagacagacaccaacctgaacttccagaacctgagcgtgatcggcttcagaatcctgctgctgaaagtggccggctttaacctgctgatgaccctgcggctgtggtccagcagggccaagcgatctggatctggagcaacaaacttctcactactcaaacaagcaggtgacgtggaggagaatcccgggcctactagtatggactggatttggcgcatccttttccttgtcggcgctgctaccggcgcgcattccttcgaacaggttcagctccagcagtctggacctggcctggtcaagcctagccagacactgtctctgacctgtgccatcagcggcgatagcgtgtcctctaatagagccgcctggaactggatcagacagagccctagcagaggactccagtggctgggcagaacctactaccgcagcaagtggtacaacgactacgccgtgtctctgcggagccggatcaccatcaatcccgtgaccagcaagaaccaggtggccctgcacatgaacagcgtgacccctgaagataccgccgtgtactactgtgccagagccggaattgtggtggtgcccggacctgagacattctactactacgaccacggcctggacgtgtggggccagggaacaacagtgactgtctcttctacgcgtatccagaaccctgatcctgccgtgtaccagctgcgggatagcaagagcagcgacaagagcgtgtgtctgttcaccgacttcgacagccagaccaacgtgtcccagagcaaggactccgacgtgtacatcaccgataagtgcgtgctggacatgcggagcatggacttcaagagcaactccgccgtggcctggtccaacaagtccgatttcgcctgcgccaacgccttcaacaacagcattatccccgaggacacattcttcccaagccccgagagcagctgcggctttaccagcgagagctaccagcagggcgtgctgagcgccaccatcctgtacgagatcctgctgggcaaggccaccctgtacgccgtgctggtgtctgccctggtgctgatggctatggtcaagcggaaggacagccggggacgcgccaagagaagcggatctggcgtgaagcagaccctgaatttcgacctgctgaagctggctggcgacgtggaatccaacccaggcccttctagaggccatatgaccgagtacaagcccacggtgcgcctcgccacccgcgacgacgtccccagggccgtacgcaccctcgccgccgcgttcgccgactaccccgccacgcgccacaccgtcgatccggaccgccacatcgagcgggtcaccgagctgcaagaactcttcctcacgcgcgtcgggctcgacatcggcaaggtgtgggtcgcggacgacggcgccgcggtggcggtctggaccacgccggagagcgtcgaagcgggggcggtgttcgccgagatcggcccgcgcatggccgagttgagcggttcccggctggccgcgcagcaacagatggaaggcctcctggcgccgcaccggcccaaggagcccgcgtggttcctggccaccgtcggcgtctcgcccgaccaccagggcaagggtctgggcagcgccgtcgtgctccccggagtggaggcggccgagcgcgccggggtgcccgccttcctggagacctccgcgccccgcaacctccccttctacgagcggctcggcttcaccgtcaccgccgacgtcgaggtgcccgaaggaccgcgcacctggtgcatgacccgcaagcccggtgcctga

SEQ ID NO: 40065 - DNA, 3237 bp, synthetic construct
  source 1..3237: mol_type = other DNA
atggccttaccagtgaccgccttgctcctgccgctggccttgctgctccacgccgccaggccggcatgcatggaccccgacctggaaatcagagccgccttcctgcggcagagaaacacagccctgagaacagaggtggccgagctggaacaagaggtgcagcggctggaaaacgaggtgtcccagtacgagacaagatacggccctctcggaggcggaaaaggtaccggcggaggcggatctggcggcggaggtagcggtggcggaggatctgaattcgacatccagatgacacagagcccctctagcctgtctgccagcgtgggagacagagtgaccatcacctgtagagccagccagagcatcagaaactacctgaactggtatcagcaaaagcccggcaaggcccctgagctgctgattcatgctgcaagcagcctccagagcggcgtgccaagcagattttctggcagcggcagcggaaccgacttcaccctgacaatatctagcctccagcctgaggacttcgccagctactactgccagcagagctacagcgcccctcctatcacctttggacagggcaccagactggaaatcaagctcgaggacctgaagaacgtgttcccacctgaggtggccgtgttcgagcctagcgaggccgagatcagccacacccagaaagccaccctcgtgtgcctggctaccggcttctaccccgaccatgtggaactgtcttggtgggtcaacggcaaagaggtgcacagcggcgtgtgtaccgacccccagccactgaaagaacagcccgccctgaacgacagccggtactgcctgagcagcagactgagagtgtccgccaccttctggcagaacccccggaaccacttcagatgccaggtgcagttctacggcctgagcgagaacgacgagtggacccaggacagagccaagcccgtgacccagatcgtgtctgccgaagcctggggcagagccgattgcgacgtgaagctggtggaaaagagcttcgagacagacaccaacctgaacttccagaacctgagcgtgatcggcttcagaatcctgctgctgaaagtggccggctttaacctgctgatgaccctgcggctgtggtccagcagggccaagcgatctggatctggagcaacaaacttctcactactcaaacaagcaggtgacgtggaggagaatcccgggcctactagtgccaccatggactggatttggcgcatccttttccttgtcggcgctgctaccggcgcccattccgggcccgaagtgcagctggttgaatctggcggaggactggttcaggctggcggatctctgagactgtcttgtgccgccagcggcagaacctttagcatgggctggtttagacaggcccctggcaaagagagagagttcgtcgccgccatcacatactctggcggcagcccttactacgccgactctgtgaagggcagattcaccatcagccgggacaacgccaagaacaccgtgtacctccagatgaacagcctgaagcctgaggacaccgccgtgtactactgcgccgccaatccaacatacggcagcgactggaacgccgagaattggggccagggaacccaagtgacagtgtctagcggatccggcggcggaggatctggcggaggcggatctgggggcggaggctctttcgaacaggttcagctccagcagtctggacctggcctggtcaagcctagccagacactgtctctgacctgtgccatcagcggcgatagcgtgtcctctaatagagccgcctggaactggatcagacagagccctagcagaggactccagtggctgggcagaacctactaccgcagcaagtggtacaacgactacgccgtgtctctgcggagccggatcaccatcaatcccgtgaccagcaagaaccaggtggccctgcacatgaacagcgtgacccctgaagataccgccgtgtactactgtgccagagccggaattgtggtggtgcccggacctgagacattctactactacgaccacggcctggacgtgtggggccagggaacaacagtgactgtctcttctacgcgtatccagaaccctgatcctgccgtgtaccagctgcgggatagcaagagcagcgacaagagcgtgtgtctgttcaccgacttcgacagccagaccaacgtgtcccagagcaaggactccgacgtgtacatcaccgataagtgcgtgctggacatgcggagcatggacttcaagagcaactccgccgtggcctggtccaacaagtccgatttcgcctgcgccaacgccttcaacaacagcattatccccgaggacacattcttcccaagccccgagagcagctgcggctttaccagcgagagctaccagcagggcgtgctgagcgccaccatcctgtacgagatcctgctgggcaaggccaccctgtacgccgtgctggtgtctgccctggtgctgatggctatggtcaagcggaaggacagccggggacgcgccaagagaagcggatctggcgtgaagcagaccctgaatttcgacctgctgaagctggctggcgacgtggaatccaacccaggcccttctagaggccatatgaccgagtacaagcccacggtgcgcctcgccacccgcgacgacgtccccagggccgtacgcaccctcgccgccgcgttcgccgactaccccgccacgcgccacaccgtcgatccggaccgccacatcgagcgggtcaccgagctgcaagaactcttcctcacgcgcgtcgggctcgacatcggcaaggtgtgggtcgcggacgacggcgccgcggtggcggtctggaccacgccggagagcgtcgaagcgggggcggtgttcgccgagatcggcccgcgcatggccgagttgagcggttcccggctggccgcgcagcaacagatggaaggcctcctggcgccgcaccggcccaaggagcccgcgtggttcctggccaccgtcggcgtctcgcccgaccaccagggcaagggtctgggcagcgccgtcgtgctccccggagtggaggcggccgagcgcgccggggtgcccgccttcctggagacctccgcgccccgcaacctccccttctacgagcggctcggcttcaccgtcaccgccgacgtcgaggtgcccgaaggaccgcgcacctggtgcatgacccgcaagcccggtgcctga

SEQ ID NO: 40066 - DNA, 2886 bp, synthetic construct
  source 1..2886: mol_type = other DNA
atggccttaccagtgaccgccttgctcctgccgctggccttgctgctccacgccgccaggccggacatccagatgacacagagcccctctagcctgtctgccagcgtgggagacagagtgaccatcacctgtagagccagccagagcatcagaaactacctgaactggtatcagcaaaagcccggcaaggcccctgagctgctgattcatgctgcaagcagcctccagagcggcgtgccaagcagattttctggcagcggcagcggaaccgacttcaccctgacaatatctagcctccagcctgaggacttcgccagctactactgccagcagagctacagcgcccctcctatcacctttggacagggcaccagactggaaatcaagctcgaggacctgaagaacgtgttcccacctgaggtggccgtgttcgagcctagcgaggccgagatcagccacacccagaaagccaccctcgtgtgcctggctaccggcttctaccccgaccatgtggaactgtcttggtgggtcaacggcaaagaggtgcacagcggcgtgtgtaccgacccccagccactgaaagaacagcccgccctgaacgacagccggtactgcctgagcagcagactgagagtgtccgccaccttctggcagaacccccggaaccacttcagatgccaggtgcagttctacggcctgagcgagaacgacgagtggacccaggacagagccaagcccgtgacccagatcgtgtctgccgaagcctggggcagagccgattgcgacgtgaagctggtggaaaagagcttcgagacagacaccaacctgaacttccagaacctgagcgtgatcggcttcagaatcctgctgctgaaagtggccggctttaacctgctgatgaccctgcggctgtggtccagcagggccaagcgatctggatctggagcaacaaacttctcactactcaaacaagcaggtgacgtggaggagaatcccgggcctactagtgccaccatggactggatttggcgcatccttttccttgtcggcgctgctaccggcgcccattccgggcccatgggatcttggagcgagttttacgatcggctgcacgccattcaccaccggctgtatgctctcggaggaagcgaagctgagctggccgcttttgaaaaagaaattgccgctttcgagtccgagcttcaggcttacaaaggcaaagggaatcctgaggtcgaggccctgagagataccgccgccttcatcagaacccggttgcaggcataccggcacaacggatccggcggcggaggatctggcggaggcggatctgggggcggaggctctttcgaacaggttcagctccagcagtctggacctggcctggtcaagcctagccagacactgtctctgacctgtgccatcagcggcgatagcgtgtcctctaatagagccgcctggaactggatcagacagagccctagcagaggactccagtggctgggcagaacctactaccgcagcaagtggtacaacgactacgccgtgtctctgcggagccggatcaccatcaatcccgtgaccagcaagaaccaggtggccctgcacatgaacagcgtgacccctgaagataccgccgtgtactactgtgccagagccggaattgtggtggtgcccggacctgagacattctactactacgaccacggcctggacgtgtggggccagggaacaacagtgactgtctcttctacgcgtatccagaaccctgatcctgccgtgtaccagctgcgggatagcaagagcagcgacaagagcgtgtgtctgttcaccgacttcgacagccagaccaacgtgtcccagagcaaggactccgacgtgtacatcaccgataagtgcgtgctggacatgcggagcatggacttcaagagcaactccgccgtggcctggtccaacaagtccgatttcgcctgcgccaacgccttcaacaacagcattatccccgaggacacattcttcccaagccccgagagcagctgcggctttaccagcgagagctaccagcagggcgtgctgagcgccaccatcctgtacgagatcctgctgggcaaggccaccctgtacgccgtgctggtgtctgccctggtgctgatggctatggtcaagcggaaggacagccggggacgcgccaagagaagcggatctggcgtgaagcagaccctgaatttcgacctgctgaagctggctggcgacgtggaatccaacccaggcccttctagaggccatatgaccgagtacaagcccacggtgcgcctcgccacccgcgacgacgtccccagggccgtacgcaccctcgccgccgcgttcgccgactaccccgccacgcgccacaccgtcgatccggaccgccacatcgagcgggtcaccgagctgcaagaactcttcctcacgcgcgtcgggctcgacatcggcaaggtgtgggtcgcggacgacggcgccgcggtggcggtctggaccacgccggagagcgtcgaagcgggggcggtgttcgccgagatcggcccgcgcatggccgagttgagcggttcccggctggccgcgcagcaacagatggaaggcctcctggcgccgcaccggcccaaggagcccgcgtggttcctggccaccgtcggcgtctcgcccgaccaccagggcaagggtctgggcagcgccgtcgtgctccccggagtggaggcggccgagcgcgccggggtgcccgccttcctggagacctccgcgccccgcaacctccccttctacgagcggctcggcttcaccgtcaccgccgacgtcgaggtgcccgaaggaccgcgcacctggtgcatgacccgcaagcccggtgcctga

SEQ ID NO: 40067 - DNA, 3516 bp, synthetic construct
  source 1..3516: mol_type = other DNA
atggccttaccagtgaccgccttgctcctgccgctggccttgctgctccacgccgccaggccggacatccagatgacacagagcccctctagcctgtctgccagcgtgggagacagagtgaccatcacctgtagagccagccagagcatcagaaactacctgaactggtatcagcaaaagcccggcaaggcccctgagctgctgattcatgctgcaagcagcctccagagcggcgtgccaagcagattttctggcagcggcagcggaaccgacttcaccctgacaatatctagcctccagcctgaggacttcgccagctactactgccagcagagctacagcgcccctcctatcacctttggacagggcaccagactggaaatcaagctcgaggacctgaagaacgtgttcccacctgaggtggccgtgttcgagcctagcgaggccgagatcagccacacccagaaagccaccctcgtgtgcctggctaccggcttctaccccgaccatgtggaactgtcttggtgggtcaacggcaaagaggtgcacagcggcgtgtgtaccgacccccagccactgaaagaacagcccgccctgaacgacagccggtactgcctgagcagcagactgagagtgtccgccaccttctggcagaacccccggaaccacttcagatgccaggtgcagttctacggcctgagcgagaacgacgagtggacccaggacagagccaagcccgtgacccagatcgtgtctgccgaagcctggggcagagccgattgcgacgtgaagctggtggaaaagagcttcgagacagacaccaacctgaacttccagaacctgagcgtgatcggcttcagaatcctgctgctgaaagtggccggctttaacctgctgatgaccctgcggctgtggtccagcagggccaagcgatctggatctggagcaacaaacttctcactactcaaacaagcaggtgacgtggaggagaatcccgggcctactagtaccatggactggatttggcgcatccttttccttgtcggcgctgctaccggcgcccattccctgttcaatcaagaggtgcagatccctctgaccgagagctactgtggcccctgtcctaagaactggatctgctacaagaacaactgctaccagttcttcgacgagagcaagaattggtacgagagccaggccagctgcatgagccagaatgccagcctgctgaaggtgtacagcaaagaggaccaggacctgctgaaactggtcaagagcgcccactggatgggccttgtgcacatccccaccaatggctcttggcagtgggaggacggcagcattctgagccctaacctgctgaccatcatcgagatgcagaagggcgactgcgccctgtacgccagcagctttaagggctacatcgagaattgcagcaccccgaacacctacatctgtatgcagagaaccgtttctggcggaggcggctctggaggaggcggaagtggcggcggaggcgacctctttaatcaagaagtccagattccactcaccgaatcctactgcggaccttgtccaaaaaattggatttgttataagaacaactgttatcaattctttgatgagtctaaaaattggtatgagtcccaggcttcctgcatgtctcagaacgcttctctgctgaaagtctactctaaagaagatcaggatctcctgaagctcgtcaagtctgcccattggatggggctcgtccacattcctaccaacggaagctggcaatgggaagatggctccatcctgtctccaaatctgctcacgattattgaaatgcagaaaggggattgtgctctctacgccagctccttcaagggatatattgagaactgtagcacgcccaatacttatatctgtatgcaacggaccgtgggatccggcggcggaggatctggcggaggcggatctgggggcggaggctctttcgaacaggttcagctccagcagtctggacctggcctggtcaagcctagccagacactgtctctgacctgtgccatcagcggcgatagcgtgtcctctaatagagccgcctggaactggatcagacagagccctagcagaggactccagtggctgggcagaacctactaccgcagcaagtggtacaacgactacgccgtgtctctgcggagccggatcaccatcaatcccgtgaccagcaagaaccaggtggccctgcacatgaacagcgtgacccctgaagataccgccgtgtactactgtgccagagccggaattgtggtggtgcccggacctgagacattctactactacgaccacggcctggacgtgtggggccagggaacaacagtgactgtctcttctacgcgtatccagaaccctgatcctgccgtgtaccagctgcgggatagcaagagcagcgacaagagcgtgtgtctgttcaccgacttcgacagccagaccaacgtgtcccagagcaaggactccgacgtgtacatcaccgataagtgcgtgctggacatgcggagcatggacttcaagagcaactccgccgtggcctggtccaacaagtccgatttcgcctgcgccaacgccttcaacaacagcattatccccgaggacacattcttcccaagccccgagagcagctgcggctttaccagcgagagctaccagcagggcgtgctgagcgccaccatcctgtacgagatcctgctgggcaaggccaccctgtacgccgtgctggtgtctgccctggtgctgatggctatggtcaagcggaaggacagccggggacgcgccaagagaagcggatctggcgtgaagcagaccctgaatttcgacctgctgaagctggctggcgacgtggaatccaacccaggcccttctagaggccatatgaccgagtacaagcccacggtgcgcctcgccacccgcgacgacgtccccagggccgtacgcaccctcgccgccgcgttcgccgactaccccgccacgcgccacaccgtcgatccggaccgccacatcgagcgggtcaccgagctgcaagaactcttcctcacgcgcgtcgggctcgacatcggcaaggtgtgggtcgcggacgacggcgccgcggtggcggtctggaccacgccggagagcgtcgaagcgggggcggtgttcgccgagatcggcccgcgcatggccgagttgagcggttcccggctggccgcgcagcaacagatggaaggcctcctggcgccgcaccggcccaaggagcccgcgtggttcctggccaccgtcggcgtctcgcccgaccaccagggcaagggtctgggcagcgccgtcgtgctccccggagtggaggcggccgagcgcgccggggtgcccgccttcctggagacctccgcgccccgcaacctccccttctacgagcggctcggcttcaccgtcaccgccgacgtcgaggtgcccgaaggaccgcgcacctggtgcatgacccgcaagcccggtgcctga

SEQ ID NO: 40068 - DNA, 1902 bp, synthetic construct
  source 1..1902: mol_type = other DNA
atggccttaccagtgaccgccttgctcctgccgctggccttgctgctccacgccgccaggccggacatccagatgacacagagcccctctagcctgtctgccagcgtgggagacagagtgaccatcacctgtagagccagccagagcatcagaaactacctgaactggtatcagcaaaagcccggcaaggcccctgagctgctgattcatgctgcaagcagcctccagagcggcgtgccaagcagattttctggcagcggcagcggaaccgacttcaccctgacaatatctagcctccagcctgaggacttcgccagctactactgccagcagagctacagcgcccctcctatcacctttggacagggcaccagactggaaatcaagctcgaggacctgaagaacgtgttcccacctgaggtggccgtgttcgagcctagcgaggccgagatcagccacacccagaaagccaccctcgtgtgcctggctaccggcttctaccccgaccatgtggaactgtcttggtgggtcaacggcaaagaggtgcacagcggcgtgtgtaccgacccccagccactgaaagaacagcccgccctgaacgacagccggtactgcctgagcagcagactgagagtgtccgccaccttctggcagaacccccggaaccacttcagatgccaggtgcagttctacggcctgagcgagaacgacgagtggacccaggacagagccaagcccgtgacccagatcgtgtctgccgaagcctggggcagagccgattgcggctttaccagcgagagctaccagcagggcgtgctgagcgccaccaacctgagcgtgatcggcttcagaatcctgctgctgaaagtggccggctttaacctgctgatgaccctgcggctgtggtccagcagggccaagcgatctggatctggagcaacaaacttctcactactcaaacaagcaggtgacgtggaggagaatcccgggcctactagtatggactggatttggcgcatccttttccttgtcggcgctgctaccggcgcgcattccttcgaacaggttcagctccagcagtctggacctggcctggtcaagcctagccagacactgtctctgacctgtgccatcagcggcgatagcgtgtcctctaatagagccgcctggaactggatcagacagagccctagcagaggactccagtggctgggcagaacctactaccgcagcaagtggtacaacgactacgccgtgtctctgcggagccggatcaccatcaatcccgtgaccagcaagaaccaggtggccctgcacatgaacagcgtgacccctgaagataccgccgtgtactactgtgccagagccggaattgtggtggtgcccggacctgagacattctactactacgaccacggcctggacgtgtggggccagggaacaacagtgactgtctcttctacgcgtatccagaaccctgatcctgccgtgtaccagctgcgggatagcaagagcagcgacaagagcgtgtgtctgttcaccgacttcgacagccagaccaacgtgtcccagagcaaggactccgacgtgtacatcaccgataagtgcgtgctggacatgcggagcatggacttcaagagcaactccgccgtggcctggtccaacaagtccgatttcgcctgcgccaacgccttcaacaacagcattatccccgaggacacattcttcccaagccccgagagcagctgcgacgtgaagctggtggaaaagagcttcgagacagacaccaacctgaacttccagatcctgtacgagatcctgctgggcaaggccaccctgtacgccgtgctggtgtctgccctggtgctgatggctatggtcaagcggaaggacagccgggga

SEQ ID NO: 40069 - DNA, 1914 bp, synthetic construct
  source 1..1914: mol_type = other DNA
atggccttaccagtgaccgccttgctcctgccgctggccttgctgctccacgccgccaggccggacatccagatgacacagagcccctctagcctgtctgccagcgtgggagacagagtgaccatcacctgtagagccagccagagcatcagaaactacctgaactggtatcagcaaaagcccggcaaggcccctgagctgctgattcatgctgcaagcagcctccagagcggcgtgccaagcagattttctggcagcggcagcggaaccgacttcaccctgacaatatctagcctccagcctgaggacttcgccagctactactgccagcagagctacagcgcccctcctatcacctttggacagggcaccagactggaaatcaagctcgagatccagaaccctgatcctgccgtgtaccagctgcgggatagcaagagcagcgacaagagcgtgtgtctgttcaccgacttcgacagccagaccaacgtgtcccagagcaaggactccgacgtgtacatcaccgataagtgcgtgctggacatgcggagcatggacttcaagagcaactccgccgtggcctggtccaacaagtccgatttcgcctgcgccaacgccttcaacaacagcattatccccgaggacacattcttcccaagccccgagagcagctgcgacgtgaagctggtggaaaagagcttcgagacagacaccaacctgaacttccagatcctgtacgagatcctgctgggcaaggccaccctgtacgccgtgctggtgtctgccctggtgctgatggctatggtcaagcggaaggacagccggggacgcgccaagagaagcggatctggcgtgaagcagaccctgaatttcgacctgctgaagctggctggcgacgtggaatccaacccaggccctactagtatggactggatttggcgcatccttttccttgtcggcgctgctaccggcgcgcattccttcgaacaggttcagctccagcagtctggacctggcctggtcaagcctagccagacactgtctctgacctgtgccatcagcggcgatagcgtgtcctctaatagagccgcctggaactggatcagacagagccctagcagaggactccagtggctgggcagaacctactaccgcagcaagtggtacaacgactacgccgtgtctctgcggagccggatcaccatcaatcccgtgaccagcaagaaccaggtggccctgcacatgaacagcgtgacccctgaagataccgccgtgtactactgtgccagagccggaattgtggtggtgcccggacctgagacattctactactacgaccacggcctggacgtgtggggccagggaacaacagtgactgtctcttctacgcgtgaggacctgaagaacgtgttcccacctgaggtggccgtgttcgagcctagcgaggccgagatcagccacacccagaaagccaccctcgtgtgcctggctaccggcttctaccccgaccatgtggaactgtcttggtgggtcaacggcaaagaggtgcacagcggcgtgtgtaccgacccccagccactgaaagaacagcccgccctgaacgacagccggtactgcctgagcagcagactgagagtgtccgccaccttctggcagaacccccggaaccacttcagatgccaggtgcagttctacggcctgagcgagaacgacgagtggacccaggacagagccaagcccgtgacccagatcgtgtctgccgaagcctggggcagagccgattgcggctttaccagcgagagctaccagcagggcgtgctgagcgccaccaacctgagcgtgatcggcttcagaatcctgctgctgaaagtggccggctttaacctgctgatgaccctgcggctgtggtccagc

SEQ ID NO: 40070 - DNA, 2307 bp, synthetic construct
  source 1..2307: mol_type = other DNA
atggccttaccagtgaccgccttgctcctgccgctggccttgctgctccacgccgccaggccggaagtgcagctggttgaatctggcggaggactggttcagcctggcggatctctgagactgtcttgtgccgccagcggcttcagcttcagcgacttttggatgagctgggtccgacaggcccctggcaaaggacttgaatgggtcgccacaatcagccaggccggcagcgagaaggactacgtggactctgtgaagggcagattcaccatcagccgggacaacgccaagaagtccctgtacctccagatgaacagcctgagagccgaggacaccgccgtgtactattgtgcctctggcgtgtacagcttcgactacagaggccagggcaccctggtcacagtctcttctggtaccggcggaggcggatctggcggcggaggtagcggtggcggaggatctgaattcgacatccagatgacacagagcccctctagcctgtctgccagcgtgggagacagagtgaccatcacctgtagagccagccagagcatcagaaactacctgaactggtatcagcaaaagcccggcaaggcccctgagctgctgattcatgctgcaagcagcctccagagcggcgtgccaagcagattttctggcagcggcagcggaaccgacttcaccctgacaatatctagcctccagcctgaggacttcgccagctactactgccagcagagctacagcgcccctcctatcacctttggacagggcaccagactggaaatcaagctcgaggacctgaagaacgtgttcccacctgaggtggccgtgttcgagcctagcgaggccgagatcagccacacccagaaagccaccctcgtgtgcctggctaccggcttctaccccgaccatgtggaactgtcttggtgggtcaacggcaaagaggtgcacagcggcgtgtgtaccgacccccagccactgaaagaacagcccgccctgaacgacagccggtactgcctgagcagcagactgagagtgtccgccaccttctggcagaacccccggaaccacttcagatgccaggtgcagttctacggcctgagcgagaacgacgagtggacccaggacagagccaagcccgtgacccagatcgtgtctgccgaagcctggggcagagccgattgcggctttaccagcgagagctaccagcagggcgtgctgagcgccaccaacctgagcgtgatcggcttcagaatcctgctgctgaaagtggccggctttaacctgctgatgaccctgcggctgtggtccagcagggccaagcgatctggatctggagcaacaaacttctcactactcaaacaagcaggtgacgtggaggagaatcccgggcctactagtatggactggatttggcgcatccttttccttgtcggcgctgctaccggcgcgcattccttcgaacaggttcagctccagcagtctggacctggcctggtcaagcctagccagacactgtctctgacctgtgccatcagcggcgatagcgtgtcctctaatagagccgcctggaactggatcagacagagccctagcagaggactccagtggctgggcagaacctactaccgcagcaagtggtacaacgactacgccgtgtctctgcggagccggatcaccatcaatcccgtgaccagcaagaaccaggtggccctgcacatgaacagcgtgacccctgaagataccgccgtgtactactgtgccagagccggaattgtggtggtgcccggacctgagacattctactactacgaccacggcctggacgtgtggggccagggaacaacagtgactgtctcttctacgcgtatccagaaccctgatcctgccgtgtaccagctgcgggatagcaagagcagcgacaagagcgtgtgtctgttcaccgacttcgacagccagaccaacgtgtcccagagcaaggactccgacgtgtacatcaccgataagtgcgtgctggacatgcggagcatggacttcaagagcaactccgccgtggcctggtccaacaagtccgatttcgcctgcgccaacgccttcaacaacagcattatccccgaggacacattcttcccaagccccgagagcagctgcgacgtgaagctggtggaaaagagcttcgagacagacaccaacctgaacttccagatcctgtacgagatcctgctgggcaaggccaccctgtacgccgtgctggtgtctgccctggtgctgatggctatggtcaagcggaaggacagccgggga

SEQ ID NO: 40071 - DNA, 2319 bp, synthetic construct
  source 1..2319: mol_type = other DNA
atggccttaccagtgaccgccttgctcctgccgctggccttgctgctccacgccgccaggccggaagtgcagctggttgaatctggcggaggactggttcagcctggcggatctctgagactgtcttgtgccgccagcggcttcagcttcagcgacttttggatgagctgggtccgacaggcccctggcaaaggacttgaatgggtcgccacaatcagccaggccggcagcgagaaggactacgtggactctgtgaagggcagattcaccatcagccgggacaacgccaagaagtccctgtacctccagatgaacagcctgagagccgaggacaccgccgtgtactattgtgcctctggcgtgtacagcttcgactacagaggccagggcaccctggtcacagtctcttctggtaccggcggaggcggatctggcggcggaggtagcggtggcggaggatctgaattcgacatccagatgacacagagcccctctagcctgtctgccagcgtgggagacagagtgaccatcacctgtagagccagccagagcatcagaaactacctgaactggtatcagcaaaagcccggcaaggcccctgagctgctgattcatgctgcaagcagcctccagagcggcgtgccaagcagattttctggcagcggcagcggaaccgacttcaccctgacaatatctagcctccagcctgaggacttcgccagctactactgccagcagagctacagcgcccctcctatcacctttggacagggcaccagactggaaatcaagctcgagatccagaaccctgatcctgccgtgtaccagctgcgggatagcaagagcagcgacaagagcgtgtgtctgttcaccgacttcgacagccagaccaacgtgtcccagagcaaggactccgacgtgtacatcaccgataagtgcgtgctggacatgcggagcatggacttcaagagcaactccgccgtggcctggtccaacaagtccgatttcgcctgcgccaacgccttcaacaacagcattatccccgaggacacattcttcccaagccccgagagcagctgcgacgtgaagctggtggaaaagagcttcgagacagacaccaacctgaacttccagatcctgtacgagatcctgctgggcaaggccaccctgtacgccgtgctggtgtctgccctggtgctgatggctatggtcaagcggaaggacagccggggacgcgccaagagaagcggatctggcgtgaagcagaccctgaatttcgacctgctgaagctggctggcgacgtggaatccaacccaggccctactagtatggactggatttggcgcatccttttccttgtcggcgctgctaccggcgcgcattccttcgaacaggttcagctccagcagtctggacctggcctggtcaagcctagccagacactgtctctgacctgtgccatcagcggcgatagcgtgtcctctaatagagccgcctggaactggatcagacagagccctagcagaggactccagtggctgggcagaacctactaccgcagcaagtggtacaacgactacgccgtgtctctgcggagccggatcaccatcaatcccgtgaccagcaagaaccaggtggccctgcacatgaacagcgtgacccctgaagataccgccgtgtactactgtgccagagccggaattgtggtggtgcccggacctgagacattctactactacgaccacggcctggacgtgtggggccagggaacaacagtgactgtctcttctacgcgtgaggacctgaagaacgtgttcccacctgaggtggccgtgttcgagcctagcgaggccgagatcagccacacccagaaagccaccctcgtgtgcctggctaccggcttctaccccgaccatgtggaactgtcttggtgggtcaacggcaaagaggtgcacagcggcgtgtgtaccgacccccagccactgaaagaacagcccgccctgaacgacagccggtactgcctgagcagcagactgagagtgtccgccaccttctggcagaacccccggaaccacttcagatgccaggtgcagttctacggcctgagcgagaacgacgagtggacccaggacagagccaagcccgtgacccagatcgtgtctgccgaagcctggggcagagccgattgcggctttaccagcgagagctaccagcagggcgtgctgagcgccaccaacctgagcgtgatcggcttcagaatcctgctgctgaaagtggccggctttaacctgctgatgaccctgcggctgtggtccagc

SEQ ID NO: 40072 - DNA, 2718 bp, synthetic construct
  source 1..2718: mol_type = other DNA
atggccttaccagtgaccgccttgctcctgccgctggccttgctgctccacgccgccaggccggaagtgcagctggttgaatctggcggaggactggttcagcctggcggatctctgagactgtcttgtgccgccagcggcttcagcttcagcgacttttggatgagctgggtccgacaggcccctggcaaaggacttgaatgggtcgccacaatcagccaggccggcagcgagaaggactacgtggactctgtgaagggcagattcaccatcagccgggacaacgccaagaagtccctgtacctccagatgaacagcctgagagccgaggacaccgccgtgtactattgtgcctctggcgtgtacagcttcgactacagaggccagggcaccctggtcacagtctcttctggtaccggcggaggcggatctggcggcggaggtagcggtggcggaggatctgaattcgacatccagatgacacagagcccctctagcctgtctgccagcgtgggagacagagtgaccatcacctgtagagccagccagagcatcagaaactacctgaactggtatcagcaaaagcccggcaaggcccctgagctgctgattcatgctgcaagcagcctccagagcggcgtgccaagcagattttctggcagcggcagcggaaccgacttcaccctgacaatatctagcctccagcctgaggacttcgccagctactactgccagcagagctacagcgcccctcctatcacctttggacagggcaccagactggaaatcaagctcgaggacctgaagaacgtgttcccacctgaggtggccgtgttcgagcctagcgaggccgagatcagccacacccagaaagccaccctcgtgtgcctggctaccggcttctaccccgaccatgtggaactgtcttggtgggtcaacggcaaagaggtgcacagcggcgtgtgtaccgacccccagccactgaaagaacagcccgccctgaacgacagccggtactgcctgagcagcagactgagagtgtccgccaccttctggcagaacccccggaaccacttcagatgccaggtgcagttctacggcctgagcgagaacgacgagtggacccaggacagagccaagcccgtgacccagatcgtgtctgccgaagcctggggcagagccgattgcggctttaccagcgagagctaccagcagggcgtgctgagcgccaccaacctgagcgtgatcggcttcagaatcctgctgctgaaagtggccggctttaacctgctgatgaccctgcggctgtggtccagcagggccaagcgatctggatctggagcaacaaacttctcactactcaaacaagcaggtgacgtggaggagaatcccgggcctactagtatggactggatttggcgcatccttttccttgtcggcgctgctaccggcgcgcattccgggccccagctccagctgcaagagtctggacctggcctggtcaagcctagcgagacactgagcctgacctgtaccgtgtccggcgatagcatcagcagcggcgattactactggggctggatcagacagcctcctggcaaaggactggaatggatcggccacatctactacagcggcgtgacctactacaaccccagcctgaagtccagagtgaccatcagcgtggacaccagccggaaccagttctccctgaagctgtctagcgtgacagccgccgataccgccgtgtactactgcaccagagaggacagcagcaactggcggagtagaggccagggaacactggtcacagttagctctggatccggcggaggcggaagtggaggcggaggatctggcggcggaggctctttcgaacaggttcagctccagcagtctggacctggcctggtcaagcctagccagacactgtctctgacctgtgccatcagcggcgatagcgtgtcctctaatagagccgcctggaactggatcagacagagccctagcagaggactccagtggctgggcagaacctactaccgcagcaagtggtacaacgactacgccgtgtctctgcggagccggatcaccatcaatcccgtgaccagcaagaaccaggtggccctgcacatgaacagcgtgacccctgaagataccgccgtgtactactgtgccagagccggaattgtggtggtgcccggacctgagacattctactactacgaccacggcctggacgtgtggggccagggaacaacagtgactgtctcttctacgcgtatccagaaccctgatcctgccgtgtaccagctgcgggatagcaagagcagcgacaagagcgtgtgtctgttcaccgacttcgacagccagaccaacgtgtcccagagcaaggactccgacgtgtacatcaccgataagtgcgtgctggacatgcggagcatggacttcaagagcaactccgccgtggcctggtccaacaagtccgatttcgcctgcgccaacgccttcaacaacagcattatccccgaggacacattcttcccaagccccgagagcagctgcgacgtgaagctggtggaaaagagcttcgagacagacaccaacctgaacttccagatcctgtacgagatcctgctgggcaaggccaccctgtacgccgtgctggtgtctgccctggtgctgatggctatggtcaagcggaaggacagccgggga

SEQ ID NO: 40073 - DNA, 2730 bp, synthetic construct
  source 1..2730: mol_type = other DNA
atggccttaccagtgaccgccttgctcctgccgctggccttgctgctccacgccgccaggccggaagtgcagctggttgaatctggcggaggactggttcagcctggcggatctctgagactgtcttgtgccgccagcggcttcagcttcagcgacttttggatgagctgggtccgacaggcccctggcaaaggacttgaatgggtcgccacaatcagccaggccggcagcgagaaggactacgtggactctgtgaagggcagattcaccatcagccgggacaacgccaagaagtccctgtacctccagatgaacagcctgagagccgaggacaccgccgtgtactattgtgcctctggcgtgtacagcttcgactacagaggccagggcaccctggtcacagtctcttctggtaccggcggaggcggatctggcggcggaggtagcggtggcggaggatctgaattcgacatccagatgacacagagcccctctagcctgtctgccagcgtgggagacagagtgaccatcacctgtagagccagccagagcatcagaaactacctgaactggtatcagcaaaagcccggcaaggcccctgagctgctgattcatgctgcaagcagcctccagagcggcgtgccaagcagattttctggcagcggcagcggaaccgacttcaccctgacaatatctagcctccagcctgaggacttcgccagctactactgccagcagagctacagcgcccctcctatcacctttggacagggcaccagactggaaatcaagctcgagatccagaaccctgatcctgccgtgtaccagctgcgggatagcaagagcagcgacaagagcgtgtgtctgttcaccgacttcgacagccagaccaacgtgtcccagagcaaggactccgacgtgtacatcaccgataagtgcgtgctggacatgcggagcatggacttcaagagcaactccgccgtggcctggtccaacaagtccgatttcgcctgcgccaacgccttcaacaacagcattatccccgaggacacattcttcccaagccccgagagcagctgcgacgtgaagctggtggaaaagagcttcgagacagacaccaacctgaacttccagatcctgtacgagatcctgctgggcaaggccaccctgtacgccgtgctggtgtctgccctggtgctgatggctatggtcaagcggaaggacagccggggacgcgccaagagaagcggatctggcgtgaagcagaccctgaatttcgacctgctgaagctggctggcgacgtggaatccaacccaggccctactagtatggactggatttggcgcatccttttccttgtcggcgctgctaccggcgcgcattccgggccccagctccagctgcaagagtctggacctggcctggtcaagcctagcgagacactgagcctgacctgtaccgtgtccggcgatagcatcagcagcggcgattactactggggctggatcagacagcctcctggcaaaggactggaatggatcggccacatctactacagcggcgtgacctactacaaccccagcctgaagtccagagtgaccatcagcgtggacaccagccggaaccagttctccctgaagctgtctagcgtgacagccgccgataccgccgtgtactactgcaccagagaggacagcagcaactggcggagtagaggccagggaacactggtcacagttagctctggatccggcggaggcggaagtggaggcggaggatctggcggcggaggctctttcgaacaggttcagctccagcagtctggacctggcctggtcaagcctagccagacactgtctctgacctgtgccatcagcggcgatagcgtgtcctctaatagagccgcctggaactggatcagacagagccctagcagaggactccagtggctgggcagaacctactaccgcagcaagtggtacaacgactacgccgtgtctctgcggagccggatcaccatcaatcccgtgaccagcaagaaccaggtggccctgcacatgaacagcgtgacccctgaagataccgccgtgtactactgtgccagagccggaattgtggtggtgcccggacctgagacattctactactacgaccacggcctggacgtgtggggccagggaacaacagtgactgtctcttctacgcgtgaggacctgaagaacgtgttcccacctgaggtggccgtgttcgagcctagcgaggccgagatcagccacacccagaaagccaccctcgtgtgcctggctaccggcttctaccccgaccatgtggaactgtcttggtgggtcaacggcaaagaggtgcacagcggcgtgtgtaccgacccccagccactgaaagaacagcccgccctgaacgacagccggtactgcctgagcagcagactgagagtgtccgccaccttctggcagaacccccggaaccacttcagatgccaggtgcagttctacggcctgagcgagaacgacgagtggacccaggacagagccaagcccgtgacccagatcgtgtctgccgaagcctggggcagagccgattgcggctttaccagcgagagctaccagcagggcgtgctgagcgccaccaacctgagcgtgatcggcttcagaatcctgctgctgaaagtggccggctttaacctgctgatgaccctgcggctgtggtccagc

SEQ ID NO: 40074 - DNA, 2214 bp, synthetic construct
  source 1..2214: mol_type = other DNA
atggccttaccagtgaccgccttgctcctgccgctggccttgctgctccacgccgccaggccggacatccagatgacacagagcccctctagcctgtctgccagcgtgggagacagagtgaccatcacctgtagagccagccagagcatcagaaactacctgaactggtatcagcaaaagcccggcaaggcccctgagctgctgattcatgctgcaagcagcctccagagcggcgtgccaagcagattttctggcagcggcagcggaaccgacttcaccctgacaatatctagcctccagcctgaggacttcgccagctactactgccagcagagctacagcgcccctcctatcacctttggacagggcaccagactggaaatcaagctcgaggacctgaagaacgtgttcccacctgaggtggccgtgttcgagcctagcgaggccgagatcagccacacccagaaagccaccctcgtgtgcctggctaccggcttctaccccgaccatgtggaactgtcttggtgggtcaacggcaaagaggtgcacagcggcgtgtgtaccgacccccagccactgaaagaacagcccgccctgaacgacagccggtactgcctgagcagcagactgagagtgtccgccaccttctggcagaacccccggaaccacttcagatgccaggtgcagttctacggcctgagcgagaacgacgagtggacccaggacagagccaagcccgtgacccagatcgtgtctgccgaagcctggggcagagccgatgatgtgattaagatccactggcaggaaaagaagtccaacaccatcctgggcagccaggaaggcaacaccatgaagaccaacgacacctacatgaagttcagctggctgaccgtgcccgagaagtccctggacaaagaacacagatgcatcgtgcggcacgaaaacaacaagaacggcgtggaccaggaaatcatcttcccacccatcaagaccgatgtgattacaatggaccccaaggacaactgctccaaggacgccaacgataccctgctgctccagctgaccaacaccagcgcctactacatgtacttgttgctgctgctgaagtccgtggtgtacttcgccatcatcacatgctgcctgctgatggctatggtcaagcggaaggacagccggggaagggccaagcgatctggatctggagcaacaaacttctcactactcaaacaagcaggtgacgtggaggagaatcccgggcctactagtatggactggatttggcgcatccttttccttgtcggcgctgctaccggcgcgcattccttcgaacaggttcagctccagcagtctggacctggcctggtcaagcctagccagacactgtctctgacctgtgccatcagcggcgatagcgtgtcctctaatagagccgcctggaactggatcagacagagccctagcagaggactccagtggctgggcagaacctactaccgcagcaagtggtacaacgactacgccgtgtctctgcggagccggatcaccatcaatcccgtgaccagcaagaaccaggtggccctgcacatgaacagcgtgacccctgaagataccgccgtgtactactgtgccagagccggaattgtggtggtgcccggacctgagacattctactactacgaccacggcctggacgtgtggggccagggaacaacagtgactgtctcttctacgcgtatccagaaccctgatcctgccgtgtaccagctgcgggatagcaagagcagcgacaagagcgtgtgtctgttcaccgacttcgacagccagaccaacgtgtcccagagcaaggactccgacgtgtacatcaccgataagtgcgtgctggacatgcggagcatggacttcaagagcaactccgccgtggcctggtccaacaagtccgatttcgcctgcgccaacgccttcaacaacagcattatccccgaggacacattcttcccaagccccgagagcagcgactccaccgaccacgtgaagcccaaagagacagagaacaccaagcagcccagcaagagctgccacaagcccaaggccatcgtgcacaccgagaaagtgaacatgatgagcctgaccgtgctgggcctgcggatgctgttcgccaaaaccgtggccgtgaacttcctgctgaccgccaagctgttcttcctcctcaccgcc

SEQ ID NO: 40075 - DNA, 2226 bp, synthetic construct
  source 1..2226: mol_type = other DNA
atggccttaccagtgaccgccttgctcctgccgctggccttgctgctccacgccgccaggccggacatccagatgacacagagcccctctagcctgtctgccagcgtgggagacagagtgaccatcacctgtagagccagccagagcatcagaaactacctgaactggtatcagcaaaagcccggcaaggcccctgagctgctgattcatgctgcaagcagcctccagagcggcgtgccaagcagattttctggcagcggcagcggaaccgacttcaccctgacaatatctagcctccagcctgaggacttcgccagctactactgccagcagagctacagcgcccctcctatcacctttggacagggcaccagactggaaatcaagctcgagatccagaaccctgatcctgccgtgtaccagctgcgggatagcaagagcagcgacaagagcgtgtgtctgttcaccgacttcgacagccagaccaacgtgtcccagagcaaggactccgacgtgtacatcaccgataagtgcgtgctggacatgcggagcatggacttcaagagcaactccgccgtggcctggtccaacaagtccgatttcgcctgcgccaacgccttcaacaacagcattatccccgaggacacattcttcccaagccccgagagcagcgactccaccgaccacgtgaagcccaaagagacagagaacaccaagcagcccagcaagagctgccacaagcccaaggccatcgtgcacaccgagaaagtgaacatgatgagcctgaccgtgctgggcctgcggatgctgttcgccaaaaccgtggccgtgaacttcctgctgaccgccaagctgttcttcctcctcaccgcccgcgccaagagaagcggatctggcgtgaagcagaccctgaatttcgacctgctgaagctggctggcgacgtggaatccaacccaggccctactagtatggactggatttggcgcatccttttccttgtcggcgctgctaccggcgcgcattccttcgaacaggttcagctccagcagtctggacctggcctggtcaagcctagccagacactgtctctgacctgtgccatcagcggcgatagcgtgtcctctaatagagccgcctggaactggatcagacagagccctagcagaggactccagtggctgggcagaacctactaccgcagcaagtggtacaacgactacgccgtgtctctgcggagccggatcaccatcaatcccgtgaccagcaagaaccaggtggccctgcacatgaacagcgtgacccctgaagataccgccgtgtactactgtgccagagccggaattgtggtggtgcccggacctgagacattctactactacgaccacggcctggacgtgtggggccagggaacaacagtgactgtctcttctacgcgtgaggacctgaagaacgtgttcccacctgaggtggccgtgttcgagcctagcgaggccgagatcagccacacccagaaagccaccctcgtgtgcctggctaccggcttctaccccgaccatgtggaactgtcttggtgggtcaacggcaaagaggtgcacagcggcgtgtgtaccgacccccagccactgaaagaacagcccgccctgaacgacagccggtactgcctgagcagcagactgagagtgtccgccaccttctggcagaacccccggaaccacttcagatgccaggtgcagttctacggcctgagcgagaacgacgagtggacccaggacagagccaagcccgtgacccagatcgtgtctgccgaagcctggggcagagccgatgatgtgattaagatccactggcaggaaaagaagtccaacaccatcctgggcagccaggaaggcaacaccatgaagaccaacgacacctacatgaagttcagctggctgaccgtgcccgagaagtccctggacaaagaacacagatgcatcgtgcggcacgaaaacaacaagaacggcgtggaccaggaaatcatcttcccacccatcaagaccgatgtgattacaatggaccccaaggacaactgctccaaggacgccaacgataccctgctgctccagctgaccaacaccagcgcctactacatgtacttgttgctgctgctgaagtccgtggtgtacttcgccatcatcacatgctgcctgctgatggctatggtcaagcggaaggacagccgggga

SEQ ID NO: 40076 - DNA, 2619 bp, synthetic construct
  source 1..2619: mol_type = other DNA
atggccttaccagtgaccgccttgctcctgccgctggccttgctgctccacgccgccaggccggaagtgcagctggttgaatctggcggaggactggttcagcctggcggatctctgagactgtcttgtgccgccagcggcttcagcttcagcgacttttggatgagctgggtccgacaggcccctggcaaaggacttgaatgggtcgccacaatcagccaggccggcagcgagaaggactacgtggactctgtgaagggcagattcaccatcagccgggacaacgccaagaagtccctgtacctccagatgaacagcctgagagccgaggacaccgccgtgtactattgtgcctctggcgtgtacagcttcgactacagaggccagggcaccctggtcacagtctcttctggtaccggcggaggcggatctggcggcggaggtagcggtggcggaggatctgaattcgacatccagatgacacagagcccctctagcctgtctgccagcgtgggagacagagtgaccatcacctgtagagccagccagagcatcagaaactacctgaactggtatcagcaaaagcccggcaaggcccctgagctgctgattcatgctgcaagcagcctccagagcggcgtgccaagcagattttctggcagcggcagcggaaccgacttcaccctgacaatatctagcctccagcctgaggacttcgccagctactactgccagcagagctacagcgcccctcctatcacctttggacagggcaccagactggaaatcaagctcgaggacctgaagaacgtgttcccacctgaggtggccgtgttcgagcctagcgaggccgagatcagccacacccagaaagccaccctcgtgtgcctggctaccggcttctaccccgaccatgtggaactgtcttggtgggtcaacggcaaagaggtgcacagcggcgtgtgtaccgacccccagccactgaaagaacagcccgccctgaacgacagccggtactgcctgagcagcagactgagagtgtccgccaccttctggcagaacccccggaaccacttcagatgccaggtgcagttctacggcctgagcgagaacgacgagtggacccaggacagagccaagcccgtgacccagatcgtgtctgccgaagcctggggcagagccgatgatgtgattaagatccactggcaggaaaagaagtccaacaccatcctgggcagccaggaaggcaacaccatgaagaccaacgacacctacatgaagttcagctggctgaccgtgcccgagaagtccctggacaaagaacacagatgcatcgtgcggcacgaaaacaacaagaacggcgtggaccaggaaatcatcttcccacccatcaagaccgatgtgattacaatggaccccaaggacaactgctccaaggacgccaacgataccctgctgctccagctgaccaacaccagcgcctactacatgtacttgttgctgctgctgaagtccgtggtgtacttcgccatcatcacatgctgcctgctgatggctatggtcaagcggaaggacagccggggaagggccaagcgatctggatctggagcaacaaacttctcactactcaaacaagcaggtgacgtggaggagaatcccgggcctactagtatggactggatttggcgcatccttttccttgtcggcgctgctaccggcgcgcattccttcgaacaggttcagctccagcagtctggacctggcctggtcaagcctagccagacactgtctctgacctgtgccatcagcggcgatagcgtgtcctctaatagagccgcctggaactggatcagacagagccctagcagaggactccagtggctgggcagaacctactaccgcagcaagtggtacaacgactacgccgtgtctctgcggagccggatcaccatcaatcccgtgaccagcaagaaccaggtggccctgcacatgaacagcgtgacccctgaagataccgccgtgtactactgtgccagagccggaattgtggtggtgcccggacctgagacattctactactacgaccacggcctggacgtgtggggccagggaacaacagtgactgtctcttctacgcgtatccagaaccctgatcctgccgtgtaccagctgcgggatagcaagagcagcgacaagagcgtgtgtctgttcaccgacttcgacagccagaccaacgtgtcccagagcaaggactccgacgtgtacatcaccgataagtgcgtgctggacatgcggagcatggacttcaagagcaactccgccgtggcctggtccaacaagtccgatttcgcctgcgccaacgccttcaacaacagcattatccccgaggacacattcttcccaagccccgagagcagcgactccaccgaccacgtgaagcccaaagagacagagaacaccaagcagcccagcaagagctgccacaagcccaaggccatcgtgcacaccgagaaagtgaacatgatgagcctgaccgtgctgggcctgcggatgctgttcgccaaaaccgtggccgtgaacttcctgctgaccgccaagctgttcttcctcctcaccgcc

SEQ ID NO: 40077 - DNA, 2631 bp, synthetic construct
  source 1..2631: mol_type = other DNA
atggccttaccagtgaccgccttgctcctgccgctggccttgctgctccacgccgccaggccggaagtgcagctggttgaatctggcggaggactggttcagcctggcggatctctgagactgtcttgtgccgccagcggcttcagcttcagcgacttttggatgagctgggtccgacaggcccctggcaaaggacttgaatgggtcgccacaatcagccaggccggcagcgagaaggactacgtggactctgtgaagggcagattcaccatcagccgggacaacgccaagaagtccctgtacctccagatgaacagcctgagagccgaggacaccgccgtgtactattgtgcctctggcgtgtacagcttcgactacagaggccagggcaccctggtcacagtctcttctggtaccggcggaggcggatctggcggcggaggtagcggtggcggaggatctgaattcgacatccagatgacacagagcccctctagcctgtctgccagcgtgggagacagagtgaccatcacctgtagagccagccagagcatcagaaactacctgaactggtatcagcaaaagcccggcaaggcccctgagctgctgattcatgctgcaagcagcctccagagcggcgtgccaagcagattttctggcagcggcagcggaaccgacttcaccctgacaatatctagcctccagcctgaggacttcgccagctactactgccagcagagctacagcgcccctcctatcacctttggacagggcaccagactggaaatcaagctcgagatccagaaccctgatcctgccgtgtaccagctgcgggatagcaagagcagcgacaagagcgtgtgtctgttcaccgacttcgacagccagaccaacgtgtcccagagcaaggactccgacgtgtacatcaccgataagtgcgtgctggacatgcggagcatggacttcaagagcaactccgccgtggcctggtccaacaagtccgatttcgcctgcgccaacgccttcaacaacagcattatccccgaggacacattcttcccaagccccgagagcagcgactccaccgaccacgtgaagcccaaagagacagagaacaccaagcagcccagcaagagctgccacaagcccaaggccatcgtgcacaccgagaaagtgaacatgatgagcctgaccgtgctgggcctgcggatgctgttcgccaaaaccgtggccgtgaacttcctgctgaccgccaagctgttcttcctcctcaccgcccgcgccaagagaagcggatctggcgtgaagcagaccctgaatttcgacctgctgaagctggctggcgacgtggaatccaacccaggccctactagtatggactggatttggcgcatccttttccttgtcggcgctgctaccggcgcgcattccttcgaacaggttcagctccagcagtctggacctggcctggtcaagcctagccagacactgtctctgacctgtgccatcagcggcgatagcgtgtcctctaatagagccgcctggaactggatcagacagagccctagcagaggactccagtggctgggcagaacctactaccgcagcaagtggtacaacgactacgccgtgtctctgcggagccggatcaccatcaatcccgtgaccagcaagaaccaggtggccctgcacatgaacagcgtgacccctgaagataccgccgtgtactactgtgccagagccggaattgtggtggtgcccggacctgagacattctactactacgaccacggcctggacgtgtggggccagggaacaacagtgactgtctcttctacgcgtgaggacctgaagaacgtgttcccacctgaggtggccgtgttcgagcctagcgaggccgagatcagccacacccagaaagccaccctcgtgtgcctggctaccggcttctaccccgaccatgtggaactgtcttggtgggtcaacggcaaagaggtgcacagcggcgtgtgtaccgacccccagccactgaaagaacagcccgccctgaacgacagccggtactgcctgagcagcagactgagagtgtccgccaccttctggcagaacccccggaaccacttcagatgccaggtgcagttctacggcctgagcgagaacgacgagtggacccaggacagagccaagcccgtgacccagatcgtgtctgccgaagcctggggcagagccgatgatgtgattaagatccactggcaggaaaagaagtccaacaccatcctgggcagccaggaaggcaacaccatgaagaccaacgacacctacatgaagttcagctggctgaccgtgcccgagaagtccctggacaaagaacacagatgcatcgtgcggcacgaaaacaacaagaacggcgtggaccaggaaatcatcttcccacccatcaagaccgatgtgattacaatggaccccaaggacaactgctccaaggacgccaacgataccctgctgctccagctgaccaacaccagcgcctactacatgtacttgttgctgctgctgaagtccgtggtgtacttcgccatcatcacatgctgcctgctgatggctatggtcaagcggaaggacagccgggga

SEQ ID NO: 40078 - DNA, 3030 bp, synthetic construct
  source 1..3030: mol_type = other DNA
atggccttaccagtgaccgccttgctcctgccgctggccttgctgctccacgccgccaggccggaagtgcagctggttgaatctggcggaggactggttcagcctggcggatctctgagactgtcttgtgccgccagcggcttcagcttcagcgacttttggatgagctgggtccgacaggcccctggcaaaggacttgaatgggtcgccacaatcagccaggccggcagcgagaaggactacgtggactctgtgaagggcagattcaccatcagccgggacaacgccaagaagtccctgtacctccagatgaacagcctgagagccgaggacaccgccgtgtactattgtgcctctggcgtgtacagcttcgactacagaggccagggcaccctggtcacagtctcttctggtaccggcggaggcggatctggcggcggaggtagcggtggcggaggatctgaattcgacatccagatgacacagagcccctctagcctgtctgccagcgtgggagacagagtgaccatcacctgtagagccagccagagcatcagaaactacctgaactggtatcagcaaaagcccggcaaggcccctgagctgctgattcatgctgcaagcagcctccagagcggcgtgccaagcagattttctggcagcggcagcggaaccgacttcaccctgacaatatctagcctccagcctgaggacttcgccagctactactgccagcagagctacagcgcccctcctatcacctttggacagggcaccagactggaaatcaagctcgaggacctgaagaacgtgttcccacctgaggtggccgtgttcgagcctagcgaggccgagatcagccacacccagaaagccaccctcgtgtgcctggctaccggcttctaccccgaccatgtggaactgtcttggtgggtcaacggcaaagaggtgcacagcggcgtgtgtaccgacccccagccactgaaagaacagcccgccctgaacgacagccggtactgcctgagcagcagactgagagtgtccgccaccttctggcagaacccccggaaccacttcagatgccaggtgcagttctacggcctgagcgagaacgacgagtggacccaggacagagccaagcccgtgacccagatcgtgtctgccgaagcctggggcagagccgatgatgtgattaagatccactggcaggaaaagaagtccaacaccatcctgggcagccaggaaggcaacaccatgaagaccaacgacacctacatgaagttcagctggctgaccgtgcccgagaagtccctggacaaagaacacagatgcatcgtgcggcacgaaaacaacaagaacggcgtggaccaggaaatcatcttcccacccatcaagaccgatgtgattacaatggaccccaaggacaactgctccaaggacgccaacgataccctgctgctccagctgaccaacaccagcgcctactacatgtacttgttgctgctgctgaagtccgtggtgtacttcgccatcatcacatgctgcctgctgatggctatggtcaagcggaaggacagccggggaagggccaagcgatctggatctggagcaacaaacttctcactactcaaacaagcaggtgacgtggaggagaatcccgggcctactagtatggactggatttggcgcatccttttccttgtcggcgctgctaccggcgcgcattccgggccccagctccagctgcaagagtctggacctggcctggtcaagcctagcgagacactgagcctgacctgtaccgtgtccggcgatagcatcagcagcggcgattactactggggctggatcagacagcctcctggcaaaggactggaatggatcggccacatctactacagcggcgtgacctactacaaccccagcctgaagtccagagtgaccatcagcgtggacaccagccggaaccagttctccctgaagctgtctagcgtgacagccgccgataccgccgtgtactactgcaccagagaggacagcagcaactggcggagtagaggccagggaacactggtcacagttagctctggatccggcggaggcggaagtggaggcggaggatctggcggcggaggctctttcgaacaggttcagctccagcagtctggacctggcctggtcaagcctagccagacactgtctctgacctgtgccatcagcggcgatagcgtgtcctctaatagagccgcctggaactggatcagacagagccctagcagaggactccagtggctgggcagaacctactaccgcagcaagtggtacaacgactacgccgtgtctctgcggagccggatcaccatcaatcccgtgaccagcaagaaccaggtggccctgcacatgaacagcgtgacccctgaagataccgccgtgtactactgtgccagagccggaattgtggtggtgcccggacctgagacattctactactacgaccacggcctggacgtgtggggccagggaacaacagtgactgtctcttctacgcgtatccagaaccctgatcctgccgtgtaccagctgcgggatagcaagagcagcgacaagagcgtgtgtctgttcaccgacttcgacagccagaccaacgtgtcccagagcaaggactccgacgtgtacatcaccgataagtgcgtgctggacatgcggagcatggacttcaagagcaactccgccgtggcctggtccaacaagtccgatttcgcctgcgccaacgccttcaacaacagcattatccccgaggacacattcttcccaagccccgagagcagcgactccaccgaccacgtgaagcccaaagagacagagaacaccaagcagcccagcaagagctgccacaagcccaaggccatcgtgcacaccgagaaagtgaacatgatgagcctgaccgtgctgggcctgcggatgctgttcgccaaaaccgtggccgtgaacttcctgctgaccgccaagctgttcttcctcctcaccgcc

SEQ ID NO: 40079 - DNA, 3042 bp, synthetic construct
  source 1..3042: mol_type = other DNA
atggccttaccagtgaccgccttgctcctgccgctggccttgctgctccacgccgccaggccggaagtgcagctggttgaatctggcggaggactggttcagcctggcggatctctgagactgtcttgtgccgccagcggcttcagcttcagcgacttttggatgagctgggtccgacaggcccctggcaaaggacttgaatgggtcgccacaatcagccaggccggcagcgagaaggactacgtggactctgtgaagggcagattcaccatcagccgggacaacgccaagaagtccctgtacctccagatgaacagcctgagagccgaggacaccgccgtgtactattgtgcctctggcgtgtacagcttcgactacagaggccagggcaccctggtcacagtctcttctggtaccggcggaggcggatctggcggcggaggtagcggtggcggaggatctgaattcgacatccagatgacacagagcccctctagcctgtctgccagcgtgggagacagagtgaccatcacctgtagagccagccagagcatcagaaactacctgaactggtatcagcaaaagcccggcaaggcccctgagctgctgattcatgctgcaagcagcctccagagcggcgtgccaagcagattttctggcagcggcagcggaaccgacttcaccctgacaatatctagcctccagcctgaggacttcgccagctactactgccagcagagctacagcgcccctcctatcacctttggacagggcaccagactggaaatcaagctcgagatccagaaccctgatcctgccgtgtaccagctgcgggatagcaagagcagcgacaagagcgtgtgtctgttcaccgacttcgacagccagaccaacgtgtcccagagcaaggactccgacgtgtacatcaccgataagtgcgtgctggacatgcggagcatggacttcaagagcaactccgccgtggcctggtccaacaagtccgatttcgcctgcgccaacgccttcaacaacagcattatccccgaggacacattcttcccaagccccgagagcagcgactccaccgaccacgtgaagcccaaagagacagagaacaccaagcagcccagcaagagctgccacaagcccaaggccatcgtgcacaccgagaaagtgaacatgatgagcctgaccgtgctgggcctgcggatgctgttcgccaaaaccgtggccgtgaacttcctgctgaccgccaagctgttcttcctcctcaccgcccgcgccaagagaagcggatctggcgtgaagcagaccctgaatttcgacctgctgaagctggctggcgacgtggaatccaacccaggccctactagtatggactggatttggcgcatccttttccttgtcggcgctgctaccggcgcgcattccgggccccagctccagctgcaagagtctggacctggcctggtcaagcctagcgagacactgagcctgacctgtaccgtgtccggcgatagcatcagcagcggcgattactactggggctggatcagacagcctcctggcaaaggactggaatggatcggccacatctactacagcggcgtgacctactacaaccccagcctgaagtccagagtgaccatcagcgtggacaccagccggaaccagttctccctgaagctgtctagcgtgacagccgccgataccgccgtgtactactgcaccagagaggacagcagcaactggcggagtagaggccagggaacactggtcacagttagctctggatccggcggaggcggaagtggaggcggaggatctggcggcggaggctctttcgaacaggttcagctccagcagtctggacctggcctggtcaagcctagccagacactgtctctgacctgtgccatcagcggcgatagcgtgtcctctaatagagccgcctggaactggatcagacagagccctagcagaggactccagtggctgggcagaacctactaccgcagcaagtggtacaacgactacgccgtgtctctgcggagccggatcaccatcaatcccgtgaccagcaagaaccaggtggccctgcacatgaacagcgtgacccctgaagataccgccgtgtactactgtgccagagccggaattgtggtggtgcccggacctgagacattctactactacgaccacggcctggacgtgtggggccagggaacaacagtgactgtctcttctacgcgtgaggacctgaagaacgtgttcccacctgaggtggccgtgttcgagcctagcgaggccgagatcagccacacccagaaagccaccctcgtgtgcctggctaccggcttctaccccgaccatgtggaactgtcttggtgggtcaacggcaaagaggtgcacagcggcgtgtgtaccgacccccagccactgaaagaacagcccgccctgaacgacagccggtactgcctgagcagcagactgagagtgtccgccaccttctggcagaacccccggaaccacttcagatgccaggtgcagttctacggcctgagcgagaacgacgagtggacccaggacagagccaagcccgtgacccagatcgtgtctgccgaagcctggggcagagccgatgatgtgattaagatccactggcaggaaaagaagtccaacaccatcctgggcagccaggaaggcaacaccatgaagaccaacgacacctacatgaagttcagctggctgaccgtgcccgagaagtccctggacaaagaacacagatgcatcgtgcggcacgaaaacaacaagaacggcgtggaccaggaaatcatcttcccacccatcaagaccgatgtgattacaatggaccccaaggacaactgctccaaggacgccaacgataccctgctgctccagctgaccaacaccagcgcctactacatgtacttgttgctgctgctgaagtccgtggtgtacttcgccatcatcacatgctgcctgctgatggctatggtcaagcggaaggacagccgggga

SEQ ID NO: 40080 - DNA, 2208 bp, synthetic construct
  source 1..2208: mol_type = other DNA
atggccttaccagtgaccgccttgctcctgccgctggccttgctgctccacgccgccaggccggacatccagatgacacagagcccctctagcctgtctgccagcgtgggagacagagtgaccatcacctgtagagccagccagagcatcagaaactacctgaactggtatcagcaaaagcccggcaaggcccctgagctgctgattcatgctgcaagcagcctccagagcggcgtgccaagcagattttctggcagcggcagcggaaccgacttcaccctgacaatatctagcctccagcctgaggacttcgccagctactactgccagcagagctacagcgcccctcctatcacctttggacagggcaccagactggaaatcaagctcgaggacctgaagaacgtgttcccacctgaggtggccgtgttcgagcctagcgaggccgagatcagccacacccagaaagccaccctcgtgtgcctggctaccggcttctaccccgaccatgtggaactgtcttggtgggtcaacggcaaagaggtgcacagcggcgtgtgtaccgacccccagccactgaaagaacagcccgccctgaacgacagccggtactgcctgagcagcagactgagagtgtccgccaccttctggcagaacccccggaaccacttcagatgccaggtgcagttctacggcctgagcgagaacgacgagtggacccaggacagagccaagcccgtgacccagatcgtgtctgccgaagcctggggcagagccgatgatgtgattaagatccactggcaggaaaagaagtccaacaccatcctgggcagccaggaaggcaacaccatgaagaccaacgacacctacatgaagttcagctggctgaccgtgcccgagaagtccctggacaaagaacacagatgcatcgtgcggcacgaaaacaacaagaacggcgtggaccaggaaatcatcttcccacccatcaagaccgatgtgattacaatggaccccaaggacaactgctccaaggacgccaacgataccctgctgctccagctgaccaacaccagcgcctactacatgtacttgttgctgctgctgaagtccgtggtgtacttcgccatcatcacatgctgcctgctgcggagaaccgccttctgctgcaacggcgagaagtctagggccaagcgatctggatctggagcaacaaacttctcactactcaaacaagcaggtgacgtggaggagaatcccgggcctactagtatggactggatttggcgcatccttttccttgtcggcgctgctaccggcgcgcattccttcgaacaggttcagctccagcagtctggacctggcctggtcaagcctagccagacactgtctctgacctgtgccatcagcggcgatagcgtgtcctctaatagagccgcctggaactggatcagacagagccctagcagaggactccagtggctgggcagaacctactaccgcagcaagtggtacaacgactacgccgtgtctctgcggagccggatcaccatcaatcccgtgaccagcaagaaccaggtggccctgcacatgaacagcgtgacccctgaagataccgccgtgtactactgtgccagagccggaattgtggtggtgcccggacctgagacattctactactacgaccacggcctggacgtgtggggccagggaacaacagtgactgtctcttctacgcgtatccagaaccctgatcctgccgtgtaccagctgcgggatagcaagagcagcgacaagagcgtgtgtctgttcaccgacttcgacagccagaccaacgtgtcccagagcaaggactccgacgtgtacatcaccgataagtgcgtgctggacatgcggagcatggacttcaagagcaactccgccgtggcctggtccaacaagtccgatttcgcctgcgccaacgccttcaacaacagcattatccccgaggacacattcttcccaagccccgagagcagcgactccaccgaccacgtgaagcccaaagagacagagaacaccaagcagcccagcaagagctgccacaagcccaaggccatcgtgcacaccgagaaagtgaacatgatgagcctgaccgtgctgggcctgcggatgctgttcgccaaaaccgtggccgtgaacttcctgctgaccgccaagctgttcttcctc

SEQ ID NO: 40081 - DNA, 2220 bp, synthetic construct
  source 1..2220: mol_type = other DNA
atggccttaccagtgaccgccttgctcctgccgctggccttgctgctccacgccgccaggccggacatccagatgacacagagcccctctagcctgtctgccagcgtgggagacagagtgaccatcacctgtagagccagccagagcatcagaaactacctgaactggtatcagcaaaagcccggcaaggcccctgagctgctgattcatgctgcaagcagcctccagagcggcgtgccaagcagattttctggcagcggcagcggaaccgacttcaccctgacaatatctagcctccagcctgaggacttcgccagctactactgccagcagagctacagcgcccctcctatcacctttggacagggcaccagactggaaatcaagctcgagatccagaaccctgatcctgccgtgtaccagctgcgggatagcaagagcagcgacaagagcgtgtgtctgttcaccgacttcgacagccagaccaacgtgtcccagagcaaggactccgacgtgtacatcaccgataagtgcgtgctggacatgcggagcatggacttcaagagcaactccgccgtggcctggtccaacaagtccgatttcgcctgcgccaacgccttcaacaacagcattatccccgaggacacattcttcccaagccccgagagcagcgactccaccgaccacgtgaagcccaaagagacagagaacaccaagcagcccagcaagagctgccacaagcccaaggccatcgtgcacaccgagaaagtgaacatgatgagcctgaccgtgctgggcctgcggatgctgttcgccaaaaccgtggccgtgaacttcctgctgaccgccaagctgttcttcctccgcgccaagagaagcggatctggcgtgaagcagaccctgaatttcgacctgctgaagctggctggcgacgtggaatccaacccaggccctactagtatggactggatttggcgcatccttttccttgtcggcgctgctaccggcgcgcattccttcgaacaggttcagctccagcagtctggacctggcctggtcaagcctagccagacactgtctctgacctgtgccatcagcggcgatagcgtgtcctctaatagagccgcctggaactggatcagacagagccctagcagaggactccagtggctgggcagaacctactaccgcagcaagtggtacaacgactacgccgtgtctctgcggagccggatcaccatcaatcccgtgaccagcaagaaccaggtggccctgcacatgaacagcgtgacccctgaagataccgccgtgtactactgtgccagagccggaattgtggtggtgcccggacctgagacattctactactacgaccacggcctggacgtgtggggccagggaacaacagtgactgtctcttctacgcgtgaggacctgaagaacgtgttcccacctgaggtggccgtgttcgagcctagcgaggccgagatcagccacacccagaaagccaccctcgtgtgcctggctaccggcttctaccccgaccatgtggaactgtcttggtgggtcaacggcaaagaggtgcacagcggcgtgtgtaccgacccccagccactgaaagaacagcccgccctgaacgacagccggtactgcctgagcagcagactgagagtgtccgccaccttctggcagaacccccggaaccacttcagatgccaggtgcagttctacggcctgagcgagaacgacgagtggacccaggacagagccaagcccgtgacccagatcgtgtctgccgaagcctggggcagagccgatgatgtgattaagatccactggcaggaaaagaagtccaacaccatcctgggcagccaggaaggcaacaccatgaagaccaacgacacctacatgaagttcagctggctgaccgtgcccgagaagtccctggacaaagaacacagatgcatcgtgcggcacgaaaacaacaagaacggcgtggaccaggaaatcatcttcccacccatcaagaccgatgtgattacaatggaccccaaggacaactgctccaaggacgccaacgataccctgctgctccagctgaccaacaccagcgcctactacatgtacttgttgctgctgctgaagtccgtggtgtacttcgccatcatcacatgctgcctgctgcggagaaccgccttctgctgcaacggcgagaagtct

SEQ ID NO: 40082 - DNA, 2613 bp, synthetic construct
  source 1..2613: mol_type = other DNA
atggccttaccagtgaccgccttgctcctgccgctggccttgctgctccacgccgccaggccggaagtgcagctggttgaatctggcggaggactggttcagcctggcggatctctgagactgtcttgtgccgccagcggcttcagcttcagcgacttttggatgagctgggtccgacaggcccctggcaaaggacttgaatgggtcgccacaatcagccaggccggcagcgagaaggactacgtggactctgtgaagggcagattcaccatcagccgggacaacgccaagaagtccctgtacctccagatgaacagcctgagagccgaggacaccgccgtgtactattgtgcctctggcgtgtacagcttcgactacagaggccagggcaccctggtcacagtctcttctggtaccggcggaggcggatctggcggcggaggtagcggtggcggaggatctgaattcgacatccagatgacacagagcccctctagcctgtctgccagcgtgggagacagagtgaccatcacctgtagagccagccagagcatcagaaactacctgaactggtatcagcaaaagcccggcaaggcccctgagctgctgattcatgctgcaagcagcctccagagcggcgtgccaagcagattttctggcagcggcagcggaaccgacttcaccctgacaatatctagcctccagcctgaggacttcgccagctactactgccagcagagctacagcgcccctcctatcacctttggacagggcaccagactggaaatcaagctcgaggacctgaagaacgtgttcccacctgaggtggccgtgttcgagcctagcgaggccgagatcagccacacccagaaagccaccctcgtgtgcctggctaccggcttctaccccgaccatgtggaactgtcttggtgggtcaacggcaaagaggtgcacagcggcgtgtgtaccgacccccagccactgaaagaacagcccgccctgaacgacagccggtactgcctgagcagcagactgagagtgtccgccaccttctggcagaacccccggaaccacttcagatgccaggtgcagttctacggcctgagcgagaacgacgagtggacccaggacagagccaagcccgtgacccagatcgtgtctgccgaagcctggggcagagccgatgatgtgattaagatccactggcaggaaaagaagtccaacaccatcctgggcagccaggaaggcaacaccatgaagaccaacgacacctacatgaagttcagctggctgaccgtgcccgagaagtccctggacaaagaacacagatgcatcgtgcggcacgaaaacaacaagaacggcgtggaccaggaaatcatcttcccacccatcaagaccgatgtgattacaatggaccccaaggacaactgctccaaggacgccaacgataccctgctgctccagctgaccaacaccagcgcctactacatgtacttgttgctgctgctgaagtccgtggtgtacttcgccatcatcacatgctgcctgctgcggagaaccgccttctgctgcaacggcgagaagtctagggccaagcgatctggatctggagcaacaaacttctcactactcaaacaagcaggtgacgtggaggagaatcccgggcctactagtatggactggatttggcgcatccttttccttgtcggcgctgctaccggcgcgcattccttcgaacaggttcagctccagcagtctggacctggcctggtcaagcctagccagacactgtctctgacctgtgccatcagcggcgatagcgtgtcctctaatagagccgcctggaactggatcagacagagccctagcagaggactccagtggctgggcagaacctactaccgcagcaagtggtacaacgactacgccgtgtctctgcggagccggatcaccatcaatcccgtgaccagcaagaaccaggtggccctgcacatgaacagcgtgacccctgaagataccgccgtgtactactgtgccagagccggaattgtggtggtgcccggacctgagacattctactactacgaccacggcctggacgtgtggggccagggaacaacagtgactgtctcttctacgcgtatccagaaccctgatcctgccgtgtaccagctgcgggatagcaagagcagcgacaagagcgtgtgtctgttcaccgacttcgacagccagaccaacgtgtcccagagcaaggactccgacgtgtacatcaccgataagtgcgtgctggacatgcggagcatggacttcaagagcaactccgccgtggcctggtccaacaagtccgatttcgcctgcgccaacgccttcaacaacagcattatccccgaggacacattcttcccaagccccgagagcagcgactccaccgaccacgtgaagcccaaagagacagagaacaccaagcagcccagcaagagctgccacaagcccaaggccatcgtgcacaccgagaaagtgaacatgatgagcctgaccgtgctgggcctgcggatgctgttcgccaaaaccgtggccgtgaacttcctgctgaccgccaagctgttcttcctc

SEQ ID NO: 40083 - DNA, 3024 bp, synthetic construct
  source 1..3024: mol_type = other DNA
atggccttaccagtgaccgccttgctcctgccgctggccttgctgctccacgccgccaggccggaagtgcagctggttgaatctggcggaggactggttcagcctggcggatctctgagactgtcttgtgccgccagcggcttcagcttcagcgacttttggatgagctgggtccgacaggcccctggcaaaggacttgaatgggtcgccacaatcagccaggccggcagcgagaaggactacgtggactctgtgaagggcagattcaccatcagccgggacaacgccaagaagtccctgtacctccagatgaacagcctgagagccgaggacaccgccgtgtactattgtgcctctggcgtgtacagcttcgactacagaggccagggcaccctggtcacagtctcttctggtaccggcggaggcggatctggcggcggaggtagcggtggcggaggatctgaattcgacatccagatgacacagagcccctctagcctgtctgccagcgtgggagacagagtgaccatcacctgtagagccagccagagcatcagaaactacctgaactggtatcagcaaaagcccggcaaggcccctgagctgctgattcatgctgcaagcagcctccagagcggcgtgccaagcagattttctggcagcggcagcggaaccgacttcaccctgacaatatctagcctccagcctgaggacttcgccagctactactgccagcagagctacagcgcccctcctatcacctttggacagggcaccagactggaaatcaagctcgaggacctgaagaacgtgttcccacctgaggtggccgtgttcgagcctagcgaggccgagatcagccacacccagaaagccaccctcgtgtgcctggctaccggcttctaccccgaccatgtggaactgtcttggtgggtcaacggcaaagaggtgcacagcggcgtgtgtaccgacccccagccactgaaagaacagcccgccctgaacgacagccggtactgcctgagcagcagactgagagtgtccgccaccttctggcagaacccccggaaccacttcagatgccaggtgcagttctacggcctgagcgagaacgacgagtggacccaggacagagccaagcccgtgacccagatcgtgtctgccgaagcctggggcagagccgatgatgtgattaagatccactggcaggaaaagaagtccaacaccatcctgggcagccaggaaggcaacaccatgaagaccaacgacacctacatgaagttcagctggctgaccgtgcccgagaagtccctggacaaagaacacagatgcatcgtgcggcacgaaaacaacaagaacggcgtggaccaggaaatcatcttcccacccatcaagaccgatgtgattacaatggaccccaaggacaactgctccaaggacgccaacgataccctgctgctccagctgaccaacaccagcgcctactacatgtacttgttgctgctgctgaagtccgtggtgtacttcgccatcatcacatgctgcctgctgcggagaaccgccttctgctgcaacggcgagaagtctagggccaagcgatctggatctggagcaacaaacttctcactactcaaacaagcaggtgacgtggaggagaatcccgggcctactagtatggactggatttggcgcatccttttccttgtcggcgctgctaccggcgcgcattccgggccccagctccagctgcaagagtctggacctggcctggtcaagcctagcgagacactgagcctgacctgtaccgtgtccggcgatagcatcagcagcggcgattactactggggctggatcagacagcctcctggcaaaggactggaatggatcggccacatctactacagcggcgtgacctactacaaccccagcctgaagtccagagtgaccatcagcgtggacaccagccggaaccagttctccctgaagctgtctagcgtgacagccgccgataccgccgtgtactactgcaccagagaggacagcagcaactggcggagtagaggccagggaacactggtcacagttagctctggatccggcggaggcggaagtggaggcggaggatctggcggcggaggctctttcgaacaggttcagctccagcagtctggacctggcctggtcaagcctagccagacactgtctctgacctgtgccatcagcggcgatagcgtgtcctctaatagagccgcctggaactggatcagacagagccctagcagaggactccagtggctgggcagaacctactaccgcagcaagtggtacaacgactacgccgtgtctctgcggagccggatcaccatcaatcccgtgaccagcaagaaccaggtggccctgcacatgaacagcgtgacccctgaagataccgccgtgtactactgtgccagagccggaattgtggtggtgcccggacctgagacattctactactacgaccacggcctggacgtgtggggccagggaacaacagtgactgtctcttctacgcgtatccagaaccctgatcctgccgtgtaccagctgcgggatagcaagagcagcgacaagagcgtgtgtctgttcaccgacttcgacagccagaccaacgtgtcccagagcaaggactccgacgtgtacatcaccgataagtgcgtgctggacatgcggagcatggacttcaagagcaactccgccgtggcctggtccaacaagtccgatttcgcctgcgccaacgccttcaacaacagcattatccccgaggacacattcttcccaagccccgagagcagcgactccaccgaccacgtgaagcccaaagagacagagaacaccaagcagcccagcaagagctgccacaagcccaaggccatcgtgcacaccgagaaagtgaacatgatgagcctgaccgtgctgggcctgcggatgctgttcgccaaaaccgtggccgtgaacttcctgctgaccgccaagctgttcttcctc

SEQ ID NO: 40084 - DNA, 1902 bp, synthetic construct
  source 1..1902: mol_type = other DNA
atggccttaccagtgaccgccttgctcctgccgctggccttgctgctccacgccgccaggccggacatccagatgacacagagcccctctagcctgtctgccagcgtgggagacagagtgaccatcacctgtagagccagccagagcatcagaaactacctgaactggtatcagcaaaagcccggcaaggcccctgagctgctgattcatgctgcaagcagcctccagagcggcgtgccaagcagattttctggcagcggcagcggaaccgacttcaccctgacaatatctagcctccagcctgaggacttcgccagctactactgccagcagagctacagcgcccctcctatcacctttggacagggcaccagactggaaatcaagctcgaggacctgaagaacgtgttcccacctgaggtggccgtgttcgagcctagcgaggccgagatcagccacacccagaaagccaccctcgtgtgcctggctaccggcttctaccccgaccatgtggaactgtcttggtgggtcaacggcaaagaggtgcacagcggcgtgtctaccgacccccagccactgaaagaacagcccgccctgaacgacagccggtactgcctgagcagcagactgagagtgtccgccaccttctggcagaacccccggaaccacttcagatgccaggtgcagttctacggcctgagcgagaacgacgagtggacccaggacagagccaagcccgtgacccagatcgtgtctgccgaagcctggggcagagccgattgcgacgtgaagctggtggaaaagagcttcgagacagacaccaacctgaacttccagaacctgagcgtgatcggcttcagaatcctgctgctgaaagtggccggctttaacctgctgatgaccctgcggctgtggtccagcagggccaagcgatctggatctggagcaacaaacttctcactactcaaacaagcaggtgacgtggaggagaatcccgggcctactagtatggactggatttggcgcatccttttccttgtcggcgctgctaccggcgcgcattccttcgaacaggttcagctccagcagtctggacctggcctggtcaagcctagccagacactgtctctgacctgtgccatcagcggcgatagcgtgtcctctaatagagccgcctggaactggatcagacagagccctagcagaggactccagtggctgggcagaacctactaccgcagcaagtggtacaacgactacgccgtgtctctgcggagccggatcaccatcaatcccgtgaccagcaagaaccaggtggccctgcacatgaacagcgtgacccctgaagataccgccgtgtactactgtgccagagccggaattgtggtggtgcccggacctgagacattctactactacgaccacggcctggacgtgtggggccagggaacaacagtgactgtctcttctacgcgtatccagaaccctgatcctgccgtgtaccagctgcgggatagcaagagcagcgacaagagcgtgtgtctgttcaccgacttcgacagccagaccaacgtgtcccagagcaaggactccgacgtgtacatcaccgataagaccgtgctggacatgcggagcatggacttcaagagcaactccgccgtggcctggtccaacaagtccgatttcgcctgcgccaacgccttcaacaacagcattatccccgaggacacattcttcccaagccccgagagcagctgcggctttaccagcgagagctaccagcagggcgtgctgagcgccaccatcctgtacgagatcctgctgggcaaggccaccctgtacgccgtgctggtgtctgccctggtgctgatggctatggtcaagcggaaggacagccgggga

SEQ ID NO: 40085 - DNA, 1902 bp, synthetic construct
  source 1..1902: mol_type = other DNA
atggccttaccagtgaccgccttgctcctgccgctggccttgctgctccacgccgccaggccggacatccagatgacacagagcccctctagcctgtctgccagcgtgggagacagagtgaccatcacctgtagagccagccagagcatcagaaactacctgaactggtatcagcaaaagcccggcaaggcccctgagctgctgattcatgctgcaagcagcctccagagcggcgtgccaagcagattttctggcagcggcagcggaaccgacttcaccctgacaatatctagcctccagcctgaggacttcgccagctactactgccagcagagctacagcgcccctcctatcacctttggacagggcaccagactggaaatcaagctcgaggacctgaagaacgtgttcccacctgaggtggccgtgttcgagcctagcgaggccgagatcagccacacccagaaagccaccctcgtgtgcctggctaccggcttctaccccgaccatgtggaactgtcttggtgggtcaacggcaaagaggtgcacagcggcgtgtctaccgacccccagccactgaaagaacagcccgccctgaacgacagccggtactgcctgagcagcagactgagagtgtccgccaccttctggcagaacccccggaaccacttcagatgccaggtgcagttctacggcctgagcgagaacgacgagtggacccaggacagagccaagcccgtgacccagatcgtgtctgccgaagcctggggcagagccgattgcggctttaccagcgagagctaccagcagggcgtgctgagcgccaccaacctgagcgtgatcggcttcagaatcctgctgctgaaagtggccggctttaacctgctgatgaccctgcggctgtggtccagcagggccaagcgatctggatctggagcaacaaacttctcactactcaaacaagcaggtgacgtggaggagaatcccgggcctactagtatggactggatttggcgcatccttttccttgtcggcgctgctaccggcgcgcattccttcgaacaggttcagctccagcagtctggacctggcctggtcaagcctagccagacactgtctctgacctgtgccatcagcggcgatagcgtgtcctctaatagagccgcctggaactggatcagacagagccctagcagaggactccagtggctgggcagaacctactaccgcagcaagtggtacaacgactacgccgtgtctctgcggagccggatcaccatcaatcccgtgaccagcaagaaccaggtggccctgcacatgaacagcgtgacccctgaagataccgccgtgtactactgtgccagagccggaattgtggtggtgcccggacctgagacattctactactacgaccacggcctggacgtgtggggccagggaacaacagtgactgtctcttctacgcgtatccagaaccctgatcctgccgtgtaccagctgcgggatagcaagagcagcgacaagagcgtgtgtctgttcaccgacttcgacagccagaccaacgtgtcccagagcaaggactccgacgtgtacatcaccgataagaccgtgctggacatgcggagcatggacttcaagagcaactccgccgtggcctggtccaacaagtccgatttcgcctgcgccaacgccttcaacaacagcattatccccgaggacacattcttcccaagccccgagagcagctgcgacgtgaagctggtggaaaagagcttcgagacagacaccaacctgaacttccagatcctgtacgagatcctgctgggcaaggccaccctgtacgccgtgctggtgtctgccctggtgctgatggctatggtcaagcggaaggacagccgggga

SEQ ID NO: 40086 - DNA, 2214 bp, synthetic construct
  source 1..2214: mol_type = other DNA
atggccttaccagtgaccgccttgctcctgccgctggccttgctgctccacgccgccaggccggacatccagatgacacagagcccctctagcctgtctgccagcgtgggagacagagtgaccatcacctgtagagccagccagagcatcagaaactacctgaactggtatcagcaaaagcccggcaaggcccctgagctgctgattcatgctgcaagcagcctccagagcggcgtgccaagcagattttctggcagcggcagcggaaccgacttcaccctgacaatatctagcctccagcctgaggacttcgccagctactactgccagcagagctacagcgcccctcctatcacctttggacagggcaccagactggaaatcaagctcgaggacctgaagaacgtgttcccacctgaggtggccgtgttcgagcctagcgaggccgagatcagccacacccagaaagccaccctcgtgtgcctggctaccggcttctaccccgaccatgtggaactgtcttggtgggtcaacggcaaagaggtgcacagcggcgtgtctaccgacccccagccactgaaagaacagcccgccctgaacgacagccggtactgcctgagcagcagactgagagtgtccgccaccttctggcagaacccccggaaccacttcagatgccaggtgcagttctacggcctgagcgagaacgacgagtggacccaggacagagccaagcccgtgacccagatcgtgtctgccgaagcctggggcagagccgatgatgtgattaagatccactggcaggaaaagaagtccaacaccatcctgggcagccaggaaggcaacaccatgaagaccaacgacacctacatgaagttcagctggctgaccgtgcccgagaagtccctggacaaagaacacagatgcatcgtgcggcacgaaaacaacaagaacggcgtggaccaggaaatcatcttcccacccatcaagaccgatgtgattacaatggaccccaaggacaactgctccaaggacgccaacgataccctgctgctccagctgaccaacaccagcgcctactacatgtacttgttgctgctgctgaagtccgtggtgtacttcgccatcatcacatgctgcctgctgatggctatggtcaagcggaaggacagccggggaagggccaagcgatctggatctggagcaacaaacttctcactactcaaacaagcaggtgacgtggaggagaatcccgggcctactagtatggactggatttggcgcatccttttccttgtcggcgctgctaccggcgcgcattccttcgaacaggttcagctccagcagtctggacctggcctggtcaagcctagccagacactgtctctgacctgtgccatcagcggcgatagcgtgtcctctaatagagccgcctggaactggatcagacagagccctagcagaggactccagtggctgggcagaacctactaccgcagcaagtggtacaacgactacgccgtgtctctgcggagccggatcaccatcaatcccgtgaccagcaagaaccaggtggccctgcacatgaacagcgtgacccctgaagataccgccgtgtactactgtgccagagccggaattgtggtggtgcccggacctgagacattctactactacgaccacggcctggacgtgtggggccagggaacaacagtgactgtctcttctacgcgtatccagaaccctgatcctgccgtgtaccagctgcgggatagcaagagcagcgacaagagcgtgtgtctgttcaccgacttcgacagccagaccaacgtgtcccagagcaaggactccgacgtgtacatcaccgataagaccgtgctggacatgcggagcatggacttcaagagcaactccgccgtggcctggtccaacaagtccgatttcgcctgcgccaacgccttcaacaacagcattatccccgaggacacattcttcccaagccccgagagcagcgactccaccgaccacgtgaagcccaaagagacagagaacaccaagcagcccagcaagagctgccacaagcccaaggccatcgtgcacaccgagaaagtgaacatgatgagcctgaccgtgctgggcctgcggatgctgttcgccaaaaccgtggccgtgaacttcctgctgaccgccaagctgttcttcctcctcaccgcc

SEQ ID NO: 40087 - DNA, 2208 bp, synthetic construct
  source 1..2208: mol_type = other DNA
atggccttaccagtgaccgccttgctcctgccgctggccttgctgctccacgccgccaggccggacatccagatgacacagagcccctctagcctgtctgccagcgtgggagacagagtgaccatcacctgtagagccagccagagcatcagaaactacctgaactggtatcagcaaaagcccggcaaggcccctgagctgctgattcatgctgcaagcagcctccagagcggcgtgccaagcagattttctggcagcggcagcggaaccgacttcaccctgacaatatctagcctccagcctgaggacttcgccagctactactgccagcagagctacagcgcccctcctatcacctttggacagggcaccagactggaaatcaagctcgaggacctgaagaacgtgttcccacctgaggtggccgtgttcgagcctagcgaggccgagatcagccacacccagaaagccaccctcgtgtgcctggctaccggcttctaccccgaccatgtggaactgtcttggtgggtcaacggcaaagaggtgcacagcggcgtgtctaccgacccccagccactgaaagaacagcccgccctgaacgacagccggtactgcctgagcagcagactgagagtgtccgccaccttctggcagaacccccggaaccacttcagatgccaggtgcagttctacggcctgagcgagaacgacgagtggacccaggacagagccaagcccgtgacccagatcgtgtctgccgaagcctggggcagagccgatgatgtgattaagatccactggcaggaaaagaagtccaacaccatcctgggcagccaggaaggcaacaccatgaagaccaacgacacctacatgaagttcagctggctgaccgtgcccgagaagtccctggacaaagaacacagatgcatcgtgcggcacgaaaacaacaagaacggcgtggaccaggaaatcatcttcccacccatcaagaccgatgtgattacaatggaccccaaggacaactgctccaaggacgccaacgataccctgctgctccagctgaccaacaccagcgcctactacatgtacttgttgctgctgctgaagtccgtggtgtacttcgccatcatcacatgctgcctgctgcggagaaccgccttctgctgcaacggcgagaagtctagggccaagcgatctggatctggagcaacaaacttctcactactcaaacaagcaggtgacgtggaggagaatcccgggcctactagtatggactggatttggcgcatccttttccttgtcggcgctgctaccggcgcgcattccttcgaacaggttcagctccagcagtctggacctggcctggtcaagcctagccagacactgtctctgacctgtgccatcagcggcgatagcgtgtcctctaatagagccgcctggaactggatcagacagagccctagcagaggactccagtggctgggcagaacctactaccgcagcaagtggtacaacgactacgccgtgtctctgcggagccggatcaccatcaatcccgtgaccagcaagaaccaggtggccctgcacatgaacagcgtgacccctgaagataccgccgtgtactactgtgccagagccggaattgtggtggtgcccggacctgagacattctactactacgaccacggcctggacgtgtggggccagggaacaacagtgactgtctcttctacgcgtatccagaaccctgatcctgccgtgtaccagctgcgggatagcaagagcagcgacaagagcgtgtgtctgttcaccgacttcgacagccagaccaacgtgtcccagagcaaggactccgacgtgtacatcaccgataagaccgtgctggacatgcggagcatggacttcaagagcaactccgccgtggcctggtccaacaagtccgatttcgcctgcgccaacgccttcaacaacagcattatccccgaggacacattcttcccaagccccgagagcagcgactccaccgaccacgtgaagcccaaagagacagagaacaccaagcagcccagcaagagctgccacaagcccaaggccatcgtgcacaccgagaaagtgaacatgatgagcctgaccgtgctgggcctgcggatgctgttcgccaaaaccgtggccgtgaacttcctgctgaccgccaagctgttcttcctc

SEQ ID NO: 40088 - DNA, 2640 bp, synthetic construct
  source 1..2640: mol_type = other DNA
atggccttaccagtgaccgccttgctcctgccgctggccttgctgctccacgccgccaggccgctcgaggaggacctgaagaacgtgttcccacctgaggtggccgtgttcgagcctagcgaggccgagatcagccacacccagaaagccaccctcgtgtgcctggctaccggcttctaccccgaccatgtggaactgtcttggtgggtcaacggcaaagaggtgcacagcggcgtgtgtaccgacccccagccactgaaagaacagcccgccctgaacgacagccggtactgcctgagcagcagactgagagtgtccgccaccttctggcagaacccccggaaccacttcagatgccaggtgcagttctacggcctgagcgagaacgacgagtggacccaggacagagccaagcccgtgacccagatcgtgtctgccgaagcctggggcagagccgattgcggctttaccagcgagagctaccagcagggcgtgctgagcgccaccaacctgagcgtgatcggcttcagaatcctgctgctgaaagtggccggctttaacctgctgatgaccctgcggctgtggtccagcagggccaagcgatctggatctggagcaacaaacttctcactactcaaacaagcaggtgacgtggaggagaatcccgggcctactagcatggccttaccagtgaccgccttgctcctgccgctggccttgctgctccacgccgccaggccggacatccagatgacacagagcccctctagcctgtctgccagcgtgggagacagagtgaccatcacctgtagagccagccagagcatcagaaactacctgaactggtatcagcaaaagcccggcaaggcccctgagctgctgattcatgctgcaagcagcctccagagcggcgtgccaagcagattttctggcagcggcagcggaaccgacttcaccctgacaatatctagcctccagcctgaggacttcgccagctactactgccagcagagctacagcgcccctcctatcacctttggacagggcaccagactggaaatcaagggcggaggcggaagtggaggcggaggatctggcggcggaggctctcaggttcagctccagcagtctggacctggcctggtcaagcctagccagacactgtctctgacctgtgccatcagcggcgatagcgtgtcctctaatagagccgcctggaactggatcagacagagccctagcagaggactccagtggctgggcagaacctactaccgcagcaagtggtacaacgactacgccgtgtctctgcggagccggatcaccatcaatcccgtgaccagcaagaaccaggtggccctgcacatgaacagcgtgacccctgaagataccgccgtgtactactgtgccagagccggaattgtggtggtgcccggacctgagacattctactactacgaccacggcctggacgtgtggggccagggaacaacagtgactgtctcttctacgcgtatccagaaccctgatcctgccgtgtaccagctgcgggatagcaagagcagcgacaagagcgtgtgtctgttcaccgacttcgacagccagaccaacgtgtcccagagcaaggactccgacgtgtacatcaccgataagtgcgtgctggacatgcggagcatggacttcaagagcaactccgccgtggcctggtccaacaagtccgatttcgcctgcgccaacgccttcaacaacagcattatccccgaggacacattcttcccaagccccgagagcagctgcgacgtgaagctggtggaaaagagcttcgagacagacaccaacctgaacttccagatcctgtacgaggtgatcggcttcagaatcctgctgctgaaagtggccggctttaacctgctgatgaccctgcggctgtggtccagccgcgccaagagaagcggatctggcgtgaagcagaccctgaatttcgacctgctgaagctggctggcgacgtggaatccaacccaggcccttctagaggccatatgaccgagtacaagcccacggtgcgcctcgccacccgcgacgacgtccccagggccgtacgcaccctcgccgccgcgttcgccgactaccccgccacgcgccacaccgtcgatccggaccgccacatcgagcgggtcaccgagctgcaagaactcttcctcacgcgcgtcgggctcgacatcggcaaggtgtgggtcgcggacgacggcgccgcggtggcggtctggaccacgccggagagcgtcgaagcgggggcggtgttcgccgagatcggcccgcgcatggccgagttgagcggttcccggctggccgcgcagcaacagatggaaggcctcctggcgccgcaccggcccaaggagcccgcgtggttcctggccaccgtcggcgtctcgcccgaccaccagggcaagggtctgggcagcgccgtcgtgctccccggagtggaggcggccgagcgcgccggggtgcccgccttcctggagacctccgcgccccgcaacctccccttctacgagcggctcggcttcaccgtcaccgccgacgtcgaggtgcccgaaggaccgcgcacctggtgcatgacccgcaagcccggtgcctga

SEQ ID NO: 40089 - DNA, 2640 bp, synthetic construct
  source 1..2640: mol_type = other DNA
atggccttaccagtgaccgccttgctcctgccgctggccttgctgctccacgccgccaggccgctcgagatccagaaccctgatcctgccgtgtaccagctgcgggatagcaagagcagcgacaagagcgtgtgtctgttcaccgacttcgacagccagaccaacgtgtcccagagcaaggactccgacgtgtacatcaccgataagtgcgtgctggacatgcggagcatggacttcaagagcaactccgccgtggcctggtccaacaagtccgatttcgcctgcgccaacgccttcaacaacagcattatccccgaggacacattcttcccaagccccgagagcagctgcgacgtgaagctggtggaaaagagcttcgagacagacaccaacctgaacttccagatcctgtacgaggtgatcggcttcagaatcctgctgctgaaagtggccggctttaacctgctgatgaccctgcggctgtggtccagcagggccaagcgatctggatctggagcaacaaacttctcactactcaaacaagcaggtgacgtggaggagaatcccgggcctactagcatggccttaccagtgaccgccttgctcctgccgctggccttgctgctccacgccgccaggccggacatccagatgacacagagcccctctagcctgtctgccagcgtgggagacagagtgaccatcacctgtagagccagccagagcatcagaaactacctgaactggtatcagcaaaagcccggcaaggcccctgagctgctgattcatgctgcaagcagcctccagagcggcgtgccaagcagattttctggcagcggcagcggaaccgacttcaccctgacaatatctagcctccagcctgaggacttcgccagctactactgccagcagagctacagcgcccctcctatcacctttggacagggcaccagactggaaatcaagggcggaggcggaagtggaggcggaggatctggcggcggaggctctcaggttcagctccagcagtctggacctggcctggtcaagcctagccagacactgtctctgacctgtgccatcagcggcgatagcgtgtcctctaatagagccgcctggaactggatcagacagagccctagcagaggactccagtggctgggcagaacctactaccgcagcaagtggtacaacgactacgccgtgtctctgcggagccggatcaccatcaatcccgtgaccagcaagaaccaggtggccctgcacatgaacagcgtgacccctgaagataccgccgtgtactactgtgccagagccggaattgtggtggtgcccggacctgagacattctactactacgaccacggcctggacgtgtggggccagggaacaacagtgactgtctcttctacgcgtgaggacctgaagaacgtgttcccacctgaggtggccgtgttcgagcctagcgaggccgagatcagccacacccagaaagccaccctcgtgtgcctggctaccggcttctaccccgaccatgtggaactgtcttggtgggtcaacggcaaagaggtgcacagcggcgtgtgtaccgacccccagccactgaaagaacagcccgccctgaacgacagccggtactgcctgagcagcagactgagagtgtccgccaccttctggcagaacccccggaaccacttcagatgccaggtgcagttctacggcctgagcgagaacgacgagtggacccaggacagagccaagcccgtgacccagatcgtgtctgccgaagcctggggcagagccgattgcggctttaccagcgagagctaccagcagggcgtgctgagcgccaccaacctgagcgtgatcggcttcagaatcctgctgctgaaagtggccggctttaacctgctgatgaccctgcggctgtggtccagccgcgccaagagaagcggatctggcgtgaagcagaccctgaatttcgacctgctgaagctggctggcgacgtggaatccaacccaggcccttctagaggccatatgaccgagtacaagcccacggtgcgcctcgccacccgcgacgacgtccccagggccgtacgcaccctcgccgccgcgttcgccgactaccccgccacgcgccacaccgtcgatccggaccgccacatcgagcgggtcaccgagctgcaagaactcttcctcacgcgcgtcgggctcgacatcggcaaggtgtgggtcgcggacgacggcgccgcggtggcggtctggaccacgccggagagcgtcgaagcgggggcggtgttcgccgagatcggcccgcgcatggccgagttgagcggttcccggctggccgcgcagcaacagatggaaggcctcctggcgccgcaccggcccaaggagcccgcgtggttcctggccaccgtcggcgtctcgcccgaccaccagggcaagggtctgggcagcgccgtcgtgctccccggagtggaggcggccgagcgcgccggggtgcccgccttcctggagacctccgcgccccgcaacctccccttctacgagcggctcggcttcaccgtcaccgccgacgtcgaggtgcccgaaggaccgcgcacctggtgcatgacccgcaagcccggtgcctga

SEQ ID NO: 40090 - DNA, 2640 bp, synthetic construct; identical to SEQ ID NO: 40088
  source 1..2640: mol_type = other DNA

SEQ ID NO: 40091 - DNA, 2964 bp, synthetic construct
  source 1..2964: mol_type = other DNA
atggccttaccagtgaccgccttgctcctgccgctggccttgctgctccacgccgccaggccgctcgaggaggacctgaagaacgtgttcccacctgaggtggccgtgttcgagcctagcgaggccgagatcagccacacccagaaagccaccctcgtgtgcctggctaccggcttctaccccgaccatgtggaactgtcttggtgggtcaacggcaaagaggtgcacagcggcgtgtctaccgacccccagccactgaaagaacagcccgccctgaacgacagccggtactgcctgagcagcagactgagagtgtccgccaccttctggcagaacccccggaaccacttcagatgccaggtgcagttctacggcctgagcgagaacgacgagtggacccaggacagagccaagcccgtgacccagatcgtgtctgccgaagcctggggcagagccgatgatgtgattaagatccactggcaggaaaagaagtccaacaccatcctgggcagccaggaaggcaacaccatgaagaccaacgacacctacatgaagttcagctggctgaccgtgcccgagaagtccctggacaaagaacacagatgcatcgtgcggcacgaaaacaacaagaacggcgtggaccaggaaatcatcttcccacccatcaagaccgatgtgattacaatggaccccaaggacaactgctccaaggacgccaacgataccctgctgctccagctgaccaacaccagcgcctactacatgtacttgttgctgctgctgaagtccgtggtgtacttcgccatcatcacatgctgcctgctgatggctatggtcaagcggaaggacagccggggaagggccaagcgatctggatctggagcaacaaacttctcactactcaaacaagcaggtgacgtggaggagaatcccgggcctactagcatggccttaccagtgaccgccttgctcctgccgctggccttgctgctccacgccgccaggccggacatccagatgacacagagcccctctagcctgtctgccagcgtgggagacagagtgaccatcacctgtagagccagccagagcatcagaaactacctgaactggtatcagcaaaagcccggcaaggcccctgagctgctgattcatgctgcaagcagcctccagagcggcgtgccaagcagattttctggcagcggcagcggaaccgacttcaccctgacaatatctagcctccagcctgaggacttcgccagctactactgccagcagagctacagcgcccctcctatcacctttggacagggcaccagactggaaatcaagggcggaggcggaagtggaggcggaggatctggcggcggaggctctcaggttcagctccagcagtctggacctggcctggtcaagcctagccagacactgtctctgacctgtgccatcagcggcgatagcgtgtcctctaatagagccgcctggaactggatcagacagagccctagcagaggactccagtggctgggcagaacctactaccgcagcaagtggtacaacgactacgccgtgtctctgcggagccggatcaccatcaatcccgtgaccagcaagaaccaggtggccctgcacatgaacagcgtgacccctgaagataccgccgtgtactactgtgccagagccggaattgtggtggtgcccggacctgagacattctactactacgaccacggcctggacgtgtggggccagggaacaacagtgactgtctcttctacgcgtatccagaaccctgatcctgccgtgtaccagctgcgggatagcaagagcagcgacaagagcgtgtgtctgttcaccgacttcgacagccagaccaacgtgtcccagagcaaggactccgacgtgtacatcaccgataagaccgtgctggacatgcggagcatggacttcaagagcaactccgccgtggcctggtccaacaagtccgatttcgcctgcgccaacgccttcaacaacagcattatccccgaggacacattcttcccaagccccgagagcagcgactccaccgaccacgtgaagcccaaagagacagagaacaccaagcagcccagcaagagctgccacaagcccaaggccatcgtgcacaccgagaaagtgaacatgatgagcctgaccgtgctgggcctgcggatgctgttcgccaaaaccgtggccgtgaacttcctgctgaccgccaagctgttcttcctcctcaccgcccgcgccaagagaagcggatctggcgtgaagcagaccctgaatttcgacctgctgaagctggctggcgacgtggaatccaacccaggcccttctagaggccatatgaccgagtacaagcccacggtgcgcctcgccacccgcgacgacgtccccagggccgtacgcaccctcgccgccgcgttcgccgactaccccgccacgcgccacaccgtcgatccggaccgccacatcgagcgggtcaccgagctgcaagaactcttcctcacgcgcgtcgggctcgacatcggcaaggtgtgggtcgcggacgacggcgccgcggtggcggtctggaccacgccggagagcgtcgaagcgggggcggtgttcgccgagatcggcccgcgcatggccgagttgagcggttcccggctggccgcgcagcaacagatggaaggcctcctggcgccgcaccggcccaaggagcccgcgtggttcctggccaccgtcggcgtctcgcccgaccaccagggcaagggtctgggcagcgccgtcgtgctccccggagtggaggcggccgagcgcgccggggtgcccgccttcctggagacctccgcgccccgcaacctccccttctacgagcggctcggcttcaccgtcaccgccgacgtcgaggtgcccgaaggaccgcgcacctggtgcatgacccgcaagcccggtgcctga

SEQ ID NO: 40092 - DNA, 2964 bp, synthetic construct
  source 1..2964: mol_type = other DNA
atggccttaccagtgaccgccttgctcctgccgctggccttgctgctccacgccgccaggccgctcgagatccagaaccctgatcctgccgtgtaccagctgcgggatagcaagagcagcgacaagagcgtgtgtctgttcaccgacttcgacagccagaccaacgtgtcccagagcaaggactccgacgtgtacatcaccgataagaccgtgctggacatgcggagcatggacttcaagagcaactccgccgtggcctggtccaacaagtccgatttcgcctgcgccaacgccttcaacaacagcattatccccgaggacacattcttcccaagccccgagagcagcgactccaccgaccacgtgaagcccaaagagacagagaacaccaagcagcccagcaagagctgccacaagcccaaggccatcgtgcacaccgagaaagtgaacatgatgagcctgaccgtgctgggcctgcggatgctgttcgccaaaaccgtggccgtgaacttcctgctgaccgccaagctgttcttcctcctcaccgccagggccaagcgatctggatctggagcaacaaacttctcactactcaaacaagcaggtgacgtggaggagaatcccgggcctactagcatggccttaccagtgaccgccttgctcctgccgctggccttgctgctccacgccgccaggccggacatccagatgacacagagcccctctagcctgtctgccagcgtgggagacagagtgaccatcacctgtagagccagccagagcatcagaaactacctgaactggtatcagcaaaagcccggcaaggcccctgagctgctgattcatgctgcaagcagcctccagagcggcgtgccaagcagattttctggcagcggcagcggaaccgacttcaccctgacaatatctagcctccagcctgaggacttcgccagctactactgccagcagagctacagcgcccctcctatcacctttggacagggcaccagactggaaatcaagggcggaggcggaagtggaggcggaggatctggcggcggaggctctcaggttcagctccagcagtctggacctggcctggtcaagcctagccagacactgtctctgacctgtgccatcagcggcgatagcgtgtcctctaatagagccgcctggaactggatcagacagagccctagcagaggactccagtggctgggcagaacctactaccgcagcaagtggtacaacgactacgccgtgtctctgcggagccggatcaccatcaatcccgtgaccagcaagaaccaggtggccctgcacatgaacagcgtgacccctgaagataccgccgtgtactactgtgccagagccggaattgtggtggtgcccggacctgagacattctactactacgaccacggcctggacgtgtggggccagggaacaacagtgactgtctcttctacgcgtgaggacctgaagaacgtgttcccacctgaggtggccgtgttcgagcctagcgaggccgagatcagccacacccagaaagccaccctcgtgtgcctggctaccggcttctaccccgaccatgtggaactgtcttggtgggtcaacggcaaagaggtgcacagcggcgtgtctaccgacccccagccactgaaagaacagcccgccctgaacgacagccggtactgcctgagcagcagactgagagtgtccgccaccttctggcagaacccccggaaccacttcagatgccaggtgcagttctacggcctgagcgagaacgacgagtggacccaggacagagccaagcccgtgacccagatcgtgtctgccgaagcctggggcagagccgatgatgtgattaagatccactggcaggaaaagaagtccaacaccatcctgggcagccaggaaggcaacaccatgaagaccaacgacacctacatgaagttcagctggctgaccgtgcccgagaagtccctggacaaagaacacagatgcatcgtgcggcacgaaaacaacaagaacggcgtggaccaggaaatcatcttcccacccatcaagaccgatgtgattacaatggaccccaaggacaactgctccaaggacgccaacgataccctgctgctccagctgaccaacaccagcgcctactacatgtacttgttgctgctgctgaagtccgtggtgtacttcgccatcatcacatgctgcctgctgatggctatggtcaagcggaaggacagccggggacgcgccaagagaagcggatctggcgtgaagcagaccctgaatttcgacctgctgaagctggctggcgacgtggaatccaacccaggcccttctagaggccatatgaccgagtacaagcccacggtgcgcctcgccacccgcgacgacgtccccagggccgtacgcaccctcgccgccgcgttcgccgactaccccgccacgcgccacaccgtcgatccggaccgccacatcgagcgggtcaccgagctgcaagaactcttcctcacgcgcgtcgggctcgacatcggcaaggtgtgggtcgcggacgacggcgccgcggtggcggtctggaccacgccggagagcgtcgaagcgggggcggtgttcgccgagatcggcccgcgcatggccgagttgagcggttcccggctggccgcgcagcaacagatggaaggcctcctggcgccgcaccggcccaaggagcccgcgtggttcctggccaccgtcggcgtctcgcccgaccaccagggcaagggtctgggcagcgccgtcgtgctccccggagtggaggcggccgagcgcgccggggtgcccgccttcctggagacctccgcgccccgcaacctccccttctacgagcggctcggcttcaccgtcaccgccgacgtcgaggtgcccgaaggaccgcgcacctggtgcatgacccgcaagcccggtgcctga

SEQ ID NO: 40093 - DNA, 2958 bp, synthetic construct
  source 1..2958: mol_type = other DNA
atggccttaccagtgaccgccttgctcctgccgctggccttgctgctccacgccgccaggccgctcgaggaggacctgaagaacgtgttcccacctgaggtggccgtgttcgagcctagcgaggccgagatcagccacacccagaaagccaccctcgtgtgcctggctaccggcttctaccccgaccatgtggaactgtcttggtgggtcaacggcaaagaggtgcacagcggcgtgtgtaccgacccccagccactgaaagaacagcccgccctgaacgacagccggtactgcctgagcagcagactgagagtgtccgccaccttctggcagaacccccggaaccacttcagatgccaggtgcagttctacggcctgagcgagaacgacgagtggacccaggacagagccaagcccgtgacccagatcgtgtctgccgaagcctggggcagagccgatgatgtgattaagatccactggcaggaaaagaagtccaacaccatcctgggcagccaggaaggcaacaccatgaagaccaacgacacctacatgaagttcagctggctgaccgtgcccgagaagtccctggacaaagaacacagatgcatcgtgcggcacgaaaacaacaagaacggcgtggaccaggaaatcatcttcccacccatcaagaccgatgtgattacaatggaccccaaggacaactgctccaaggacgccaacgataccctgctgctccagctgaccaacaccagcgcctactacatgtacttgttgctgctgctgaagtccgtggtgtacttcgccatcatcacatgctgcctgctgcggagaaccgccttctgctgcaacggcgagaagtctagggccaagcgatctggatctggagcaacaaacttctcactactcaaacaagcaggtgacgtggaggagaatcccgggcctactagcatggccttaccagtgaccgccttgctcctgccgctggccttgctgctccacgccgccaggccggacatccagatgacacagagcccctctagcctgtctgccagcgtgggagacagagtgaccatcacctgtagagccagccagagcatcagaaactacctgaactggtatcagcaaaagcccggcaaggcccctgagctgctgattcatgctgcaagcagcctccagagcggcgtgccaagcagattttctggcagcggcagcggaaccgacttcaccctgacaatatctagcctccagcctgaggacttcgccagctactactgccagcagagctacagcgcccctcctatcacctttggacagggcaccagactggaaatcaagggcggaggcggaagtggaggcggaggatctggcggcggaggctctcaggttcagctccagcagtctggacctggcctggtcaagcctagccagacactgtctctgacctgtgccatcagcggcgatagcgtgtcctctaatagagccgcctggaactggatcagacagagccctagcagaggactccagtggctgggcagaacctactaccgcagcaagtggtacaacgactacgccgtgtctctgcggagccggatcaccatcaatcccgtgaccagcaagaaccaggtggccctgcacatgaacagcgtgacccctgaagataccgccgtgtactactgtgccagagccggaattgtggtggtgcccggacctgagacattctactactacgaccacggcctggacgtgtggggccagggaacaacagtgactgtctcttctacgcgtatccagaaccctgatcctgccgtgtaccagctgcgggatagcaagagcagcgacaagagcgtgtgtctgttcaccgacttcgacagccagaccaacgtgtcccagagcaaggactccgacgtgtacatcaccgataagtgcgtgctggacatgcggagcatggacttcaagagcaactccgccgtggcctggtccaacaagtccgatttcgcctgcgccaacgccttcaacaacagcattatccccgaggacacattcttcccaagccccgagagcagcgactccaccgaccacgtgaagcccaaagagacagagaacaccaagcagcccagcaagagctgccacaagcccaaggccatcgtgcacaccgagaaagtgaacatgatgagcctgaccgtgctgggcctgcggatgctgttcgccaaaaccgtggccgtgaacttcctgctgaccgccaagctgttcttcctccgcgccaagagaagcggatctggcgtgaagcagaccctgaatttcgacctgctgaagctggctggcgacgtggaatccaacccaggcccttctagaggccatatgaccgagtacaagcccacggtgcgcctcgccacccgcgacgacgtccccagggccgtacgcaccctcgccgccgcgttcgccgactaccccgccacgcgccacaccgtcgatccggaccgccacatcgagcgggtcaccgagctgcaagaactcttcctcacgcgcgtcgggctcgacatcggcaaggtgtgggtcgcggacgacggcgccgcggtggcggtctggaccacgccggagagcgtcgaagcgggggcggtgttcgccgagatcggcccgcgcatggccgagttgagcggttcccggctggccgcgcagcaacagatggaaggcctcctggcgccgcaccggcccaaggagcccgcgtggttcctggccaccgtcggcgtctcgcccgaccaccagggcaagggtctgggcagcgccgtcgtgctccccggagtggaggcggccgagcgcgccggggtgcccgccttcctggagacctccgcgccccgcaacctccccttctacgagcggctcggcttcaccgtcaccgccgacgtcgaggtgcccgaaggaccgcgcacctggtgcatgacccgcaagcccggtgcctga

SEQ ID NO: 40094 - DNA, 2958 bp, synthetic construct
  source 1..2958: mol_type = other DNA
atggccttaccagtgaccgccttgctcctgccgctggccttgctgctccacgccgccaggccgctcgagatccagaaccctgatcctgccgtgtaccagctgcgggatagcaagagcagcgacaagagcgtgtgtctgttcaccgacttcgacagccagaccaacgtgtcccagagcaaggactccgacgtgtacatcaccgataagtgcgtgctggacatgcggagcatggacttcaagagcaactccgccgtggcctggtccaacaagtccgatttcgcctgcgccaacgccttcaacaacagcattatccccgaggacacattcttcccaagccccgagagcagcgactccaccgaccacgtgaagcccaaagagacagagaacaccaagcagcccagcaagagctgccacaagcccaaggccatcgtgcacaccgagaaagtgaacatgatgagcctgaccgtgctgggcctgcggatgctgttcgccaaaaccgtggccgtgaacttcctgctgaccgccaagctgttcttcctcagggccaagcgatctggatctggagcaacaaacttctcactactcaaacaagcaggtgacgtggaggagaatcccgggcctactagcatggccttaccagtgaccgccttgctcctgccgctggccttgctgctccacgccgccaggccggacatccagatgacacagagcccctctagcctgtctgccagcgtgggagacagagtgaccatcacctgtagagccagccagagcatcagaaactacctgaactggtatcagcaaaagcccggcaaggcccctgagctgctgattcatgctgcaagcagcctccagagcggcgtgccaagcagattttctggcagcggcagcggaaccgacttcaccctgacaatatctagcctccagcctgaggacttcgccagctactactgccagcagagctacagcgcccctcctatcacctttggacagggcaccagactggaaatcaagggcggaggcggaagtggaggcggaggatctggcggcggaggctctcaggttcagctccagcagtctggacctggcctggtcaagcctagccagacactgtctctgacctgtgccatcagcggcgatagcgtgtcctctaatagagccgcctggaactggatcagacagagccctagcagaggactccagtggctgggcagaacctactaccgcagcaagtggtacaacgactacgccgtgtctctgcggagccggatcaccatcaatcccgtgaccagcaagaaccaggtggccctgcacatgaacagcgtgacccctgaagataccgccgtgtactactgtgccagagccggaattgtggtggtgcccggacctgagacattctactactacgaccacggcctggacgtgtggggccagggaacaacagtgactgtctcttctacgcgtgaggacctgaagaacgtgttcccacctgaggtggccgtgttcgagcctagcgaggccgagatcagccacacccagaaagccaccctcgtgtgcctggctaccggcttctaccccgaccatgtggaactgtcttggtgggtcaacggcaaagaggtgcacagcggcgtgtgtaccgacccccagccactgaaagaacagcccgccctgaacgacagccggtactgcctgagcagcagactgagagtgtccgccaccttctggcagaacccccggaaccacttcagatgccaggtgcagttctacggcctgagcgagaacgacgagtggacccaggacagagccaagcccgtgacccagatcgtgtctgccgaagcctggggcagagccgatgatgtgattaagatccactggcaggaaaagaagtccaacaccatcctgggcagccaggaaggcaacaccatgaagaccaacgacacctacatgaagttcagctggctgaccgtgcccgagaagtccctggacaaagaacacagatgcatcgtgcggcacgaaaacaacaagaacggcgtggaccaggaaatcatcttcccacccatcaagaccgatgtgattacaatggaccccaaggacaactgctccaaggacgccaacgataccctgctgctccagctgaccaacaccagcgcctactacatgtacttgttgctgctgctgaagtccgtggtgtacttcgccatcatcacatgctgcctgctgcggagaaccgccttctgctgcaacggcgagaagtctcgcgccaagagaagcggatctggcgtgaagcagaccctgaatttcgacctgctgaagctggctggcgacgtggaatccaacccaggcccttctagaggccatatgaccgagtacaagcccacggtgcgcctcgccacccgcgacgacgtccccagggccgtacgcaccctcgccgccgcgttcgccgactaccccgccacgcgccacaccgtcgatccggaccgccacatcgagcgggtcaccgagctgcaagaactcttcctcacgcgcgtcgggctcgacatcggcaaggtgtgggtcgcggacgacggcgccgcggtggcggtctggaccacgccggagagcgtcgaagcgggggcggtgttcgccgagatcggcccgcgcatggccgagttgagcggttcccggctggccgcgcagcaacagatggaaggcctcctggcgccgcaccggcccaaggagcccgcgtggttcctggccaccgtcggcgtctcgcccgaccaccagggcaagggtctgggcagcgccgtcgtgctccccggagtggaggcggccgagcgcgccggggtgcccgccttcctggagacctccgcgccccgcaacctccccttctacgagcggctcggcttcaccgtcaccgccgacgtcgaggtgcccgaaggaccgcgcacctggtgcatgacccgcaagcccggtgcctga

SEQ ID NO: 40095 - DNA, 2958 bp, synthetic construct
  source 1..2958: mol_type = other DNA
atggccttaccagtgaccgccttgctcctgccgctggccttgctgctccacgccgccaggccgctcgaggaggacctgaagaacgtgttcccacctgaggtggccgtgttcgagcctagcgaggccgagatcagccacacccagaaagccaccctcgtgtgcctggctaccggcttctaccccgaccatgtggaactgtcttggtgggtcaacggcaaagaggtgcacagcggcgtgtctaccgacccccagccactgaaagaacagcccgccctgaacgacagccggtactgcctgagcagcagactgagagtgtccgccaccttctggcagaacccccggaaccacttcagatgccaggtgcagttctacggcctgagcgagaacgacgagtggacccaggacagagccaagcccgtgacccagatcgtgtctgccgaagcctggggcagagccgatgatgtgattaagatccactggcaggaaaagaagtccaacaccatcctgggcagccaggaaggcaacaccatgaagaccaacgacacctacatgaagttcagctggctgaccgtgcccgagaagtccctggacaaagaacacagatgcatcgtgcggcacgaaaacaacaagaacggcgtggaccaggaaatcatcttcccacccatcaagaccgatgtgattacaatggaccccaaggacaactgctccaaggacgccaacgataccctgctgctccagctgaccaacaccagcgcctactacatgtacttgttgctgctgctgaagtccgtggtgtacttcgccatcatcacatgctgcctgctgcggagaaccgccttctgctgcaacggcgagaagtctagggccaagcgatctggatctggagcaacaaacttctcactactcaaacaagcaggtgacgtggaggagaatcccgggcctactagcatggccttaccagtgaccgccttgctcctgccgctggccttgctgctccacgccgccaggccggacatccagatgacacagagcccctctagcctgtctgccagcgtgggagacagagtgaccatcacctgtagagccagccagagcatcagaaactacctgaactggtatcagcaaaagcccggcaaggcccctgagctgctgattcatgctgcaagcagcctccagagcggcgtgccaagcagattttctggcagcggcagcggaaccgacttcaccctgacaatatctagcctccagcctgaggacttcgccagctactactgccagcagagctacagcgcccctcctatcacctttggacagggcaccagactggaaatcaagggcggaggcggaagtggaggcggaggatctggcggcggaggctctcaggttcagctccagcagtctggacctggcctggtcaagcctagccagacactgtctctgacctgtgccatcagcggcgatagcgtgtcctctaatagagccgcctggaactggatcagacagagccctagcagaggactccagtggctgggcagaacctactaccgcagcaagtggtacaacgactacgccgtgtctctgcggagccggatcaccatcaatcccgtgaccagcaagaaccaggtggccctgcacatgaacagcgtgacccctgaagataccgccgtgtactactgtgccagagccggaattgtggtggtgcccggacctgagacattctactactacgaccacggcctggacgtgtggggccagggaacaacagtgactgtctcttctacgcgtatccagaaccctgatcctgccgtgtaccagctgcgggatagcaagagcagcgacaagagcgtgtgtctgttcaccgacttcgacagccagaccaacgtgtcccagagcaaggactccgacgtgtacatcaccgataagaccgtgctggacatgcggagcatggacttcaagagcaactccgccgtggcctggtccaacaagtccgatttcgcctgcgccaacgccttcaacaacagcattatccccgaggacacattcttcccaagccccgagagcagcgactccaccgaccacgtgaagcccaaagagacagagaacaccaagcagcccagcaagagctgccacaagcccaaggccatcgtgcacaccgagaaagtgaacatgatgagcctgaccgtgctgggcctgcggatgctgttcgccaaaaccgtggccgtgaacttcctgctgaccgccaagctgttcttcctccgcgccaagagaagcggatctggcgtgaagcagaccctgaatttcgacctgctgaagctggctggcgacgtggaatccaacccaggcccttctagaggccatatgaccgagtacaagcccacggtgcgcctcgccacccgcgacgacgtccccagggccgtacgcaccctcgccgccgcgttcgccgactaccccgccacgcgccacaccgtcgatccggaccgccacatcgagcgggtcaccgagctgcaagaactcttcctcacgcgcgtcgggctcgacatcggcaaggtgtgggtcgcggacgacggcgccgcggtggcggtctggaccacgccggagagcgtcgaagcgggggcggtgttcgccgagatcggcccgcgcatggccgagttgagcggttcccggctggccgcgcagcaacagatggaaggcctcctggcgccgcaccggcccaaggagcccgcgtggttcctggccaccgtcggcgtctcgcccgaccaccagggcaagggtctgggcagcgccgtcgtgctccccggagtggaggcggccgagcgcgccggggtgcccgccttcctggagacctccgcgccccgcaacctccccttctacgagcggctcggcttcaccgtcaccgccgacgtcgaggtgcccgaaggaccgcgcacctggtgcatgacccgcaagcccggtgcctga

SEQ ID NO: 40096 - DNA, 2958 bp, synthetic construct
  source 1..2958: mol_type = other DNA
atggccttaccagtgaccgccttgctcctgccgctggccttgctgctccacgccgccaggccgctcgagatccagaaccctgatcctgccgtgtaccagctgcgggatagcaagagcagcgacaagagcgtgtgtctgttcaccgacttcgacagccagaccaacgtgtcccagagcaaggactccgacgtgtacatcaccgataagaccgtgctggacatgcggagcatggacttcaagagcaactccgccgtggcctggtccaacaagtccgatttcgcctgcgccaacgccttcaacaacagcattatccccgaggacacattcttcccaagccccgagagcagcgactccaccgaccacgtgaagcccaaagagacagagaacaccaagcagcccagcaagagctgccacaagcccaaggccatcgtgcacaccgagaaagtgaacatgatgagcctgaccgtgctgggcctgcggatgctgttcgccaaaaccgtggccgtgaacttcctgctgaccgccaagctgttcttcctcagggccaagcgatctggatctggagcaacaaacttctcactactcaaacaagcaggtgacgtggaggagaatcccgggcctactagcatggccttaccagtgaccgccttgctcctgccgctggccttgctgctccacgccgccaggccggacatccagatgacacagagcccctctagcctgtctgccagcgtgggagacagagtgaccatcacctgtagagccagccagagcatcagaaactacctgaactggtatcagcaaaagcccggcaaggcccctgagctgctgattcatgctgcaagcagcctccagagcggcgtgccaagcagattttctggcagcggcagcggaaccgacttcaccctgacaatatctagcctccagcctgaggacttcgccagctactactgccagcagagctacagcgcccctcctatcacctttggacagggcaccagactggaaatcaagggcggaggcggaagtggaggcggaggatctggcggcggaggctctcaggttcagctccagcagtctggacctggcctggtcaagcctagccagacactgtctctgacctgtgccatcagcggcgatagcgtgtcctctaatagagccgcctggaactggatcagacagagccctagcagaggactccagtggctgggcagaacctactaccgcagcaagtggtacaacgactacgccgtgtctctgcggagccggatcaccatcaatcccgtgaccagcaagaaccaggtggccctgcacatgaacagcgtgacccctgaagataccgccgtgtactactgtgccagagccggaattgtggtggtgcccggacctgagacattctactactacgaccacggcctggacgtgtggggccagggaacaacagtgactgtctcttctacgcgtgaggacctgaagaacgtgttcccacctgaggtggccgtgttcgagcctagcgaggccgagatcagccacacccagaaagccaccctcgtgtgcctggctaccggcttctaccccgaccatgtggaactgtcttggtgggtcaacggcaaagaggtgcacagcggcgtgtctaccgacccccagccactgaaagaacagcccgccctgaacgacagccggtactgcctgagcagcagactgagagtgtccgccaccttctggcagaacccccggaaccacttcagatgccaggtgcagttctacggcctgagcgagaacgacgagtggacccaggacagagccaagcccgtgacccagatcgtgtctgccgaagcctggggcagagccgatgatgtgattaagatccactggcaggaaaagaagtccaacaccatcctgggcagccaggaaggcaacaccatgaagaccaacgacacctacatgaagttcagctggctgaccgtgcccgagaagtccctggacaaagaacacagatgcatcgtgcggcacgaaaacaacaagaacggcgtggaccaggaaatcatcttcccacccatcaagaccgatgtgattacaatggaccccaaggacaactgctccaaggacgccaacgataccctgctgctccagctgaccaacaccagcgcctactacatgtacttgttgctgctgctgaagtccgtggtgtacttcgccatcatcacatgctgcctgctgcggagaaccgccttctgctgcaacggcgagaagtctcgcgccaagagaagcggatctggcgtgaagcagaccctgaatttcgacctgctgaagctggctggcgacgtggaatccaacccaggcccttctagaggccatatgaccgagtacaagcccacggtgcgcctcgccacccgcgacgacgtccccagggccgtacgcaccctcgccgccgcgttcgccgactaccccgccacgcgccacaccgtcgatccggaccgccacatcgagcgggtcaccgagctgcaagaactcttcctcacgcgcgtcgggctcgacatcggcaaggtgtgggtcgcggacgacggcgccgcggtggcggtctggaccacgccggagagcgtcgaagcgggggcggtgttcgccgagatcggcccgcgcatggccgagttgagcggttcccggctggccgcgcagcaacagatggaaggcctcctggcgccgcaccggcccaaggagcccgcgtggttcctggccaccgtcggcgtctcgcccgaccaccagggcaagggtctgggcagcgccgtcgtgctccccggagtggaggcggccgagcgcgccggggtgcccgccttcctggagacctccgcgccccgcaacctccccttctacgagcggctcggcttcaccgtcaccgccgacgtcgaggtgcccgaaggaccgcgcacctggtgcatgacccgcaagcccggtgcctga

SEQ ID NO: 40097 - DNA, 2652 bp, synthetic construct
  source 1..2652: mol_type = other DNA
atggccttaccagtgaccgccttgctcctgccgctggccttgctgctccacgccgccaggccgctcgaggaggacctgaagaacgtgttcccacctgaggtggccgtgttcgagcctagcaaggccgagatcgcccacacccagaaagccaccctcgtgtgcctggctaccggcttctaccccgaccatgtggaactgtcttggtgggtcaacggcaaagaggtgcacagcggcgtgtgtaccgacccccagccactgaaagaacagcccgccctgaacgacagccggtactgcctgagcagcagactgagagtgtccgccaccttctggcagaacccccggaaccacttcagatgccaggtgcagttctacggcctgagcgagaacgacgagtggacccaggacagagccaagcccgtgacccagatcgtgtctgccgaagcctggggcagagccgattgcggcatcaccagcgccagctaccaccagggcgtgctgagcgccaccatcctgtacgagatcctgctgggcaaggccaccctgtacgccgtgctggtgtctgccctggtgctgatggctatggtcaagcggaaggacagccggggaagggccaagcgatctggatctggagcaacaaacttctcactactcaaacaagcaggtgacgtggaggagaatcccgggcctactagcatggccttaccagtgaccgccttgctcctgccgctggccttgctgctccacgccgccaggccggacatccagatgacacagagcccctctagcctgtctgccagcgtgggagacagagtgaccatcacctgtagagccagccagagcatcagaaactacctgaactggtatcagcaaaagcccggcaaggcccctgagctgctgattcatgctgcaagcagcctccagagcggcgtgccaagcagattttctggcagcggcagcggaaccgacttcaccctgacaatatctagcctccagcctgaggacttcgccagctactactgccagcagagctacagcgcccctcctatcacctttggacagggcaccagactggaaatcaagggcggaggcggaagtggaggcggaggatctggcggcggaggctctcaggttcagctccagcagtctggacctggcctggtcaagcctagccagacactgtctctgacctgtgccatcagcggcgatagcgtgtcctctaatagagccgcctggaactggatcagacagagccctagcagaggactccagtggctgggcagaacctactaccgcagcaagtggtacaacgactacgccgtgtctctgcggagccggatcaccatcaatcccgtgaccagcaagaaccaggtggccctgcacatgaacagcgtgacccctgaagataccgccgtgtactactgtgccagagccggaattgtggtggtgcccggacctgagacattctactactacgaccacggcctggacgtgtggggccagggaacaacagtgactgtctcttctacgcgtatccagaaccctgatcctgccgtgtaccagctgcgggatagcaagagcagcgacaagagcgtgtgtctgttcaccgacttcgacagccagaccaacgtgtcccagagcaaggactccgacgtgtacatcaccgataagtgcgtgctggacatgcggagcatggacttcaagagcaactccgccgtggcctggtccaacaagtccgatttcgcctgcgccaacgccttcaacaacagcattatccccgaggacacattcttcccaagcagcgacgtgccctgcgacgtgaagctggtggaaaagagcttcgagacagacaccaacctgaacttccagaacctgagcgtgatcggcttcagaatcctgctgctgaaagtggccggctttaacctgctgatgaccctgcggctgtggtccagccgcgccaagagaagcggatctggcgtgaagcagaccctgaatttcgacctgctgaagctggctggcgacgtggaatccaacccaggcccttctagaggccatatgaccgagtacaagcccacggtgcgcctcgccacccgcgacgacgtccccagggccgtacgcaccctcgccgccgcgttcgccgactaccccgccacgcgccacaccgtcgatccggaccgccacatcgagcgggtcaccgagctgcaagaactcttcctcacgcgcgtcgggctcgacatcggcaaggtgtgggtcgcggacgacggcgccgcggtggcggtctggaccacgccggagagcgtcgaagcgggggcggtgttcgccgagatcggcccgcgcatggccgagttgagcggttcccggctggccgcgcagcaacagatggaaggcctcctggcgccgcaccggcccaaggagcccgcgtggttcctggccaccgtcggcgtctcgcccgaccaccagggcaagggtctgggcagcgccgtcgtgctccccggagtggaggcggccgagcgcgccggggtgcccgccttcctggagacctccgcgccccgcaacctccccttctacgagcggctcggcttcaccgtcaccgccgacgtcgaggtgcccgaaggaccgcgcacctggtgcatgacccgcaagcccggtgcctga

SEQ ID NO: 40098 - DNA, 2652 bp, synthetic construct
  source 1..2652: mol_type = other DNA
atggccttaccagtgaccgccttgctcctgccgctggccttgctgctccacgccgccaggccgctcgagatccagaaccctgatcctgccgtgtaccagctgcgggatagcaagagcagcgacaagagcgtgtgtctgttcaccgacttcgacagccagaccaacgtgtcccagagcaaggactccgacgtgtacatcaccgataagtgcgtgctggacatgcggagcatggacttcaagagcaactccgccgtggcctggtccaacaagtccgatttcgcctgcgccaacgccttcaacaacagcattatccccgaggacacattcttcccaagcagcgacgtgccctgcgacgtgaagctggtggaaaagagcttcgagacagacaccaacctgaacttccagaacctgagcgtgatcggcttcagaatcctgctgctgaaagtggccggctttaacctgctgatgaccctgcggctgtggtccagcagggccaagcgatctggatctggagcaacaaacttctcactactcaaacaagcaggtgacgtggaggagaatcccgggcctactagcatggccttaccagtgaccgccttgctcctgccgctggccttgctgctccacgccgccaggccggacatccagatgacacagagcccctctagcctgtctgccagcgtgggagacagagtgaccatcacctgtagagccagccagagcatcagaaactacctgaactggtatcagcaaaagcccggcaaggcccctgagctgctgattcatgctgcaagcagcctccagagcggcgtgccaagcagattttctggcagcggcagcggaaccgacttcaccctgacaatatctagcctccagcctgaggacttcgccagctactactgccagcagagctacagcgcccctcctatcacctttggacagggcaccagactggaaatcaagggcggaggcggaagtggaggcggaggatctggcggcggaggctctcaggttcagctccagcagtctggacctggcctggtcaagcctagccagacactgtctctgacctgtgccatcagcggcgatagcgtgtcctctaatagagccgcctggaactggatcagacagagccctagcagaggactccagtggctgggcagaacctactaccgcagcaagtggtacaacgactacgccgtgtctctgcggagccggatcaccatcaatcccgtgaccagcaagaaccaggtggccctgcacatgaacagcgtgacccctgaagataccgccgtgtactactgtgccagagccggaattgtggtggtgcccggacctgagacattctactactacgaccacggcctggacgtgtggggccagggaacaacagtgactgtctcttctacgcgtgaggacctgaagaacgtgttcccacctgaggtggccgtgttcgagcctagcaaggccgagatcgcccacacccagaaagccaccctcgtgtgcctggctaccggcttctaccccgaccatgtggaactgtcttggtgggtcaacggcaaagaggtgcacagcggcgtgtgtaccgacccccagccactgaaagaacagcccgccctgaacgacagccggtactgcctgagcagcagactgagagtgtccgccaccttctggcagaacccccggaaccacttcagatgccaggtgcagttctacggcctgagcgagaacgacgagtggacccaggacagagccaagcccgtgacccagatcgtgtctgccgaagcctggggcagagccgattgcggcatcaccagcgccagctaccaccagggcgtgctgagcgccaccatcctgtacgagatcctgctgggcaaggccaccctgtacgccgtgctggtgtctgccctggtgctgatggctatggtcaagcggaaggacagccggggacgcgccaagagaagcggatctggcgtgaagcagaccctgaatttcgacctgctgaagctggctggcgacgtggaatccaacccaggcccttctagaggccatatgaccgagtacaagcccacggtgcgcctcgccacccgcgacgacgtccccagggccgtacgcaccctcgccgccgcgttcgccgactaccccgccacgcgccacaccgtcgatccggaccgccacatcgagcgggtcaccgagctgcaagaactcttcctcacgcgcgtcgggctcgacatcggcaaggtgtgggtcgcggacgacggcgccgcggtggcggtctggaccacgccggagagcgtcgaagcgggggcggtgttcgccgagatcggcccgcgcatggccgagttgagcggttcccggctggccgcgcagcaacagatggaaggcctcctggcgccgcaccggcccaaggagcccgcgtggttcctggccaccgtcggcgtctcgcccgaccaccagggcaagggtctgggcagcgccgtcgtgctccccggagtggaggcggccgagcgcgccggggtgcccgccttcctggagacctccgcgccccgcaacctccccttctacgagcggctcggcttcaccgtcaccgccgacgtcgaggtgcccgaaggaccgcgcacctggtgcatgacccgcaagcccggtgcctga

SEQ ID NO: 40099 - DNA, 2331 bp, synthetic construct
  source 1..2331: mol_type = other DNA
atggccttaccagtgaccgccttgctcctgccgctggccttgctgctccacgccgccaggccgctcgagcagagttttgggttgttggaccctaaattgtgctatctgttggacggaatcctgttcatttacggagtgatcctgaccgcattgttcctgcgggttaagttttccagatccgcagacgcacccgcttaccaacaagggcagaaccaactctacaatgaacttaatttggggcggagggaagagtacgacgttctggacaaaaggaggggacgagatcccgagatgggcggaaagcctcagcgaaggaagaatccgcaagaggggctttataacgaactccagaaagataaaatggcagaagcctatagtgagattgggatgaagggagaaaggaggaggggtaaaggtcacgatgggttgtaccaaggattgagcacagccactaaagatacctatgatgcgctccacatgcaggccctgccgccaagaagggccaagcgatctggatctggagcaacaaacttctcactactcaaacaagcaggtgacgtggaggagaatcccgggcctactagcatggccttaccagtgaccgccttgctcctgccgctggccttgctgctccacgccgccaggccggacatccagatgacacagagcccctctagcctgtctgccagcgtgggagacagagtgaccatcacctgtagagccagccagagcatcagaaactacctgaactggtatcagcaaaagcccggcaaggcccctgagctgctgattcatgctgcaagcagcctccagagcggcgtgccaagcagattttctggcagcggcagcggaaccgacttcaccctgacaatatctagcctccagcctgaggacttcgccagctactactgccagcagagctacagcgcccctcctatcacctttggacagggcaccagactggaaatcaagggcggaggcggaagtggaggcggaggatctggcggcggaggctctcaggttcagctccagcagtctggacctggcctggtcaagcctagccagacactgtctctgacctgtgccatcagcggcgatagcgtgtcctctaatagagccgcctggaactggatcagacagagccctagcagaggactccagtggctgggcagaacctactaccgcagcaagtggtacaacgactacgccgtgtctctgcggagccggatcaccatcaatcccgtgaccagcaagaaccaggtggccctgcacatgaacagcgtgacccctgaagataccgccgtgtactactgtgccagagccggaattgtggtggtgcccggacctgagacattctactactacgaccacggcctggacgtgtggggccagggaacaacagtgactgtctcttctacgcgtgagctgggagagcctcagctgtgctatatcctggacgccatcctgtttctgtacggcatcgtgctgaccctgctgtactgccggctgaagatccaagtgcggaaggccgccatcaccagctacgagaaatccgacggcgtgtacaccggcctgagcaccagaaatcaagagacatacgagacactgaagcacgaaaagcctccacaacgcgccaagagaagcggatctggcgtgaagcagaccctgaatttcgacctgctgaagctggctggcgacgtggaatccaacccaggcccttctagaggccatatgaccgagtacaagcccacggtgcgcctcgccacccgcgacgacgtccccagggccgtacgcaccctcgccgccgcgttcgccgactaccccgccacgcgccacaccgtcgatccggaccgccacatcgagcgggtcaccgagctgcaagaactcttcctcacgcgcgtcgggctcgacatcggcaaggtgtgggtcgcggacgacggcgccgcggtggcggtctggaccacgccggagagcgtcgaagcgggggcggtgttcgccgagatcggcccgcgcatggccgagttgagcggttcccggctggccgcgcagcaacagatggaaggcctcctggcgccgcaccggcccaaggagcccgcgtggttcctggccaccgtcggcgtctcgcccgaccaccagggcaagggtctgggcagcgccgtcgtgctccccggagtggaggcggccgagcgcgccggggtgcccgccttcctggagacctccgcgccccgcaacctccccttctacgagcggctcggcttcaccgtcaccgccgacgtcgaggtgcccgaaggaccgcgcacctggtgcatgacccgcaagcccggtgcctga

SEQ ID NO: 40100 - DNA, 2964 bp, synthetic construct; identical to SEQ ID NO: 40091
  source 1..2964: mol_type = other DNA

SEQ ID NO: 40101 - DNA, 2964 bp, synthetic construct; identical to SEQ ID NO: 40092
  source 1..2964: mol_type = other DNA

SEQ ID NO: 40102 - DNA, 2961 bp, synthetic construct
  source 1..2961: mol_type = other DNA
atggccttaccagtgaccgccttgctcctgccgctggccttgctgctccacgccgccaggccgctcgaggaggaggacctgaagaacgtgttcccacctgaggtggccgtgttcgagcctagcgaggccgagatcagccacacccagaaagccaccctcgtgtgcctggctaccggcttctaccccgaccatgtggaactgtcttggtgggtcaacggcaaagaggtgcacagcggcgtgtgtaccgacccccagccactgaaagaacagcccgccctgaacgacagccggtactgcctgagcagcagactgagagtgtccgccaccttctggcagaacccccggaaccacttcagatgccaggtgcagttctacggcctgagcgagaacgacgagtggacccaggacagagccaagcccgtgacccagatcgtgtctgccgaagcctggggcagagccgatgatgtgattaagatccactggcaggaaaagaagtccaacaccatcctgggcagccaggaaggcaacaccatgaagaccaacgacacctacatgaagttcagctggctgaccgtgcccgagaagtccctggacaaagaacacagatgcatcgtgcggcacgaaaacaacaagaacggcgtggaccaggaaatcatcttcccacccatcaagaccgatgtgattacaatggaccccaaggacaactgctccaaggacgccaacgataccctgctgctccagctgaccaacaccagcgcctactacatgtacttgttgctgctgctgaagtccgtggtgtacttcgccatcatcacatgctgcctgctgcggagaaccgccttctgctgcaacggcgagaagtctagggccaagcgatctggatctggagcaacaaacttctcactactcaaacaagcaggtgacgtggaggagaatcccgggcctactagcatggccttaccagtgaccgccttgctcctgccgctggccttgctgctccacgccgccaggccggacatccagatgacacagagcccctctagcctgtctgccagcgtgggagacagagtgaccatcacctgtagagccagccagagcatcagaaactacctgaactggtatcagcaaaagcccggcaaggcccctgagctgctgattcatgctgcaagcagcctccagagcggcgtgccaagcagattttctggcagcggcagcggaaccgacttcaccctgacaatatctagcctccagcctgaggacttcgccagctactactgccagcagagctacagcgcccctcctatcacctttggacagggcaccagactggaaatcaagggcggaggcggaagtggaggcggaggatctggcggcggaggctctcaggttcagctccagcagtctggacctggcctggtcaagcctagccagacactgtctctgacctgtgccatcagcggcgatagcgtgtcctctaatagagccgcctggaactggatcagacagagccctagcagaggactccagtggctgggcagaacctactaccgcagcaagtggtacaacgactacgccgtgtctctgcggagccggatcaccatcaatcccgtgaccagcaagaaccaggtggccctgcacatgaacagcgtgacccctgaagataccgccgtgtactactgtgccagagccggaattgtggtggtgcccggacctgagacattctactactacgaccacggcctggacgtgtggggccagggaacaacagtgactgtctcttctacgcgtatccagaaccctgatcctgccgtgtaccagctgcgggatagcaagagcagcgacaagagcgtgtgtctgttcaccgacttcgacagccagaccaacgtgtcccagagcaaggactccgacgtgtacatcaccgataagtgcgtgctggacatgcggagcatggacttcaagagcaactccgccgtggcctggtccaacaagtccgatttcgcctgcgccaacgccttcaacaacagcattatccccgaggacacattcttcccaagccccgagagcagcgactccaccgaccacgtgaagcccaaagagacagagaacaccaagcagcccagcaagagctgccacaagcccaaggccatcgtgcacaccgagaaagtgaacatgatgagcctgaccgtgctgggcctgcggatgctgttcgccaaaaccgtggccgtgaacttcctgctgaccgccaagctgttcttcctccgcgccaagagaagcggatctggcgtgaagcagaccctgaatttcgacctgctgaagctggctggcgacgtggaatccaacccaggcccttctagaggccatatgaccgagtacaagcccacggtgcgcctcgccacccgcgacgacgtccccagggccgtacgcaccctcgccgccgcgttcgccgactaccccgccacgcgccacaccgtcgatccggaccgccacatcgagcgggtcaccgagctgcaagaactcttcctcacgcgcgtcgggctcgacatcggcaaggtgtgggtcgcggacgacggcgccgcggtggcggtctggaccacgccggagagcgtcgaagcgggggcggtgttcgccgagatcggcccgcgcatggccgagttgagcggttcccggctggccgcgcagcaacagatggaaggcctcctggcgccgcaccggcccaaggagcccgcgtggttcctggccaccgtcggcgtctcgcccgaccaccagggcaagggtctgggcagcgccgtcgtgctccccggagtggaggcggccgagcgcgccggggtgcccgccttcctggagacctccgcgccccgcaacctccccttctacgagcggctcggcttcaccgtcaccgccgacgtcgaggtgcccgaaggaccgcgcacctggtgcatgacccgcaagcccggtgcctga

SEQ ID NO: 40103 - DNA, 2961 bp, synthetic construct
  source 1..2961: mol_type = other DNA
atggccttaccagtgaccgccttgctcctgccgctggccttgctgctccacgccgccaggccgctcgagatccagaaccctgatcctgccgtgtaccagctgcgggatagcaagagcagcgacaagagcgtgtgtctgttcaccgacttcgacagccagaccaacgtgtcccagagcaaggactccgacgtgtacatcaccgataagtgcgtgctggacatgcggagcatggacttcaagagcaactccgccgtggcctggtccaacaagtccgatttcgcctgcgccaacgccttcaacaacagcattatccccgaggacacattcttcccaagccccgagagcagcgactccaccgaccacgtgaagcccaaagagacagagaacaccaagcagcccagcaagagctgccacaagcccaaggccatcgtgcacaccgagaaagtgaacatgatgagcctgaccgtgctgggcctgcggatgctgttcgccaaaaccgtggccgtgaacttcctgctgaccgccaagctgttcttcctcagggccaagcgatctggatctggagcaacaaacttctcactactcaaacaagcaggtgacgtggaggagaatcccgggcctactagcatggccttaccagtgaccgccttgctcctgccgctggccttgctgctccacgccgccaggccggacatccagatgacacagagcccctctagcctgtctgccagcgtgggagacagagtgaccatcacctgtagagccagccagagcatcagaaactacctgaactggtatcagcaaaagcccggcaaggcccctgagctgctgattcatgctgcaagcagcctccagagcggcgtgccaagcagattttctggcagcggcagcggaaccgacttcaccctgacaatatctagcctccagcctgaggacttcgccagctactactgccagcagagctacagcgcccctcctatcacctttggacagggcaccagactggaaatcaagggcggaggcggaagtggaggcggaggatctggcggcggaggctctcaggttcagctccagcagtctggacctggcctggtcaagcctagccagacactgtctctgacctgtgccatcagcggcgatagcgtgtcctctaatagagccgcctggaactggatcagacagagccctagcagaggactccagtggctgggcagaacctactaccgcagcaagtggtacaacgactacgccgtgtctctgcggagccggatcaccatcaatcccgtgaccagcaagaaccaggtggccctgcacatgaacagcgtgacccctgaagataccgccgtgtactactgtgccagagccggaattgtggtggtgcccggacctgagacattctactactacgaccacggcctggacgtgtggggccagggaacaacagtgactgtctcttctacgcgtgaggaggacctgaagaacgtgttcccacctgaggtggccgtgttcgagcctagcgaggccgagatcagccacacccagaaagccaccctcgtgtgcctggctaccggcttctaccccgaccatgtggaactgtcttggtgggtcaacggcaaagaggtgcacagcggcgtgtgtaccgacccccagccactgaaagaacagcccgccctgaacgacagccggtactgcctgagcagcagactgagagtgtccgccaccttctggcagaacccccggaaccacttcagatgccaggtgcagttctacggcctgagcgagaacgacgagtggacccaggacagagccaagcccgtgacccagatcgtgtctgccgaagcctggggcagagccgatgatgtgattaagatccactggcaggaaaagaagtccaacaccatcctgggcagccaggaaggcaacaccatgaagaccaacgacacctacatgaagttcagctggctgaccgtgcccgagaagtccctggacaaagaacacagatgcatcgtgcggcacgaaaacaacaagaacggcgtggaccaggaaatcatcttcccacccatcaagaccgatgtgattacaatggaccccaaggacaactgctccaaggacgccaacgataccctgctgctccagctgaccaacaccagcgcctactacatgtacttgttgctgctgctgaagtccgtggtgtacttcgccatcatcacatgctgcctgctgcggagaaccgccttctgctgcaacggcgagaagtctcgcgccaagagaagcggatctggcgtgaagcagaccctgaatttcgacctgctgaagctggctggcgacgtggaatccaacccaggcccttctagaggccatatgaccgagtacaagcccacggtgcgcctcgccacccgcgacgacgtccccagggccgtacgcaccctcgccgccgcgttcgccgactaccccgccacgcgccacaccgtcgatccggaccgccacatcgagcgggtcaccgagctgcaagaactcttcctcacgcgcgtcgggctcgacatcggcaaggtgtgggtcgcggacgacggcgccgcggtggcggtctggaccacgccggagagcgtcgaagcgggggcggtgttcgccgagatcggcccgcgcatggccgagttgagcggttcccggctggccgcgcagcaacagatggaaggcctcctggcgccgcaccggcccaaggagcccgcgtggttcctggccaccgtcggcgtctcgcccgaccaccagggcaagggtctgggcagcgccgtcgtgctccccggagtggaggcggccgagcgcgccggggtgcccgccttcctggagacctccgcgccccgcaacctccccttctacgagcggctcggcttcaccgtcaccgccgacgtcgaggtgcccgaaggaccgcgcacctggtgcatgacccgcaagcccggtgcctga

SEQ ID NO: 40104 - DNA, 2652 bp, synthetic construct
  source 1..2652: mol_type = other DNA
atggccttaccagtgaccgccttgctcctgccgctggccttgctgctccacgccgccaggccgctcgaggaggacctgaagaacgtgttcccacctgaggtggccgtgttcgagcctagcgaggccgagatcagccacacccagaaagccaccctcgtgtgcctggctaccggcttctaccccgaccatgtggaactgtcttggtgggtcaacggcaaagaggtgcacagcggcgtgtctaccgacccccagccactgaaagaacagcccgccctgaacgacagccggtactgcctgagcagcagactgagagtgtccgccaccttctggcagaacccccggaaccacttcagatgccaggtgcagttctacggcctgagcgagaacgacgagtggacccaggacagagccaagcccgtgacccagatcgtgtctgccgaagcctggggcagagccgattgcggctttaccagcgagagctaccagcagggcgtgctgagcgccaccaacctgagcgtgatcggcttcagaatcctgctgctgaaagtggccggctttaacctgctgatgaccctgcggctgtggtccagcagggccaagcgatctggatctggagcaacaaacttctcactactcaaacaagcaggtgacgtggaggagaatcccgggcctactagcatggccttaccagtgaccgccttgctcctgccgctggccttgctgctccacgccgccaggccggacatccagatgacacagagcccctctagcctgtctgccagcgtgggagacagagtgaccatcacctgtagagccagccagagcatcagaaactacctgaactggtatcagcaaaagcccggcaaggcccctgagctgctgattcatgctgcaagcagcctccagagcggcgtgccaagcagattttctggcagcggcagcggaaccgacttcaccctgacaatatctagcctccagcctgaggacttcgccagctactactgccagcagagctacagcgcccctcctatcacctttggacagggcaccagactggaaatcaagggcggaggcggaagtggaggcggaggatctggcggcggaggctctcaggttcagctccagcagtctggacctggcctggtcaagcctagccagacactgtctctgacctgtgccatcagcggcgatagcgtgtcctctaatagagccgcctggaactggatcagacagagccctagcagaggactccagtggctgggcagaacctactaccgcagcaagtggtacaacgactacgccgtgtctctgcggagccggatcaccatcaatcccgtgaccagcaagaaccaggtggccctgcacatgaacagcgtgacccctgaagataccgccgtgtactactgtgccagagccggaattgtggtggtgcccggacctgagacattctactactacgaccacggcctggacgtgtggggccagggaacaacagtgactgtctcttctacgcgtatccagaaccctgatcctgccgtgtaccagctgcgggatagcaagagcagcgacaagagcgtgtgtctgttcaccgacttcgacagccagaccaacgtgtcccagagcaaggactccgacgtgtacatcaccgataagaccgtgctggacatgcggagcatggacttcaagagcaactccgccgtggcctggtccaacaagtccgatttcgcctgcgccaacgccttcaacaacagcattatccccgaggacacattcttcccaagccccgagagcagctgcgacgtgaagctggtggaaaagagcttcgagacagacaccaacctgaacttccagatcctgtacgagatcctgctgggcaaggccaccctgtacgccgtgctggtgtctgccctggtgctgatggctatggtcaagcggaaggacagccggggacgcgccaagagaagcggatctggcgtgaagcagaccctgaatttcgacctgctgaagctggctggcgacgtggaatccaacccaggcccttctagaggccatatgaccgagtacaagcccacggtgcgcctcgccacccgcgacgacgtccccagggccgtacgcaccctcgccgccgcgttcgccgactaccccgccacgcgccacaccgtcgatccggaccgccacatcgagcgggtcaccgagctgcaagaactcttcctcacgcgcgtcgggctcgacatcggcaaggtgtgggtcgcggacgacggcgccgcggtggcggtctggaccacgccggagagcgtcgaagcgggggcggtgttcgccgagatcggcccgcgcatggccgagttgagcggttcccggctggccgcgcagcaacagatggaaggcctcctggcgccgcaccggcccaaggagcccgcgtggttcctggccaccgtcggcgtctcgcccgaccaccagggcaagggtctgggcagcgccgtcgtgctccccggagtggaggcggccgagcgcgccggggtgcccgccttcctggagacctccgcgccccgcaacctccccttctacgagcggctcggcttcaccgtcaccgccgacgtcgaggtgcccgaaggaccgcgcacctggtgcatgacccgcaagcccggtgcctga

SEQ ID NO: 40105 - DNA, 2652 bp, synthetic construct
  source 1..2652: mol_type = other DNA
atggccttaccagtgaccgccttgctcctgccgctggccttgctgctccacgccgccaggccgctcgagatccagaaccctgatcctgccgtgtaccagctgcgggatagcaagagcagcgacaagagcgtgtgtctgttcaccgacttcgacagccagaccaacgtgtcccagagcaaggactccgacgtgtacatcaccgataagaccgtgctggacatgcggagcatggacttcaagagcaactccgccgtggcctggtccaacaagtccgatttcgcctgcgccaacgccttcaacaacagcattatccccgaggacacattcttcccaagccccgagagcagctgcgacgtgaagctggtggaaaagagcttcgagacagacaccaacctgaacttccagatcctgtacgagatcctgctgggcaaggccaccctgtacgccgtgctggtgtctgccctggtgctgatggctatggtcaagcggaaggacagccggggaagggccaagcgatctggatctggagcaacaaacttctcactactcaaacaagcaggtgacgtggaggagaatcccgggcctactagcatggccttaccagtgaccgccttgctcctgccgctggccttgctgctccacgccgccaggccggacatccagatgacacagagcccctctagcctgtctgccagcgtgggagacagagtgaccatcacctgtagagccagccagagcatcagaaactacctgaactggtatcagcaaaagcccggcaaggcccctgagctgctgattcatgctgcaagcagcctccagagcggcgtgccaagcagattttctggcagcggcagcggaaccgacttcaccctgacaatatctagcctccagcctgaggacttcgccagctactactgccagcagagctacagcgcccctcctatcacctttggacagggcaccagactggaaatcaagggcggaggcggaagtggaggcggaggatctggcggcggaggctctcaggttcagctccagcagtctggacctggcctggtcaagcctagccagacactgtctctgacctgtgccatcagcggcgatagcgtgtcctctaatagagccgcctggaactggatcagacagagccctagcagaggactccagtggctgggcagaacctactaccgcagcaagtggtacaacgactacgccgtgtctctgcggagccggatcaccatcaatcccgtgaccagcaagaaccaggtggccctgcacatgaacagcgtgacccctgaagataccgccgtgtactactgtgccagagccggaattgtggtggtgcccggacctgagacattctactactacgaccacggcctggacgtgtggggccagggaacaacagtgactgtctcttctacgcgtgaggacctgaagaacgtgttcccacctgaggtggccgtgttcgagcctagcgaggccgagatcagccacacccagaaagccaccctcgtgtgcctggctaccggcttctaccccgaccatgtggaactgtcttggtgggtcaacggcaaagaggtgcacagcggcgtgtctaccgacccccagccactgaaagaacagcccgccctgaacgacagccggtactgcctgagcagcagactgagagtgtccgccaccttctggcagaacccccggaaccacttcagatgccaggtgcagttctacggcctgagcgagaacgacgagtggacccaggacagagccaagcccgtgacccagatcgtgtctgccgaagcctggggcagagccgattgcggctttaccagcgagagctaccagcagggcgtgctgagcgccaccaacctgagcgtgatcggcttcagaatcctgctgctgaaagtggccggctttaacctgctgatgaccctgcggctgtggtccagccgcgccaagagaagcggatctggcgtgaagcagaccctgaatttcgacctgctgaagctggctggcgacgtggaatccaacccaggcccttctagaggccatatgaccgagtacaagcccacggtgcgcctcgccacccgcgacgacgtccccagggccgtacgcaccctcgccgccgcgttcgccgactaccccgccacgcgccacaccgtcgatccggaccgccacatcgagcgggtcaccgagctgcaagaactcttcctcacgcgcgtcgggctcgacatcggcaaggtgtgggtcgcggacgacggcgccgcggtggcggtctggaccacgccggagagcgtcgaagcgggggcggtgttcgccgagatcggcccgcgcatggccgagttgagcggttcccggctggccgcgcagcaacagatggaaggcctcctggcgccgcaccggcccaaggagcccgcgtggttcctggccaccgtcggcgtctcgcccgaccaccagggcaagggtctgggcagcgccgtcgtgctccccggagtggaggcggccgagcgcgccggggtgcccgccttcctggagacctccgcgccccgcaacctccccttctacgagcggctcggcttcaccgtcaccgccgacgtcgaggtgcccgaaggaccgcgcacctggtgcatgacccgcaagcccggtgcctga

SEQ ID NO: 40106 - DNA, 2652 bp, synthetic construct
  source 1..2652: mol_type = other DNA
atggccttaccagtgaccgccttgctcctgccgctggccttgctgctccacgccgccaggccgctcgaggaggacctgaagaacgtgttcccacctgaggtggccgtgttcgagcctagcgaggccgagatcagccacacccagaaagccaccctcgtgtgcctggctaccggcttctaccccgaccatgtggaactgtcttggtgggtcaacggcaaagaggtgcacagcggcgtgtgtaccgacccccagccactgaaagaacagcccgccctgaacgacagccggtactgcctgagcagcagactgagagtgtccgccaccttctggcagaacccccggaaccacttcagatgccaggtgcagttctacggcctgagcgagaacgacgagtggacccaggacagagccaagcccgtgacccagatcgtgtctgccgaagcctggggcagagccgattgcgacgtgaagctggtggaaaagagcttcgagacagacaccaacctgaacttccagaacctgagcgtgatcggcttcagaatcctgctgctgaaagtggccggctttaacctgctgatgaccctgcggctgtggtccagcagggccaagcgatctggatctggagcaacaaacttctcactactcaaacaagcaggtgacgtggaggagaatcccgggcctactagcatggccttaccagtgaccgccttgctcctgccgctggccttgctgctccacgccgccaggccggacatccagatgacacagagcccctctagcctgtctgccagcgtgggagacagagtgaccatcacctgtagagccagccagagcatcagaaactacctgaactggtatcagcaaaagcccggcaaggcccctgagctgctgattcatgctgcaagcagcctccagagcggcgtgccaagcagattttctggcagcggcagcggaaccgacttcaccctgacaatatctagcctccagcctgaggacttcgccagctactactgccagcagagctacagcgcccctcctatcacctttggacagggcaccagactggaaatcaagggcggaggcggaagtggaggcggaggatctggcggcggaggctctcaggttcagctccagcagtctggacctggcctggtcaagcctagccagacactgtctctgacctgtgccatcagcggcgatagcgtgtcctctaatagagccgcctggaactggatcagacagagccctagcagaggactccagtggctgggcagaacctactaccgcagcaagtggtacaacgactacgccgtgtctctgcggagccggatcaccatcaatcccgtgaccagcaagaaccaggtggccctgcacatgaacagcgtgacccctgaagataccgccgtgtactactgtgccagagccggaattgtggtggtgcccggacctgagacattctactactacgaccacggcctggacgtgtggggccagggaacaacagtgactgtctcttctacgcgtatccagaaccctgatcctgccgtgtaccagctgcgggatagcaagagcagcgacaagagcgtgtgtctgttcaccgacttcgacagccagaccaacgtgtcccagagcaaggactccgacgtgtacatcaccgataagtgcgtgctggacatgcggagcatggacttcaagagcaactccgccgtggcctggtccaacaagtccgatttcgcctgcgccaacgccttcaacaacagcattatccccgaggacacattcttcccaagccccgagagcagctgcggctttaccagcgagagctaccagcagggcgtgctgagcgccaccatcctgtacgagatcctgctgggcaaggccaccctgtacgccgtgctggtgtctgccctggtgctgatggctatggtcaagcggaaggacagccggggacgcgccaagagaagcggatctggcgtgaagcagaccctgaatttcgacctgctgaagctggctggcgacgtggaatccaacccaggcccttctagaggccatatgaccgagtacaagcccacggtgcgcctcgccacccgcgacgacgtccccagggccgtacgcaccctcgccgccgcgttcgccgactaccccgccacgcgccacaccgtcgatccggaccgccacatcgagcgggtcaccgagctgcaagaactcttcctcacgcgcgtcgggctcgacatcggcaaggtgtgggtcgcggacgacggcgccgcggtggcggtctggaccacgccggagagcgtcgaagcgggggcggtgttcgccgagatcggcccgcgcatggccgagttgagcggttcccggctggccgcgcagcaacagatggaaggcctcctggcgccgcaccggcccaaggagcccgcgtggttcctggccaccgtcggcgtctcgcccgaccaccagggcaagggtctgggcagcgccgtcgtgctccccggagtggaggcggccgagcgcgccggggtgcccgccttcctggagacctccgcgccccgcaacctccccttctacgagcggctcggcttcaccgtcaccgccgacgtcgaggtgcccgaaggaccgcgcacctggtgcatgacccgcaagcccggtgcctga

SEQ ID NO: 40107 - DNA, 2652 bp, synthetic construct
  source 1..2652: mol_type = other DNA
atggccttaccagtgaccgccttgctcctgccgctggccttgctgctccacgccgccaggccgctcgaggaggacctgaagaacgtgttcccacctgaggtggccgtgttcgagcctagcgaggccgagatcagccacacccagaaagccaccctcgtgtgcctggctaccggcttctaccccgaccatgtggaactgtcttggtgggtcaacggcaaagaggtgcacagcggcgtgtctaccgacccccagccactgaaagaacagcccgccctgaacgacagccggtactgcctgagcagcagactgagagtgtccgccaccttctggcagaacccccggaaccacttcagatgccaggtgcagttctacggcctgagcgagaacgacgagtggacccaggacagagccaagcccgtgacccagatcgtgtctgccgaagcctggggcagagccgattgcgacgtgaagctggtggaaaagagcttcgagacagacaccaacctgaacttccagaacctgagcgtgatcggcttcagaatcctgctgctgaaagtggccggctttaacctgctgatgaccctgcggctgtggtccagcagggccaagcgatctggatctggagcaacaaacttctcactactcaaacaagcaggtgacgtggaggagaatcccgggcctactagcatggccttaccagtgaccgccttgctcctgccgctggccttgctgctccacgccgccaggccggacatccagatgacacagagcccctctagcctgtctgccagcgtgggagacagagtgaccatcacctgtagagccagccagagcatcagaaactacctgaactggtatcagcaaaagcccggcaaggcccctgagctgctgattcatgctgcaagcagcctccagagcggcgtgccaagcagattttctggcagcggcagcggaaccgacttcaccctgacaatatctagcctccagcctgaggacttcgccagctactactgccagcagagctacagcgcccctcctatcacctttggacagggcaccagactggaaatcaagggcggaggcggaagtggaggcggaggatctggcggcggaggctctcaggttcagctccagcagtctggacctggcctggtcaagcctagccagacactgtctctgacctgtgccatcagcggcgatagcgtgtcctctaatagagccgcctggaactggatcagacagagccctagcagaggactccagtggctgggcagaacctactaccgcagcaagtggtacaacgactacgccgtgtctctgcggagccggatcaccatcaatcccgtgaccagcaagaaccaggtggccctgcacatgaacagcgtgacccctgaagataccgccgtgtactactgtgccagagccggaattgtggtggtgcccggacctgagacattctactactacgaccacggcctggacgtgtggggccagggaacaacagtgactgtctcttctacgcgtatccagaaccctgatcctgccgtgtaccagctgcgggatagcaagagcagcgacaagagcgtgtgtctgttcaccgacttcgacagccagaccaacgtgtcccagagcaaggactccgacgtgtacatcaccgataagaccgtgctggacatgcggagcatggacttcaagagcaactccgccgtggcctggtccaacaagtccgatttcgcctgcgccaacgccttcaacaacagcattatccccgaggacacattcttcccaagccccgagagcagctgcggctttaccagcgagagctaccagcagggcgtgctgagcgccaccatcctgtacgagatcctgctgggcaaggccaccctgtacgccgtgctggtgtctgccctggtgctgatggctatggtcaagcggaaggacagccggggacgcgccaagagaagcggatctggcgtgaagcagaccctgaatttcgacctgctgaagctggctggcgacgtggaatccaacccaggcccttctagaggccatatgaccgagtacaagcccacggtgcgcctcgccacccgcgacgacgtccccagggccgtacgcaccctcgccgccgcgttcgccgactaccccgccacgcgccacaccgtcgatccggaccgccacatcgagcgggtcaccgagctgcaagaactcttcctcacgcgcgtcgggctcgacatcggcaaggtgtgggtcgcggacgacggcgccgcggtggcggtctggaccacgccggagagcgtcgaagcgggggcggtgttcgccgagatcggcccgcgcatggccgagttgagcggttcccggctggccgcgcagcaacagatggaaggcctcctggcgccgcaccggcccaaggagcccgcgtggttcctggccaccgtcggcgtctcgcccgaccaccagggcaagggtctgggcagcgccgtcgtgctccccggagtggaggcggccgagcgcgccggggtgcccgccttcctggagacctccgcgccccgcaacctccccttctacgagcggctcggcttcaccgtcaccgccgacgtcgaggtgcccgaaggaccgcgcacctggtgcatgacccgcaagcccggtgcctga

SEQ ID NO: 40108 - DNA, 2961 bp, synthetic construct
  source 1..2961: mol_type = other DNA
atggccttaccagtgaccgccttgctcctgccgctggccttgctgctccacgccgccaggccgctcgaggaggaggacctgaagaacgtgttcccacctgaggtggccgtgttcgagcctagcgaggccgagatcagccacacccagaaagccaccctcgtgtgcctggctaccggcttctaccccgaccatgtggaactgtcttggtgggtcaacggcaaagaggtgcacagcggcgtgtctaccgacccccagccactgaaagaacagcccgccctgaacgacagccggtactgcctgagcagcagactgagagtgtccgccaccttctggcagaacccccggaaccacttcagatgccaggtgcagttctacggcctgagcgagaacgacgagtggacccaggacagagccaagcccgtgacccagatcgtgtctgccgaagcctggggcagagccgatgatgtgattaagatccactggcaggaaaagaagtccaacaccatcctgggcagccaggaaggcaacaccatgaagaccaacgacacctacatgaagttcagctggctgaccgtgcccgagaagtccctggacaaagaacacagatgcatcgtgcggcacgaaaacaacaagaacggcgtggaccaggaaatcatcttcccacccatcaagaccgatgtgattacaatggaccccaaggacaactgctccaaggacgccaacgataccctgctgctccagctgaccaacaccagcgcctactacatgtacttgttgctgctgctgaagtccgtggtgtacttcgccatcatcacatgctgcctgctgcggagaaccgccttctgctgcaacggcgagaagtctagggccaagcgatctggatctggagcaacaaacttctcactactcaaacaagcaggtgacgtggaggagaatcccgggcctactagcatggccttaccagtgaccgccttgctcctgccgctggccttgctgctccacgccgccaggccggacatccagatgacacagagcccctctagcctgtctgccagcgtgggagacagagtgaccatcacctgtagagccagccagagcatcagaaactacctgaactggtatcagcaaaagcccggcaaggcccctgagctgctgattcatgctgcaagcagcctccagagcggcgtgccaagcagattttctggcagcggcagcggaaccgacttcaccctgacaatatctagcctccagcctgaggacttcgccagctactactgccagcagagctacagcgcccctcctatcacctttggacagggcaccagactggaaatcaagggcggaggcggaagtggaggcggaggatctggcggcggaggctctcaggttcagctccagcagtctggacctggcctggtcaagcctagccagacactgtctctgacctgtgccatcagcggcgatagcgtgtcctctaatagagccgcctggaactggatcagacagagccctagcagaggactccagtggctgggcagaacctactaccgcagcaagtggtacaacgactacgccgtgtctctgcggagccggatcaccatcaatcccgtgaccagcaagaaccaggtggccctgcacatgaacagcgtgacccctgaagataccgccgtgtactactgtgccagagccggaattgtggtggtgcccggacctgagacattctactactacgaccacggcctggacgtgtggggccagggaacaacagtgactgtctcttctacgcgtatccagaaccctgatcctgccgtgtaccagctgcgggatagcaagagcagcgacaagagcgtgtgtctgttcaccgacttcgacagccagaccaacgtgtcccagagcaaggactccgacgtgtacatcaccgataagaccgtgctggacatgcggagcatggacttcaagagcaactccgccgtggcctggtccaacaagtccgatttcgcctgcgccaacgccttcaacaacagcattatccccgaggacacattcttcccaagccccgagagcagcgactccaccgaccacgtgaagcccaaagagacagagaacaccaagcagcccagcaagagctgccacaagcccaaggccatcgtgcacaccgagaaagtgaacatgatgagcctgaccgtgctgggcctgcggatgctgttcgccaaaaccgtggccgtgaacttcctgctgaccgccaagctgttcttcctccgcgccaagagaagcggatctggcgtgaagcagaccctgaatttcgacctgctgaagctggctggcgacgtggaatccaacccaggcccttctagaggccatatgaccgagtacaagcccacggtgcgcctcgccacccgcgacgacgtccccagggccgtacgcaccctcgccgccgcgttcgccgactaccccgccacgcgccacaccgtcgatccggaccgccacatcgagcgggtcaccgagctgcaagaactcttcctcacgcgcgtcgggctcgacatcggcaaggtgtgggtcgcggacgacggcgccgcggtggcggtctggaccacgccggagagcgtcgaagcgggggcggtgttcgccgagatcggcccgcgcatggccgagttgagcggttcccggctggccgcgcagcaacagatggaaggcctcctggcgccgcaccggcccaaggagcccgcgtggttcctggccaccgtcggcgtctcgcccgaccaccagggcaagggtctgggcagcgccgtcgtgctccccggagtggaggcggccgagcgcgccggggtgcccgccttcctggagacctccgcgccccgcaacctccccttctacgagcggctcggcttcaccgtcaccgccgacgtcgaggtgcccgaaggaccgcgcacctggtgcatgacccgcaagcccggtgcctga

SEQ ID NO: 40109 - DNA, 2652 bp, synthetic construct
  source 1..2652: mol_type = other DNA
atggccttaccagtgaccgccttgctcctgccgctggccttgctgctccacgccgccaggccgctcgaggaggacctgaagaacgtgttcccacctgaggtggccgtgttcgagcctagcgaggccgagatcagccacacccagaaagccaccctcgtgtgcctggctaccggcttctaccccgaccatgtggaactgtcttggtgggtcaacggcaaagaggtgcacagcggcgtgtgtaccgacccccagccactgaaagaacagcccgccctgaacgacagccggtactgcctgagcagcagactgagagtgtccgccaccttctggcagaacccccggaaccacttcagatgccaggtgcagttctacggcctgagcgagaacgacgagtggacccaggacagagccaagcccgtgacccagatcgtgtctgccgaagcctggggcagagccgattgcggctttaccagcgagagctaccagcagggcgtgctgagcgccaccaacctgagcgtgatcggcttcagaatcctgctgctgaaagtggccggctttaacctgctgatgaccctgcggctgtggtccagcagggccaagcgatctggatctggagcaacaaacttctcactactcaaacaagcaggtgacgtggaggagaatcccgggcctactagcatggccttaccagtgaccgccttgctcctgccgctggccttgctgctccacgccgccaggccggacatccagatgacacagagcccctctagcctgtctgccagcgtgggagacagagtgaccatcacctgtagagccagccagagcatcagaaactacctgaactggtatcagcaaaagcccggcaaggcccctgagctgctgattcatgctgcaagcagcctccagagcggcgtgccaagcagattttctggcagcggcagcggaaccgacttcaccctgacaatatctagcctccagcctgaggacttcgccagctactactgccagcagagctacagcgcccctcctatcacctttggacagggcaccagactggaaatcaagggcggaggcggaagtggaggcggaggatctggcggcggaggctctcaggttcagctccagcagtctggacctggcctggtcaagcctagccagacactgtctctgacctgtgccatcagcggcgatagcgtgtcctctaatagagccgcctggaactggatcagacagagccctagcagaggactccagtggctgggcagaacctactaccgcagcaagtggtacaacgactacgccgtgtctctgcggagccggatcaccatcaatcccgtgaccagcaagaaccaggtggccctgcacatgaacagcgtgacccctgaagataccgccgtgtactactgtgccagagccggaattgtggtggtgcccggacctgagacattctactactacgaccacggcctggacgtgtggggccagggaacaacagtgactgtctcttctacgcgtatccagaaccctgatcctgccgtgtaccagctgcgggatagcaagagcagcgacaagagcgtgtgtctgttcaccgacttcgacagccagaccaacgtgtcccagagcaaggactccgacgtgtacatcaccgataagtgcgtgctggacatgcggagcatggacttcaagagcaactccgccgtggcctggtccaacaagtccgatttcgcctgcgccaacgccttcaacaacagcattatccccgaggacacattcttcccaagccccgagagcagctgcgacgtgaagctggtggaaaagagcttcgagacagacaccaacctgaacttccagatcctgtacgagatcctgctgggcaaggccaccctgtacgccgtgctggtgtctgccctggtgctgatggctatggtcaagcggaaggacagccggggacgcgccaagagaagcggatctggcgtgaagcagaccctgaatttcgacctgctgaagctggctggcgacgtggaatccaacccaggcccttctagaggccatatgaccgagtacaagcccacggtgcgcctcgccacccgcgacgacgtccccagggccgtacgcaccctcgccgccgcgttcgccgactaccccgccacgcgccacaccgtcgatccggaccgccacatcgagcgggtcaccgagctgcaagaactcttcctcacgcgcgtcgggctcgacatcggcaaggtgtgggtcgcggacgacggcgccgcggtggcggtctggaccacgccggagagcgtcgaagcgggggcggtgttcgccgagatcggcccgcgcatggccgagttgagcggttcccggctggccgcgcagcaacagatggaaggcctcctggcgccgcaccggcccaaggagcccgcgtggttcctggccaccgtcggcgtctcgcccgaccaccagggcaagggtctgggcagcgccgtcgtgctccccggagtggaggcggccgagcgcgccggggtgcccgccttcctggagacctccgcgccccgcaacctccccttctacgagcggctcggcttcaccgtcaccgccgacgtcgaggtgcccgaaggaccgcgcacctggtgcatgacccgcaagcccggtgcctga

SEQ ID NO: 40110 - DNA, 2739 bp, synthetic construct
  source 1..2739: mol_type = other DNA
atggccttaccagtgaccgccttgctcctgccgctggccttgctgctccacgccgccaggccgctcgaggaggaggacctgaagaacgtgttcccacctgaggtggccgtgttcgagcctagcgaggccgagatcagccacacccagaaagccaccctcgtgtgcctggctaccggcttctaccccgaccatgtggaactgtcttggtgggtcaacggcaaagaggtgcacagcggcgtgtgtaccgacccccagccactgaaagaacagcccgccctgaacgacagccggtactgcctgagcagcagactgagagtgtccgccaccttctggcagaacccccggaaccacttcagatgccaggtgcagttctacggcctgagcgagaacgacgagtggacccaggacagagccaagcccgtgacccagatcgtgtctgccgaagcctggggcagagccgattgcggctttaccagcgagagctaccagcagggcgtgctgagcgccaccaacctgagcgtgatcggcttcagaatcctgctgctgaaagtggccggctttaacctgctgatgaccctgcggctgtggtccagcagggccaagcgatctggatctggagcaacaaacttctcactactcaaacaagcaggtgacgtggaggagaatcccgggcctactagcatggccttaccagtgaccgccttgctcctgccgctggccttgctgctccacgccgccaggccggacatccagatgacacagagcccctctagcctgtctgccagcgtgggagacagagtgaccatcacctgtagagccagccagagcatcagaaactacctgaactggtatcagcaaaagcccggcaaggcccctgagctgctgattcatgctgcaagcagcctccagagcggcgtgccaagcagattttctggcagcggcagcggaaccgacttcaccctgacaatatctagcctccagcctgaggacttcgccagctactactgccagcagagctacagcgcccctcctatcacctttggacagggcaccagactggaaatcaagggcggaggcggaagtggaggcggaggatctggcggcggaggctctcaggttcagctccagcagtctggacctggcctggtcaagcctagccagacactgtctctgacctgtgccatcagcggcgatagcgtgtcctctaatagagccgcctggaactggatcagacagagccctagcagaggactccagtggctgggcagaacctactaccgcagcaagtggtacaacgactacgccgtgtctctgcggagccggatcaccatcaatcccgtgaccagcaagaaccaggtggccctgcacatgaacagcgtgacccctgaagataccgccgtgtactactgtgccagagccggaattgtggtggtgcccggacctgagacattctactactacgaccacggcctggacgtgtggggccagggaacaacagtgactgtctcttctacgcgtggacagcctaaggccaatcctaccgtgacactgttccctccaagcagcgaagaactccaggccaacaaggccacacttgtgtgcctgatctccgacttctaccctggggctgtgacagtggcttggaaggccgatggatctcctgtgaaagccggcgtggaaaccaccaagccatccaagcagagcaacaacaaatacgccgccagctcctacctgagcctgacacctgagcagtggaagtcccacagatcctacagctgccaagtgacccacgaaggcagcaccgtggaaaagacagtggcccctacagagtgcagccccatcaagaccgatgtgattacaatggaccccaaggacaactgctccaaggacgccaacgataccctgctgctccagctgaccaacaccagcgcctactacatgtacttgttgctgctgctgaagtccgtggtgtacttcgccatcatcacatgctgcctgctgcggagaaccgccttctgctgcaacggcgagaagtctcgcgccaagagaagcggatctggcgtgaagcagaccctgaatttcgacctgctgaagctggctggcgacgtggaatccaacccaggcccttctagaggccatatgaccgagtacaagcccacggtgcgcctcgccacccgcgacgacgtccccagggccgtacgcaccctcgccgccgcgttcgccgactaccccgccacgcgccacaccgtcgatccggaccgccacatcgagcgggtcaccgagctgcaagaactcttcctcacgcgcgtcgggctcgacatcggcaaggtgtgggtcgcggacgacggcgccgcggtggcggtctggaccacgccggagagcgtcgaagcgggggcggtgttcgccgagatcggcccgcgcatggccgagttgagcggttcccggctggccgcgcagcaacagatggaaggcctcctggcgccgcaccggcccaaggagcccgcgtggttcctggccaccgtcggcgtctcgcccgaccaccagggcaagggtctgggcagcgccgtcgtgctccccggagtggaggcggccgagcgcgccggggtgcccgccttcctggagacctccgcgccccgcaacctccccttctacgagcggctcggcttcaccgtcaccgccgacgtcgaggtgcccgaaggaccgcgcacctggtgcatgacccgcaagcccggtgcctga

SEQ ID NO: 40111 - DNA, 2739 bp, synthetic construct
  source 1..2739: mol_type = other DNA
atggccttaccagtgaccgccttgctcctgccgctggccttgctgctccacgccgccaggccgctcgagggacagcctaaggccaatcctaccgtgacactgttccctccaagcagcgaagaactccaggccaacaaggccacacttgtgtgcctgatctccgacttctaccctggggctgtgacagtggcttggaaggccgatggatctcctgtgaaagccggcgtggaaaccaccaagccatccaagcagagcaacaacaaatacgccgccagctcctacctgagcctgacacctgagcagtggaagtcccacagatcctacagctgccaagtgacccacgaaggcagcaccgtggaaaagacagtggcccctacagagtgcagccccatcaagaccgatgtgattacaatggaccccaaggacaactgctccaaggacgccaacgataccctgctgctccagctgaccaacaccagcgcctactacatgtacttgttgctgctgctgaagtccgtggtgtacttcgccatcatcacatgctgcctgctgcggagaaccgccttctgctgcaacggcgagaagtctagggccaagcgatctggatctggagcaacaaacttctcactactcaaacaagcaggtgacgtggaggagaatcccgggcctactagcatggccttaccagtgaccgccttgctcctgccgctggccttgctgctccacgccgccaggccggacatccagatgacacagagcccctctagcctgtctgccagcgtgggagacagagtgaccatcacctgtagagccagccagagcatcagaaactacctgaactggtatcagcaaaagcccggcaaggcccctgagctgctgattcatgctgcaagcagcctccagagcggcgtgccaagcagattttctggcagcggcagcggaaccgacttcaccctgacaatatctagcctccagcctgaggacttcgccagctactactgccagcagagctacagcgcccctcctatcacctttggacagggcaccagactggaaatcaagggcggaggcggaagtggaggcggaggatctggcggcggaggctctcaggttcagctccagcagtctggacctggcctggtcaagcctagccagacactgtctctgacctgtgccatcagcggcgatagcgtgtcctctaatagagccgcctggaactggatcagacagagccctagcagaggactccagtggctgggcagaacctactaccgcagcaagtggtacaacgactacgccgtgtctctgcggagccggatcaccatcaatcccgtgaccagcaagaaccaggtggccctgcacatgaacagcgtgacccctgaagataccgccgtgtactactgtgccagagccggaattgtggtggtgcccggacctgagacattctactactacgaccacggcctggacgtgtggggccagggaacaacagtgactgtctcttctacgcgtgaggaggacctgaagaacgtgttcccacctgaggtggccgtgttcgagcctagcgaggccgagatcagccacacccagaaagccaccctcgtgtgcctggctaccggcttctaccccgaccatgtggaactgtcttggtgggtcaacggcaaagaggtgcacagcggcgtgtgtaccgacccccagccactgaaagaacagcccgccctgaacgacagccggtactgcctgagcagcagactgagagtgtccgccaccttctggcagaacccccggaaccacttcagatgccaggtgcagttctacggcctgagcgagaacgacgagtggacccaggacagagccaagcccgtgacccagatcgtgtctgccgaagcctggggcagagccgattgcggctttaccagcgagagctaccagcagggcgtgctgagcgccaccaacctgagcgtgatcggcttcagaatcctgctgctgaaagtggccggctttaacctgctgatgaccctgcggctgtggtccagccgcgccaagagaagcggatctggcgtgaagcagaccctgaatttcgacctgctgaagctggctggcgacgtggaatccaacccaggcccttctagaggccatatgaccgagtacaagcccacggtgcgcctcgccacccgcgacgacgtccccagggccgtacgcaccctcgccgccgcgttcgccgactaccccgccacgcgccacaccgtcgatccggaccgccacatcgagcgggtcaccgagctgcaagaactcttcctcacgcgcgtcgggctcgacatcggcaaggtgtgggtcgcggacgacggcgccgcggtggcggtctggaccacgccggagagcgtcgaagcgggggcggtgttcgccgagatcggcccgcgcatggccgagttgagcggttcccggctggccgcgcagcaacagatggaaggcctcctggcgccgcaccggcccaaggagcccgcgtggttcctggccaccgtcggcgtctcgcccgaccaccagggcaagggtctgggcagcgccgtcgtgctccccggagtggaggcggccgagcgcgccggggtgcccgccttcctggagacctccgcgccccgcaacctccccttctacgagcggctcggcttcaccgtcaccgccgacgtcgaggtgcccgaaggaccgcgcacctggtgcatgacccgcaagcccggtgcctga

SEQ ID NO: 40112 - DNA, 2730 bp, synthetic construct
  source 1..2730: mol_type = other DNA
atggccttaccagtgaccgccttgctcctgccgctggccttgctgctccacgccgccaggccgctcgaggaggcctctacaaagggaccctccgtgtttcctctggctcccagcagcaagtctacaagcggaggaacagccgctctgggctgcctggtcaaggattactttcccgagcctgtgaccgtgtcctggaatagcggagcactgacaagcggcgtgcacacctttccagccgtgctgcaaagcagcggcctgtactctctgagcagcgtggtcacagtgcctagctctagcctgggcacccagacctacatctgcaatgtgaaccacaagcctagcaacaccaaggtggacaagagagtggaacccaagagctgtcccatcaagaccgatgtgattacaatggaccccaaggacaactgctccaaggacgccaacgataccctgctgctccagctgaccaacaccagcgcctactacatgtacttgttgctgctgctgaagtccgtggtgtacttcgccatcatcacatgctgcctgctgcggagaaccgccttctgctgcaacggcgagaagtctagggccaagcgatctggatctggagcaacaaacttctcactactcaaacaagcaggtgacgtggaggagaatcccgggcctactagcatggccttaccagtgaccgccttgctcctgccgctggccttgctgctccacgccgccaggccggacatccagatgacacagagcccctctagcctgtctgccagcgtgggagacagagtgaccatcacctgtagagccagccagagcatcagaaactacctgaactggtatcagcaaaagcccggcaaggcccctgagctgctgattcatgctgcaagcagcctccagagcggcgtgccaagcagattttctggcagcggcagcggaaccgacttcaccctgacaatatctagcctccagcctgaggacttcgccagctactactgccagcagagctacagcgcccctcctatcacctttggacagggcaccagactggaaatcaagggcggaggcggaagtggaggcggaggatctggcggcggaggctctcaggttcagctccagcagtctggacctggcctggtcaagcctagccagacactgtctctgacctgtgccatcagcggcgatagcgtgtcctctaatagagccgcctggaactggatcagacagagccctagcagaggactccagtggctgggcagaacctactaccgcagcaagtggtacaacgactacgccgtgtctctgcggagccggatcaccatcaatcccgtgaccagcaagaaccaggtggccctgcacatgaacagcgtgacccctgaagataccgccgtgtactactgtgccagagccggaattgtggtggtgcccggacctgagacattctactactacgaccacggcctggacgtgtggggccagggaacaacagtgactgtctcttctacgcgtggacagcctaaggccaatcctaccgtgacactgttccctccaagcagcgaagaactccaggccaacaaggccacacttgtgtgcctgatctccgacttctaccctggggctgtgacagtggcttggaaggccgatggatctcctgtgaaagccggcgtggaaaccaccaagccatccaagcagagcaacaacaaatacgccgccagctcctacctgagcctgacacctgagcagtggaagtcccacagatcctacagctgccaagtgacccacgaaggcagcaccgtggaaaagacagtggcccctacagagtgcagcgaagtgaaaaccgactccaccgaccacgtgaagcccaaagagacagagaacaccaagcagcccagcaagagctgccacaagcccaaggccatcgtgcacaccgagaaagtgaacatgatgagcctgaccgtgctgggcctgcggatgctgttcgccaaaaccgtggccgtgaacttcctgctgaccgccaagctgttcttcctccgcgccaagagaagcggatctggcgtgaagcagaccctgaatttcgacctgctgaagctggctggcgacgtggaatccaacccaggcccttctagaggccatatgaccgagtacaagcccacggtgcgcctcgccacccgcgacgacgtccccagggccgtacgcaccctcgccgccgcgttcgccgactaccccgccacgcgccacaccgtcgatccggaccgccacatcgagcgggtcaccgagctgcaagaactcttcctcacgcgcgtcgggctcgacatcggcaaggtgtgggtcgcggacgacggcgccgcggtggcggtctggaccacgccggagagcgtcgaagcgggggcggtgttcgccgagatcggcccgcgcatggccgagttgagcggttcccggctggccgcgcagcaacagatggaaggcctcctggcgccgcaccggcccaaggagcccgcgtggttcctggccaccgtcggcgtctcgcccgaccaccagggcaagggtctgggcagcgccgtcgtgctccccggagtggaggcggccgagcgcgccggggtgcccgccttcctggagacctccgcgccccgcaacctccccttctacgagcggctcggcttcaccgtcaccgccgacgtcgaggtgcccgaaggaccgcgcacctggtgcatgacccgcaagcccggtgcctga

SEQ ID NO: 40113 - DNA, 2664 bp, synthetic construct
  source 1..2664: mol_type = other DNA
atggccttaccagtgaccgccttgctcctgccgctggccttgctgctccacgccgccaggccgctcgaggaggcctctacaaagggaccctccgtgtttcctctggctcccagcagcaagtctacaagcggaggaacagccgctctgggctgcctggtcaaggattactttcccgagcctgtgaccgtgtcctggaatagcggagcactgacaagcggcgtgcacacctttccagccgtgctgcaaagcagcggcctgtactctctgagcagcgtggtcacagtgcctagctctagcctgggcacccagacctacatctgcaatgtgaaccacaagcctagcaacaccaaggtggacaagagagtggaacccaagagctgtggcagagccgattgcggctttaccagcgagagctaccagcagggcgtgctgagcgccaccatcctgtacgagatcctgctgggcaaggccaccctgtacgccgtgctggtgtctgccctggtgctgatggctatggtcaagcggaaggacagccggggaagggccaagcgatctggatctggagcaacaaacttctcactactcaaacaagcaggtgacgtggaggagaatcccgggcctactagcatggccttaccagtgaccgccttgctcctgccgctggccttgctgctccacgccgccaggccggacatccagatgacacagagcccctctagcctgtctgccagcgtgggagacagagtgaccatcacctgtagagccagccagagcatcagaaactacctgaactggtatcagcaaaagcccggcaaggcccctgagctgctgattcatgctgcaagcagcctccagagcggcgtgccaagcagattttctggcagcggcagcggaaccgacttcaccctgacaatatctagcctccagcctgaggacttcgccagctactactgccagcagagctacagcgcccctcctatcacctttggacagggcaccagactggaaatcaagggcggaggcggaagtggaggcggaggatctggcggcggaggctctcaggttcagctccagcagtctggacctggcctggtcaagcctagccagacactgtctctgacctgtgccatcagcggcgatagcgtgtcctctaatagagccgcctggaactggatcagacagagccctagcagaggactccagtggctgggcagaacctactaccgcagcaagtggtacaacgactacgccgtgtctctgcggagccggatcaccatcaatcccgtgaccagcaagaaccaggtggccctgcacatgaacagcgtgacccctgaagataccgccgtgtactactgtgccagagccggaattgtggtggtgcccggacctgagacattctactactacgaccacggcctggacgtgtggggccagggaacaacagtgactgtctcttctacgcgtggacagcctaaggccaatcctaccgtgacactgttccctccaagcagcgaagaactccaggccaacaaggccacacttgtgtgcctgatctccgacttctaccctggggctgtgacagtggcttggaaggccgatggatctcctgtgaaagccggcgtggaaaccaccaagccatccaagcagagcaacaacaaatacgccgccagctcctacctgagcctgacacctgagcagtggaagtcccacagatcctacagctgccaagtgacccacgaaggcagcaccgtggaaaagacagtggcccctacagagtgcagcatccccgaggacacattcttcccaagccccgagagcagctgcgacgtgaagctggtggaaaagagcttcgagacagacaccaacctgaacttccagaacctgagcgtgatcggcttcagaatcctgctgctgaaagtggccggctttaacctgctgatgaccctgcggctgtggtccagccgcgccaagagaagcggatctggcgtgaagcagaccctgaatttcgacctgctgaagctggctggcgacgtggaatccaacccaggcccttctagaggccatatgaccgagtacaagcccacggtgcgcctcgccacccgcgacgacgtccccagggccgtacgcaccctcgccgccgcgttcgccgactaccccgccacgcgccacaccgtcgatccggaccgccacatcgagcgggtcaccgagctgcaagaactcttcctcacgcgcgtcgggctcgacatcggcaaggtgtgggtcgcggacgacggcgccgcggtggcggtctggaccacgccggagagcgtcgaagcgggggcggtgttcgccgagatcggcccgcgcatggccgagttgagcggttcccggctggccgcgcagcaacagatggaaggcctcctggcgccgcaccggcccaaggagcccgcgtggttcctggccaccgtcggcgtctcgcccgaccaccagggcaagggtctgggcagcgccgtcgtgctccccggagtggaggcggccgagcgcgccggggtgcccgccttcctggagacctccgcgccccgcaacctccccttctacgagcggctcggcttcaccgtcaccgccgacgtcgaggtgcccgaaggaccgcgcacctggtgcatgacccgcaagcccggtgcctga

SEQ ID NO: 40114 - DNA, 2664 bp, synthetic construct
  source 1..2664: mol_type = other DNA
atggccttaccagtgaccgccttgctcctgccgctggccttgctgctccacgccgccaggccgctcgaggaggcctctacaaagggaccctccgtgtttcctctggctcccagcagcaagtctacaagcggaggaacagccgctctgggctgcctggtcaaggattactttcccgagcctgtgaccgtgtcctggaatagcggagcactgacaagcggcgtgcacacctttccagccgtgctgcaaagcagcggcctgtactctctgagcagcgtggtcacagtgcctagctctagcctgggcacccagacctacatctgcaatgtgaaccacaagcctagcaacaccaaggtggacaagagagtggaacccaagagctgtatccccgaggacacattcttcccaagccccgagagcagctgcgacgtgaagctggtggaaaagagcttcgagacagacaccaacctgaacttccagaacctgagcgtgatcggcttcagaatcctgctgctgaaagtggccggctttaacctgctgatgaccctgcggctgtggtccagcagggccaagcgatctggatctggagcaacaaacttctcactactcaaacaagcaggtgacgtggaggagaatcccgggcctactagcatggccttaccagtgaccgccttgctcctgccgctggccttgctgctccacgccgccaggccggacatccagatgacacagagcccctctagcctgtctgccagcgtgggagacagagtgaccatcacctgtagagccagccagagcatcagaaactacctgaactggtatcagcaaaagcccggcaaggcccctgagctgctgattcatgctgcaagcagcctccagagcggcgtgccaagcagattttctggcagcggcagcggaaccgacttcaccctgacaatatctagcctccagcctgaggacttcgccagctactactgccagcagagctacagcgcccctcctatcacctttggacagggcaccagactggaaatcaagggcggaggcggaagtggaggcggaggatctggcggcggaggctctcaggttcagctccagcagtctggacctggcctggtcaagcctagccagacactgtctctgacctgtgccatcagcggcgatagcgtgtcctctaatagagccgcctggaactggatcagacagagccctagcagaggactccagtggctgggcagaacctactaccgcagcaagtggtacaacgactacgccgtgtctctgcggagccggatcaccatcaatcccgtgaccagcaagaaccaggtggccctgcacatgaacagcgtgacccctgaagataccgccgtgtactactgtgccagagccggaattgtggtggtgcccggacctgagacattctactactacgaccacggcctggacgtgtggggccagggaacaacagtgactgtctcttctacgcgtggacagcctaaggccaatcctaccgtgacactgttccctccaagcagcgaagaactccaggccaacaaggccacacttgtgtgcctgatctccgacttctaccctggggctgtgacagtggcttggaaggccgatggatctcctgtgaaagccggcgtggaaaccaccaagccatccaagcagagcaacaacaaatacgccgccagctcctacctgagcctgacacctgagcagtggaagtcccacagatcctacagctgccaagtgacccacgaaggcagcaccgtggaaaagacagtggcccctacagagtgcagcggcagagccgattgcggctttaccagcgagagctaccagcagggcgtgctgagcgccaccatcctgtacgagatcctgctgggcaaggccaccctgtacgccgtgctggtgtctgccctggtgctgatggctatggtcaagcggaaggacagccggggacgcgccaagagaagcggatctggcgtgaagcagaccctgaatttcgacctgctgaagctggctggcgacgtggaatccaacccaggcccttctagaggccatatgaccgagtacaagcccacggtgcgcctcgccacccgcgacgacgtccccagggccgtacgcaccctcgccgccgcgttcgccgactaccccgccacgcgccacaccgtcgatccggaccgccacatcgagcgggtcaccgagctgcaagaactcttcctcacgcgcgtcgggctcgacatcggcaaggtgtgggtcgcggacgacggcgccgcggtggcggtctggaccacgccggagagcgtcgaagcgggggcggtgttcgccgagatcggcccgcgcatggccgagttgagcggttcccggctggccgcgcagcaacagatggaaggcctcctggcgccgcaccggcccaaggagcccgcgtggttcctggccaccgtcggcgtctcgcccgaccaccagggcaagggtctgggcagcgccgtcgtgctccccggagtggaggcggccgagcgcgccggggtgcccgccttcctggagacctccgcgccccgcaacctccccttctacgagcggctcggcttcaccgtcaccgccgacgtcgaggtgcccgaaggaccgcgcacctggtgcatgacccgcaagcccggtgcctga

SEQ ID NO: 40115 - DNA, 1902 bp, synthetic construct
  source 1..1902: mol_type = other DNA
atggccttaccagtgaccgccttgctcctgccgctggccttgctgctccacgccgccaggccggacatccagatgacacagagcccctctagcctgtctgccagcgtgggagacagagtgaccatcacctgtagagccagccagagcatcagaaactacctgaactggtatcagcaaaagcccggcaaggcccctgagctgctgattcatgctgcaagcagcctccagagcggcgtgccaagcagattttctggcagcggcagcggaaccgacttcaccctgacaatatctagcctccagcctgaggacttcgccagctactactgccagcagagctacagcgcccctcctatcacctttggacagggcaccagactggaaatcaagctcgaggacctgaagaacgtgttcccacctgaggtggccgtgttcgagcctagcgaggccgagatcagccacacccagaaagccaccctcgtgtgcctggctaccggcttctaccccgaccatgtggaactgtcttggtgggtcaacggcaaagaggtgcacagcggcgtgtgtaccgacccccagccactgaaagaacagcccgccctgaacgacagccggtactgcctgagcagcagactgagagtgtccgccaccttctggcagaacccccggaaccacttcagatgccaggtgcagttctacggcctgagcgagaacgacgagtggacccaggacagagccaagcccgtgacccagatcgtgtctgccgaagcctggggcagagccgatagcggctttaccagcgagagctaccagcagggcgtgctgagcgccaccatcctgtacgagatcctgctgggcaaggccaccctgtacgccgtgctggtgtctgccctggtgctgatggctatggtcaagcggaaggacagccggggaagggccaagcgatctggatctggagcaacaaacttctcactactcaaacaagcaggtgacgtggaggagaatcccgggcctactagtatggactggatttggcgcatccttttccttgtcggcgctgctaccggcgcgcattccttcgaacaggttcagctccagcagtctggacctggcctggtcaagcctagccagacactgtctctgacctgtgccatcagcggcgatagcgtgtcctctaatagagccgcctggaactggatcagacagagccctagcagaggactccagtggctgggcagaacctactaccgcagcaagtggtacaacgactacgccgtgtctctgcggagccggatcaccatcaatcccgtgaccagcaagaaccaggtggccctgcacatgaacagcgtgacccctgaagataccgccgtgtactactgtgccagagccggaattgtggtggtgcccggacctgagacattctactactacgaccacggcctggacgtgtggggccagggaacaacagtgactgtctcttctacgcgtatccagaaccctgatcctgccgtgtaccagctgcgggatagcaagagcagcgacaagagcgtgtgtctgttcaccgacttcgacagccagaccaacgtgtcccagagcaaggactccgacgtgtacatcaccgataagtgcgtgctggacatgcggagcatggacttcaagagcaactccgccgtggcctggtccaacaagtccgatttcgcctgcgccaacgccttcaacaacagcattatccccgaggacacattcttcccaagccccgagagcagcagcgacgtgaagctggtggaaaagagcttcgagacagacaccaacctgaacttccagaacctgagcgtgatcggcttcagaatcctgctgctgaaagtggccggctttaacctgctgatgaccctgcggctgtggtccagc

SEQ ID NO: 40116 - DNA, 2742 bp, synthetic construct
  source 1..2742: mol_type = other DNA
atggccttaccagtgaccgccttgctcctgccgctggccttgctgctccacgccgccaggccggaggttcagctgcttgagtctggcggaggactggttcaacctggcggaagcctgagactgtcttgtgccgcctctggcagaaccttcagcatgggctggtatagacaggcccctggcaagggcctcgaatttgtgtctgccatcacatacagcggcggcagcccttactacgccgattctgtgaagggcagattcaccatcagccgggacaacagcaagaacaccgtgtacctccagatgaacagcctgagagccgaggacaccgccgtgtactactgtgccgccaatccaacctacggcagcgactggaatgccgagaattggggccagggcacactggtcacagtgtctagtggtaccggcggaggcggatctggcggcggaggtagcggtggcggaggatctgaattcgacatccagatgacacagagcccctctagcctgtctgccagcgtgggagacagagtgaccatcacctgtagagccagccagagcatcagaaactacctgaactggtatcagcaaaagcccggcaaggcccctgagctgctgattcatgctgcaagcagcctccagagcggcgtgccaagcagattttctggcagcggcagcggaaccgacttcaccctgacaatatctagcctccagcctgaggacttcgccagctactactgccagcagagctacagcgcccctcctatcacctttggacagggcaccagactggaaatcaagctcgagatccagaaccctgatcctgccgtgtaccagctgcgggatagcaagagcagcgacaagagcgtgtgtctgttcaccgacttcgacagccagaccaacgtgtcccagagcaaggactccgacgtgtacatcaccgataagtgcgtgctggacatgcggagcatggacttcaagagcaactccgccgtggcctggtccaacaagtccgatttcgcctgcgccaacgccttcaacaacagcattatccccgaggacacattcttcccaagcagcgacgtgccctgcgacgtgaagctggtggaaaagagcttcgagacagacaccaacctgaacttccagaacctgagcgtgatcggcttcagaatcctgctgctgaaagtggccggctttaacctgctgatgaccctgcggctgtggtccagccgcgccaagagaagcggatctggcgtgaagcagaccctgaatttcgacctgctgaagctggctggcgacgtggaatccaacccaggccctactagtaccatggactggatttggcgcatccttttccttgtcggcgctgctaccggcacccattccgggcccgaagtgcaactggttgaatccggtggcggcctggtgcaacccggcggatctctcagacttagctgtgccgcctccggcagaaccttcacaatgggatggtacaggcaggctccagggaaagagagagagttcgtcgccgccatctctctgtctcccacactggcctactacgccgactctgtgaaaggccggttcaccatctccagagataatagcaagaacaccgtggtgctgcaaatgaactctctgagagccgaggatacagccctgtactattgtgccgctgaccggaagtccgtgatgagcatcagacccgattactggggacagggcacactggtcacagtgtctagtggatccggcggcggaggatctggcggaggcggatctgggggcggaggctctttcgaacaggttcagctccagcagtctggacctggcctggtcaagcctagccagacactgtctctgacctgtgccatcagcggcgatagcgtgtcctctaatagagccgcctggaactggatcagacagagccctagcagaggactccagtggctgggcagaacctactaccgcagcaagtggtacaacgactacgccgtgtctctgcggagccggatcaccatcaatcccgtgaccagcaagaaccaggtggccctgcacatgaacagcgtgacccctgaagataccgccgtgtactactgtgccagagccggaattgtggtggtgcccggacctgagacattctactactacgaccacggcctggacgtgtggggccagggaacaacagtgactgtctcttctacgcgtgaggacctgaagaacgtgttcccacctgaggtggccgtgttcgagcctagcaaggccgagatcgcccacacccagaaagccaccctcgtgtgcctggctaccggcttctaccccgaccatgtggaactgtcttggtgggtcaacggcaaagaggtgcacagcggcgtgtgtaccgacccccagccactgaaagaacagcccgccctgaacgacagccggtactgcctgagcagcagactgagagtgtccgccaccttctggcagaacccccggaaccacttcagatgccaggtgcagttctacggcctgagcgagaacgacgagtggacccaggacagagccaagcccgtgacccagatcgtgtctgccgaagcctggggcagagccgattgcggcatcaccagcgccagctaccaccagggcgtgctgagcgccaccatcctgtacgagatcctgctgggcaaggccaccctgtacgccgtgctggtgtctgccctggtgctgatggctatggtcaagcggaaggacagccggggataa

SEQ ID NO: 40117 - DNA, 2742 bp, synthetic construct
  source 1..2742: mol_type = other DNA
atggccttaccagtgaccgccttgctcctgccgctggccttgctgctccacgccgccaggccggaagtgcagctggttgaatctggcggaggactggttcaggctggcggatctctgagactgtcttgtgccgccagcggcagaacctttagcatgggctggtttagacaggcccctggcaaagagagagagttcgtcgccgccatcacatactctggcggcagcccttactacgccgactctgtgaagggcagattcaccatcagccgggacaacgccaagaacaccgtgtacctccagatgaacagcctgaagcctgaggacaccgccgtgtactactgcgccgccaatccaacatacggcagcgactggaacgccgagaattggggccagggaacccaagtgacagtgtctagcggtaccggcggaggcggatctggcggcggaggtagcggtggcggaggatctgaattcgacatccagatgacacagagcccctctagcctgtctgccagcgtgggagacagagtgaccatcacctgtagagccagccagagcatcagaaactacctgaactggtatcagcaaaagcccggcaaggcccctgagctgctgattcatgctgcaagcagcctccagagcggcgtgccaagcagattttctggcagcggcagcggaaccgacttcaccctgacaatatctagcctccagcctgaggacttcgccagctactactgccagcagagctacagcgcccctcctatcacctttggacagggcaccagactggaaatcaagctcgagatccagaaccctgatcctgccgtgtaccagctgcgggatagcaagagcagcgacaagagcgtgtgtctgttcaccgacttcgacagccagaccaacgtgtcccagagcaaggactccgacgtgtacatcaccgataagtgcgtgctggacatgcggagcatggacttcaagagcaactccgccgtggcctggtccaacaagtccgatttcgcctgcgccaacgccttcaacaacagcattatccccgaggacacattcttcccaagcagcgacgtgccctgcgacgtgaagctggtggaaaagagcttcgagacagacaccaacctgaacttccagaacctgagcgtgatcggcttcagaatcctgctgctgaaagtggccggctttaacctgctgatgaccctgcggctgtggtccagccgcgccaagagaagcggatctggcgtgaagcagaccctgaatttcgacctgctgaagctggctggcgacgtggaatccaacccaggccctactagtaccatggactggatttggcgcatccttttccttgtcggcgctgctaccggcgcccattccgggcccgaagtgcaactggttgaatccggtggcggcctggtgcaacccggcggatctctcagacttagctgtgccgcctccggcagaaccttcacaatgggatggtacaggcaggctccagggaaagagagagagttcgtcgccgccatctctctgtctcccacactggcctactacgccgactctgtgaaaggccggttcaccatctccagagataatagcaagaacaccgtggtgctgcaaatgaactctctgagagccgaggatacagccctgtactattgtgccgctgaccggaagtccgtgatgagcatcagacccgattactggggacagggcacactggtcacagtgtctagtggatccggcggcggaggatctggcggaggcggatctgggggcggaggctctttcgaacaggttcagctccagcagtctggacctggcctggtcaagcctagccagacactgtctctgacctgtgccatcagcggcgatagcgtgtcctctaatagagccgcctggaactggatcagacagagccctagcagaggactccagtggctgggcagaacctactaccgcagcaagtggtacaacgactacgccgtgtctctgcggagccggatcaccatcaatcccgtgaccagcaagaaccaggtggccctgcacatgaacagcgtgacccctgaagataccgccgtgtactactgtgccagagccggaattgtggtggtgcccggacctgagacattctactactacgaccacggcctggacgtgtggggccagggaacaacagtgactgtctcttctacgcgtgaggacctgaagaacgtgttcccacctgaggtggccgtgttcgagcctagcaaggccgagatcgcccacacccagaaagccaccctcgtgtgcctggctaccggcttctaccccgaccatgtggaactgtcttggtgggtcaacggcaaagaggtgcacagcggcgtgtgtaccgacccccagccactgaaagaacagcccgccctgaacgacagccggtactgcctgagcagcagactgagagtgtccgccaccttctggcagaacccccggaaccacttcagatgccaggtgcagttctacggcctgagcgagaacgacgagtggacccaggacagagccaagcccgtgacccagatcgtgtctgccgaagcctggggcagagccgattgcggcatcaccagcgccagctaccaccagggcgtgctgagcgccaccatcctgtacgagatcctgctgggcaaggccaccctgtacgccgtgctggtgtctgccctggtgctgatggctatggtcaagcggaaggacagccggggataa

SEQ ID NO: 40118 - DNA, 2733 bp, synthetic construct
  source 1..2733: mol_type = other DNA
atggccttaccagtgaccgccttgctcctgccgctggccttgctgctccacgccgccaggccggaagtgcagctggttgaatctggcggaggactggttcaggctggcggatctctgagactgtcttgtgccgccagcggcagaacctttagcatgggctggtttagacaggcccctggcaaagagagagagttcgtcgccgccatcacatactctggcggcagcccttactacgccgactctgtgaagggcagattcaccatcagccgggacaacgccaagaacaccgtgtacctccagatgaacagcctgaagcctgaggacaccgccgtgtactactgcgccgccaatccaacatacggcagcgactggaacgccgagaattggggccagggaacccaagtgacagtgtctagcggtaccggcggaggcggatctggcggcggaggtagcggtggcggaggatctgaattcgacatccagatgacacagagcccctctagcctgtctgccagcgtgggagacagagtgaccatcacctgtagagccagccagagcatcagaaactacctgaactggtatcagcaaaagcccggcaaggcccctgagctgctgattcatgctgcaagcagcctccagagcggcgtgccaagcagattttctggcagcggcagcggaaccgacttcaccctgacaatatctagcctccagcctgaggacttcgccagctactactgccagcagagctacagcgcccctcctatcacctttggacagggcaccagactggaaatcaagctcgaggacctgaagaacgtgttcccacctgaggtggccgtgttcgagcctagcgaggccgagatcagccacacccagaaagccaccctcgtgtgcctggctaccggcttctaccccgaccatgtggaactgtcttggtgggtcaacggcaaagaggtgcacagcggcgtgtgtaccgacccccagccactgaaagaacagcccgccctgaacgacagccggtactgcctgagcagcagactgagagtgtccgccaccttctggcagaacccccggaaccacttcagatgccaggtgcagttctacggcctgagcgagaacgacgagtggacccaggacagagccaagcccgtgacccagatcgtgtctgccgaagcctggggcagagccgattgcggctttaccagcgagagctaccagcagggcgtgctgagcgccaccatcctgtacgagatcctgctgggcaaggccaccctgtacgccgtgctggtgtctgccctggtgctgatggctatggtcaagcggaaggacagccggggaagggccaagcgatctggatctggagcaacaaacttctcactactcaaacaagcaggtgacgtggaggagaatcccgggcctactagtgccaccatggactggatttggcgcatccttttccttgtcggcgctgctaccggcgcccattccgggcccgaagtgcaactggttgaatccggtggcggcctggtgcaagcaggcggatctctcagacttagctgtgccgcctccggcagaaccttcacaatgggatggtttaggcaggctccagggaaagagagagagttcgtcgccgccatctctctgtctcccacactggcctactacgccgactctgtgaaaggccggttcaccatctccagagataatgccaagaacaccgtggtgctgcaaatgaactctctgaaacccgaggatacagccctgtactattgtgccgctgaccggaagtccgtgatgagcatcagacccgattactggggacagggcacacaagtcacagtgtcctctggatccggcggcggaggatctggcggaggcggatctgggggcggaggctctttcgaacaggttcagctccagcagtctggacctggcctggtcaagcctagccagacactgtctctgacctgtgccatcagcggcgatagcgtgtcctctaatagagccgcctggaactggatcagacagagccctagcagaggactccagtggctgggcagaacctactaccgcagcaagtggtacaacgactacgccgtgtctctgcggagccggatcaccatcaatcccgtgaccagcaagaaccaggtggccctgcacatgaacagcgtgacccctgaagataccgccgtgtactactgtgccagagccggaattgtggtggtgcccggacctgagacattctactactacgaccacggcctggacgtgtggggccagggaacaacagtgactgtctcttctacgcgtatccagaaccctgatcctgccgtgtaccagctgcgggatagcaagagcagcgacaagagcgtgtgtctgttcaccgacttcgacagccagaccaacgtgtcccagagcaaggactccgacgtgtacatcaccgataagtgcgtgctggacatgcggagcatggacttcaagagcaactccgccgtggcctggtccaacaagtccgatttcgcctgcgccaacgccttcaacaacagcattatccccgaggacacattcttcccaagccccgagagcagctgcgacgtgaagctggtggaaaagagcttcgagacagacaccaacctgaacttccagaacctgagcgtgatcggcttcagaatcctgctgctgaaagtggccggctttaacctgctgatgaccctgcggctgtggtccagctaa

SEQ ID NO: 40119 - DNA, 2346 bp, synthetic construct
  source 1..2346: mol_type = other DNA
atggccttaccagtgaccgccttgctcctgccgctggccttgctgctccacgccgccaggccggaagtgcagctggttgaatctggcggaggactggttcagcctggcggatctctgagactgagctgtgaagccagcggcttcgccagcgacgattacatcatcggctggttcagacaggcccctggcaaagagagagagggcgtcagctgcatcagctctaagtacgccaacaccgtgtacaccgacagcgtgaagggcagattcagactgagcagaggcaccgccaagaataccgtgtacctccagatgagcgccctgaagcctgaggataccgccgtgtactactgcgctatggacagccgcagagtgacatgccctgagatcagcaccatgcaccggaacttcgattcttggggccagggcacactggtcacagtgtcatctggtaccggcggaggcggatctggcggcggaggtagcggtggcggaggatctgaattcgacatccagatgacacagagcccctctagcctgtctgccagcgtgggagacagagtgaccatcacctgtagagccagccagagcatcagaaactacctgaactggtatcagcaaaagcccggcaaggcccctgagctgctgattcatgctgcaagcagcctccagagcggcgtgccaagcagattttctggcagcggcagcggaaccgacttcaccctgacaatatctagcctccagcctgaggacttcgccagctactactgccagcagagctacagcgcccctcctatcacctttggacagggcaccagactggaaatcaagctcgaggacctgaagaacgtgttcccacctgaggtggccgtgttcgagcctagcaaggccgagatcgcccacacccagaaagccaccctcgtgtgcctggctaccggcttctaccccgaccatgtggaactgtcttggtgggtcaacggcaaagaggtgcacagcggcgtgtgtaccgacccccagccactgaaagaacagcccgccctgaacgacagccggtactgcctgagcagcagactgagagtgtccgccaccttctggcagaacccccggaaccacttcagatgccaggtgcagttctacggcctgagcgagaacgacgagtggacccaggacagagccaagcccgtgacccagatcgtgtctgccgaagcctggggcagagccgattgcggcatcaccagcgccagctaccaccagggcgtgctgagcgccaccatcctgtacgagatcctgctgggcaaggccaccctgtacgccgtgctggtgtctgccctggtgctgatggctatggtcaagcggaaggacagccggggaagggccaagcgatctggatctggagcaacaaacttctcactactcaaacaagcaggtgacgtggaggagaatcccgggcctactagtatggactggatttggcgcatccttttccttgtcggcgctgctaccggcgcgcattccttcgaacaggttcagctccagcagtctggacctggcctggtcaagcctagccagacactgtctctgacctgtgccatcagcggcgatagcgtgtcctctaatagagccgcctggaactggatcagacagagccctagcagaggactccagtggctgggcagaacctactaccgcagcaagtggtacaacgactacgccgtgtctctgcggagccggatcaccatcaatcccgtgaccagcaagaaccaggtggccctgcacatgaacagcgtgacccctgaagataccgccgtgtactactgtgccagagccggaattgtggtggtgcccggacctgagacattctactactacgaccacggcctggacgtgtggggccagggaacaacagtgactgtctcttctacgcgtatccagaaccctgatcctgccgtgtaccagctgcgggatagcaagagcagcgacaagagcgtgtgtctgttcaccgacttcgacagccagaccaacgtgtcccagagcaaggactccgacgtgtacatcaccgataagtgcgtgctggacatgcggagcatggacttcaagagcaactccgccgtggcctggtccaacaagtccgatttcgcctgcgccaacgccttcaacaacagcattatccccgaggacacattcttcccaagcagcgacgtgccctgcgacgtgaagctggtggaaaagagcttcgagacagacaccaacctgaacttccagaacctgagcgtgatcggcttcagaatcctgctgctgaaagtggccggctttaacctgctgatgaccctgcggctgtggtccagctaa

SEQ ID NO: 40120 - DNA, 2319 bp, synthetic construct
  source 1..2319: mol_type = other DNA
atggccttaccagtgaccgccttgctcctgccgctggccttgctgctccacgccgccaggccggacatccagatgacacagagcccctctagcctgtctgccagcgtgggagacagagtgaccatcacctgtagagccagccagagcatcagaaactacctgaactggtatcagcaaaagcccggcaaggcccctgagctgctgattcatgctgcaagcagcctccagagcggcgtgccaagcagattttctggcagcggcagcggaaccgacttcaccctgacaatatctagcctccagcctgaggacttcgccagctactactgccagcagagctacagcgcccctcctatcacctttggacagggcaccagactggaaatcaagctcgaggacctgaagaacgtgttcccacctgaggtggccgtgttcgagcctagcgaggccgagatcagccacacccagaaagccaccctcgtgtgcctggctaccggcttctaccccgaccatgtggaactgtcttggtgggtcaacggcaaagaggtgcacagcggcgtgtgtaccgacccccagccactgaaagaacagcccgccctgaacgacagccggtactgcctgagcagcagactgagagtgtccgccaccttctggcagaacccccggaaccacttcagatgccaggtgcagttctacggcctgagcgagaacgacgagtggacccaggacagagccaagcccgtgacccagatcgtgtctgccgaagcctggggcagagccgattgcggctttaccagcgagagctaccagcagggcgtgctgagcgccaccatcctgtacgagatcctgctgggcaaggccaccctgtacgccgtgctggtgtctgccctggtgctgatggctatggtcaagcggaaggacagccggggaagggccaagcgatctggatctggagcaacaaacttctcactactcaaacaagcaggtgacgtggaggagaatcccgggcctactagtaccatggactggatttggcgcatccttttccttgtcggcgctgctaccggcgcccattccgggcccgaagtgcaactggttgaatccggtggcggcctggtgcaacccggcggatctctcagacttagctgtgccgcctccggcagaaccttcacaatgggatggtacaggcaggctccagggaaagagagagagttcgtcgccgccatctctctgtctcccacactggcctactacgccgactctgtgaaaggccggttcaccatctccagagataatagcaagaacaccgtggtgctgcaaatgaactctctgagagccgaggatacagccctgtactattgtgccgctgaccggaagtccgtgatgagcatcagacccgattactggggacagggcacactggtcacagtgtctagtggatccggcggcggaggatctggcggaggcggatctgggggcggaggctctttcgaacaggttcagctccagcagtctggacctggcctggtcaagcctagccagacactgtctctgacctgtgccatcagcggcgatagcgtgtcctctaatagagccgcctggaactggatcagacagagccctagcagaggactccagtggctgggcagaacctactaccgcagcaagtggtacaacgactacgccgtgtctctgcggagccggatcaccatcaatcccgtgaccagcaagaaccaggtggccctgcacatgaacagcgtgacccctgaagataccgccgtgtactactgtgccagagccggaattgtggtggtgcccggacctgagacattctactactacgaccacggcctggacgtgtggggccagggaacaacagtgactgtctcttctacgcgtatccagaaccctgatcctgccgtgtaccagctgcgggatagcaagagcagcgacaagagcgtgtgtctgttcaccgacttcgacagccagaccaacgtgtcccagagcaaggactccgacgtgtacatcaccgataagtgcgtgctggacatgcggagcatggacttcaagagcaactccgccgtggcctggtccaacaagtccgatttcgcctgcgccaacgccttcaacaacagcattatccccgaggacacattcttcccaagccccgagagcagctgcgacgtgaagctggtggaaaagagcttcgagacagacaccaacctgaacttccagaacctgagcgtgatcggcttcagaatcctgctgctgaaagtggccggctttaacctgctgatgaccctgcggctgtggtccagctaa

SEQ ID NO: 40121 - DNA, 2337 bp, synthetic construct
  source 1..2337: mol_type = other DNA
atggccttaccagtgaccgccttgctcctgccgctggccttgctgctccacgccgccaggccggacatccagatgacacagagcccctctagcctgtctgccagcgtgggagacagagtgaccatcacctgtagagccagccagagcatcagaaactacctgaactggtatcagcaaaagcccggcaaggcccctgagctgctgattcatgctgcaagcagcctccagagcggcgtgccaagcagattttctggcagcggcagcggaaccgacttcaccctgacaatatctagcctccagcctgaggacttcgccagctactactgccagcagagctacagcgcccctcctatcacctttggacagggcaccagactggaaatcaagctcgaggacctgaagaacgtgttcccacctgaggtggccgtgttcgagcctagcgaggccgagatcagccacacccagaaagccaccctcgtgtgcctggctaccggcttctaccccgaccatgtggaactgtcttggtgggtcaacggcaaagaggtgcacagcggcgtgtgtaccgacccccagccactgaaagaacagcccgccctgaacgacagccggtactgcctgagcagcagactgagagtgtccgccaccttctggcagaacccccggaaccacttcagatgccaggtgcagttctacggcctgagcgagaacgacgagtggacccaggacagagccaagcccgtgacccagatcgtgtctgccgaagcctggggcagagccgattgcggctttaccagcgagagctaccagcagggcgtgctgagcgccaccatcctgtacgagatcctgctgggcaaggccaccctgtacgccgtgctggtgtctgccctggtgctgatggctatggtcaagcggaaggacagccggggaagggccaagcgatctggatctggagcaacaaacttctcactactcaaacaagcaggtgacgtggaggagaatcccgggcctactagtaccatggactggatttggcgcatccttttccttgtcggcgctgctaccggcgcccattccgggccccaggtgcagctggttgaatctggcggaggactggttcagcctggcggatctctgagactgtcttgtgccgccagcggcaacatcaacagcagaaactgcatgggctggttcagacaggcccctggcaagggaagagaaggcgtggcagctatcggccaagtgaccggcagaacctactacgtggacagcgtgaagggcagattcaccatcagcctggacaacagcaagaacaccctgtacctccagatgaacagcctgagagccgaggacaccgccgtgtactattgtgctgctgcccctggctgtctgctgtctgcacttagaagcgccgactacagaaactggggccagggcacactggtcaccgtttcttctggatccggcggcggaggatctggcggaggcggatctgggggcggaggctctttcgaacaggttcagctccagcagtctggacctggcctggtcaagcctagccagacactgtctctgacctgtgccatcagcggcgatagcgtgtcctctaatagagccgcctggaactggatcagacagagccctagcagaggactccagtggctgggcagaacctactaccgcagcaagtggtacaacgactacgccgtgtctctgcggagccggatcaccatcaatcccgtgaccagcaagaaccaggtggccctgcacatgaacagcgtgacccctgaagataccgccgtgtactactgtgccagagccggaattgtggtggtgcccggacctgagacattctactactacgaccacggcctggacgtgtggggccagggaacaacagtgactgtctcttctacgcgtatccagaaccctgatcctgccgtgtaccagctgcgggatagcaagagcagcgacaagagcgtgtgtctgttcaccgacttcgacagccagaccaacgtgtcccagagcaaggactccgacgtgtacatcaccgataagtgcgtgctggacatgcggagcatggacttcaagagcaactccgccgtggcctggtccaacaagtccgatttcgcctgcgccaacgccttcaacaacagcattatccccgaggacacattcttcccaagccccgagagcagctgcgacgtgaagctggtggaaaagagcttcgagacagacaccaacctgaacttccagaacctgagcgtgatcggcttcagaatcctgctgctgaaagtggccggctttaacctgctgatgaccctgcggctgtggtccagc

SEQ ID NO: 40122 - DNA, 2340 bp, synthetic construct
  source 1..2340: mol_type = other DNA
atggccttaccagtgaccgccttgctcctgccgctggccttgctgctccacgccgccaggccggacatccagatgacacagagcccctctagcctgtctgccagcgtgggagacagagtgaccatcacctgtagagccagccagagcatcagaaactacctgaactggtatcagcaaaagcccggcaaggcccctgagctgctgattcatgctgcaagcagcctccagagcggcgtgccaagcagattttctggcagcggcagcggaaccgacttcaccctgacaatatctagcctccagcctgaggacttcgccagctactactgccagcagagctacagcgcccctcctatcacctttggacagggcaccagactggaaatcaagctcgaggacctgaagaacgtgttcccacctgaggtggccgtgttcgagcctagcgaggccgagatcagccacacccagaaagccaccctcgtgtgcctggctaccggcttctaccccgaccatgtggaactgtcttggtgggtcaacggcaaagaggtgcacagcggcgtgtgtaccgacccccagccactgaaagaacagcccgccctgaacgacagccggtactgcctgagcagcagactgagagtgtccgccaccttctggcagaacccccggaaccacttcagatgccaggtgcagttctacggcctgagcgagaacgacgagtggacccaggacagagccaagcccgtgacccagatcgtgtctgccgaagcctggggcagagccgattgcggctttaccagcgagagctaccagcagggcgtgctgagcgccaccatcctgtacgagatcctgctgggcaaggccaccctgtacgccgtgctggtgtctgccctggtgctgatggctatggtcaagcggaaggacagccggggaagggccaagcgatctggatctggagcaacaaacttctcactactcaaacaagcaggtgacgtggaggagaatcccgggcctactagtaccatggactggatttggcgcatccttttccttgtcggcgctgctaccggcgcccattccgggccccaggtgcagctggttgaatctggcggaggatctgttcaggctggcggctctctgagactgtcttgtggcgcttccggcaacatcagcagcagaaactgcatgggctggttcagacaggcccctggcaaagagagagaaggcgttgccgccatcggacaagtgaccggcagatcctactacgtggacagcgtgaagggcagattcaccatcagcctggacaacgccaagaacaccctgtacctccagatgaacacactgaagcccgaggacaccgccatgtactactgtgctgctgcccctggctgtctgctgtctgcacttagaagcgccgactacagaaactggggccagggaacccaagtgacagtgtctagtggatccggcggcggaggatctggcggaggcggatctgggggcggaggctctttcgaacaggttcagctccagcagtctggacctggcctggtcaagcctagccagacactgtctctgacctgtgccatcagcggcgatagcgtgtcctctaatagagccgcctggaactggatcagacagagccctagcagaggactccagtggctgggcagaacctactaccgcagcaagtggtacaacgactacgccgtgtctctgcggagccggatcaccatcaatcccgtgaccagcaagaaccaggtggccctgcacatgaacagcgtgacccctgaagataccgccgtgtactactgtgccagagccggaattgtggtggtgcccggacctgagacattctactactacgaccacggcctggacgtgtggggccagggaacaacagtgactgtctcttctacgcgtatccagaaccctgatcctgccgtgtaccagctgcgggatagcaagagcagcgacaagagcgtgtgtctgttcaccgacttcgacagccagaccaacgtgtcccagagcaaggactccgacgtgtacatcaccgataagtgcgtgctggacatgcggagcatggacttcaagagcaactccgccgtggcctggtccaacaagtccgatttcgcctgcgccaacgccttcaacaacagcattatccccgaggacacattcttcccaagccccgagagcagctgcgacgtgaagctggtggaaaagagcttcgagacagacaccaacctgaacttccagaacctgagcgtgatcggcttcagaatcctgctgctgaaagtggccggctttaacctgctgatgaccctgcggctgtggtccagctaa

SEQ ID NO: 40123 - DNA, 2763 bp, synthetic construct
  source 1..2763: mol_type = other DNA
atggccttaccagtgaccgccttgctcctgccgctggccttgctgctccacgccgccaggccggaagtgcagctggttgaatctggcggaggactggttcaggctggcggatctctgagactgtcttgtgccgccagcggcagaacctttagcatgggctggtttagacaggcccctggcaaagagagagagttcgtcgccgccatcacatactctggcggcagcccttactacgccgactctgtgaagggcagattcaccatcagccgggacaacgccaagaacaccgtgtacctccagatgaacagcctgaagcctgaggacaccgccgtgtactactgcgccgccaatccaacatacggcagcgactggaacgccgagaattggggccagggaacccaagtgacagtgtctagcggtaccggcggaggcggatctggcggcggaggtagcggtggcggaggatctgaattcgacatccagatgacacagagcccctctagcctgtctgccagcgtgggagacagagtgaccatcacctgtagagccagccagagcatcagaaactacctgaactggtatcagcaaaagcccggcaaggcccctgagctgctgattcatgctgcaagcagcctccagagcggcgtgccaagcagattttctggcagcggcagcggaaccgacttcaccctgacaatatctagcctccagcctgaggacttcgccagctactactgccagcagagctacagcgcccctcctatcacctttggacagggcaccagactggaaatcaagctcgagatccagaaccctgatcctgccgtgtaccagctgcgggatagcaagagcagcgacaagagcgtgtgtctgttcaccgacttcgacagccagaccaacgtgtcccagagcaaggactccgacgtgtacatcaccgataagtgcgtgctggacatgcggagcatggacttcaagagcaactccgccgtggcctggtccaacaagtccgatttcgcctgcgccaacgccttcaacaacagcattatccccgaggacacattcttcccaagcagcgacgtgccctgcgacgtgaagctggtggaaaagagcttcgagacagacaccaacctgaacttccagaacctgagcgtgatcggcttcagaatcctgctgctgaaagtggccggctttaacctgctgatgaccctgcggctgtggtccagccgcgccaagagaagcggatctggcgtgaagcagaccctgaatttcgacctgctgaagctggctggcgacgtggaatccaacccaggccctactagtaccatggactggatttggcgcatccttttccttgtcggcgctgctaccggcgcccattccgggccccaggtgcagctggttgaatctggcggaggatctgttcaggctggcggctctctgagactgtcttgtggcgcttccggcaacatcagcagcagaaactgcatgggctggttcagacaggcccctggcaaagagagagaaggcgttgccgccatcggacaagtgaccggcagatcctactacgtggacagcgtgaagggcagattcaccatcagcctggacaacgccaagaacaccctgtacctccagatgaacacactgaagcccgaggacaccgccatgtactactgtgctgctgcccctggctgtctgctgtctgcacttagaagcgccgactacagaaactggggccagggaacccaagtgacagtgtctagtggatccggcggcggaggatctggcggaggcggatctgggggcggaggctctttcgaacaggttcagctccagcagtctggacctggcctggtcaagcctagccagacactgtctctgacctgtgccatcagcggcgatagcgtgtcctctaatagagccgcctggaactggatcagacagagccctagcagaggactccagtggctgggcagaacctactaccgcagcaagtggtacaacgactacgccgtgtctctgcggagccggatcaccatcaatcccgtgaccagcaagaaccaggtggccctgcacatgaacagcgtgacccctgaagataccgccgtgtactactgtgccagagccggaattgtggtggtgcccggacctgagacattctactactacgaccacggcctggacgtgtggggccagggaacaacagtgactgtctcttctacgcgtgaggacctgaagaacgtgttcccacctgaggtggccgtgttcgagcctagcaaggccgagatcgcccacacccagaaagccaccctcgtgtgcctggctaccggcttctaccccgaccatgtggaactgtcttggtgggtcaacggcaaagaggtgcacagcggcgtgtgtaccgacccccagccactgaaagaacagcccgccctgaacgacagccggtactgcctgagcagcagactgagagtgtccgccaccttctggcagaacccccggaaccacttcagatgccaggtgcagttctacggcctgagcgagaacgacgagtggacccaggacagagccaagcccgtgacccagatcgtgtctgccgaagcctggggcagagccgattgcggcatcaccagcgccagctaccaccagggcgtgctgagcgccaccatcctgtacgagatcctgctgggcaaggccaccctgtacgccgtgctggtgtctgccctggtgctgatggctatggtcaagcggaaggacagccggggataa

SEQ ID NO: 40124 - DNA, 2754 bp, synthetic construct
  source 1..2754: mol_type = other DNA
atggccttaccagtgaccgccttgctcctgccgctggccttgctgctccacgccgccaggccgcaggtgcagctggttgaatctggcggaggatctgttcaggctggcggctctctgagactgtcttgtggcgcttccggcaacatcagcagcagaaactgcatgggctggttcagacaggcccctggcaaagagagagaaggcgttgccgccatcggacaagtgaccggcagatcctactacgtggacagcgtgaagggcagattcaccatcagcctggacaacgccaagaacaccctgtacctccagatgaacacactgaagcccgaggacaccgccatgtactactgtgctgctgcccctggctgtctgctgtctgcacttagaagcgccgactacagaaactggggccagggaacccaagtgacagtgtctagtggtaccggcggaggcggatctggcggcggaggtagcggtggcggaggatctgaattcgacatccagatgacacagagcccctctagcctgtctgccagcgtgggagacagagtgaccatcacctgtagagccagccagagcatcagaaactacctgaactggtatcagcaaaagcccggcaaggcccctgagctgctgattcatgctgcaagcagcctccagagcggcgtgccaagcagattttctggcagcggcagcggaaccgacttcaccctgacaatatctagcctccagcctgaggacttcgccagctactactgccagcagagctacagcgcccctcctatcacctttggacagggcaccagactggaaatcaagctcgaggacctgaagaacgtgttcccacctgaggtggccgtgttcgagcctagcgaggccgagatcagccacacccagaaagccaccctcgtgtgcctggctaccggcttctaccccgaccatgtggaactgtcttggtgggtcaacggcaaagaggtgcacagcggcgtgtgtaccgacccccagccactgaaagaacagcccgccctgaacgacagccggtactgcctgagcagcagactgagagtgtccgccaccttctggcagaacccccggaaccacttcagatgccaggtgcagttctacggcctgagcgagaacgacgagtggacccaggacagagccaagcccgtgacccagatcgtgtctgccgaagcctggggcagagccgattgcggctttaccagcgagagctaccagcagggcgtgctgagcgccaccatcctgtacgagatcctgctgggcaaggccaccctgtacgccgtgctggtgtctgccctggtgctgatggctatggtcaagcggaaggacagccggggaagggccaagcgatctggatctggagcaacaaacttctcactactcaaacaagcaggtgacgtggaggagaatcccgggcctactagtgccaccatggactggatttggcgcatccttttccttgtcggcgctgctaccggcgcccattccgggcccgaagtgcaactggttgaatccggtggcggcctggtgcaagcaggcggatctctcagacttagctgtgccgcctccggcagaaccttcacaatgggatggtttaggcaggctccagggaaagagagagagttcgtcgccgccatctctctgtctcccacactggcctactacgccgactctgtgaaaggccggttcaccatctccagagataatgccaagaacaccgtggtgctgcaaatgaactctctgaaacccgaggatacagccctgtactattgtgccgctgaccggaagtccgtgatgagcatcagacccgattactggggacagggcacacaagtcacagtgtcctctggatccggcggcggaggatctggcggaggcggatctgggggcggaggctctttcgaacaggttcagctccagcagtctggacctggcctggtcaagcctagccagacactgtctctgacctgtgccatcagcggcgatagcgtgtcctctaatagagccgcctggaactggatcagacagagccctagcagaggactccagtggctgggcagaacctactaccgcagcaagtggtacaacgactacgccgtgtctctgcggagccggatcaccatcaatcccgtgaccagcaagaaccaggtggccctgcacatgaacagcgtgacccctgaagataccgccgtgtactactgtgccagagccggaattgtggtggtgcccggacctgagacattctactactacgaccacggcctggacgtgtggggccagggaacaacagtgactgtctcttctacgcgtatccagaaccctgatcctgccgtgtaccagctgcgggatagcaagagcagcgacaagagcgtgtgtctgttcaccgacttcgacagccagaccaacgtgtcccagagcaaggactccgacgtgtacatcaccgataagtgcgtgctggacatgcggagcatggacttcaagagcaactccgccgtggcctggtccaacaagtccgatttcgcctgcgccaacgccttcaacaacagcattatccccgaggacacattcttcccaagccccgagagcagctgcgacgtgaagctggtggaaaagagcttcgagacagacaccaacctgaacttccagaacctgagcgtgatcggcttcagaatcctgctgctgaaagtggccggctttaacctgctgatgaccctgcggctgtggtccagctaa

SEQ ID NO: 40125 - DNA, 2343 bp, synthetic construct
  source 1..2343: mol_type = other DNA
atggccttaccagtgaccgccttgctcctgccgctggccttgctgctccacgccgccaggccgcaggtgcagctggttgaatctggcggaggatctgttcaggctggcggctctctgagactgtcttgtggcgcttccggcaacatcagcagcagaaactgcatgggctggttcagacaggcccctggcaaagagagagaaggcgttgccgccatcggacaagtgaccggcagatcctactacgtggacagcgtgaagggcagattcaccatcagcctggacaacgccaagaacaccctgtacctccagatgaacacactgaagcccgaggacaccgccatgtactactgtgctgctgcccctggctgtctgctgtctgcacttagaagcgccgactacagaaactggggccagggaacccaagtgacagtgtctagtggtaccggcggaggcggatctggcggcggaggtagcggtggcggaggatctgaattcgacatccagatgacacagagcccctctagcctgtctgccagcgtgggagacagagtgaccatcacctgtagagccagccagagcatcagaaactacctgaactggtatcagcaaaagcccggcaaggcccctgagctgctgattcatgctgcaagcagcctccagagcggcgtgccaagcagattttctggcagcggcagcggaaccgacttcaccctgacaatatctagcctccagcctgaggacttcgccagctactactgccagcagagctacagcgcccctcctatcacctttggacagggcaccagactggaaatcaagctcgaggacctgaagaacgtgttcccacctgaggtggccgtgttcgagcctagcgaggccgagatcagccacacccagaaagccaccctcgtgtgcctggctaccggcttctaccccgaccatgtggaactgtcttggtgggtcaacggcaaagaggtgcacagcggcgtgtgtaccgacccccagccactgaaagaacagcccgccctgaacgacagccggtactgcctgagcagcagactgagagtgtccgccaccttctggcagaacccccggaaccacttcagatgccaggtgcagttctacggcctgagcgagaacgacgagtggacccaggacagagccaagcccgtgacccagatcgtgtctgccgaagcctggggcagagccgattgcggctttaccagcgagagctaccagcagggcgtgctgagcgccaccatcctgtacgagatcctgctgggcaaggccaccctgtacgccgtgctggtgtctgccctggtgctgatggctatggtcaagcggaaggacagccggggaagggccaagcgatctggatctggagcaacaaacttctcactactcaaacaagcaggtgacgtggaggagaatcccgggcctactagtgccaccatggactggatttggcgcatccttttccttgtcggcgctgctaccggcgcccattccttcgaacaggttcagctccagcagtctggacctggcctggtcaagcctagccagacactgtctctgacctgtgccatcagcggcgatagcgtgtcctctaatagagccgcctggaactggatcagacagagccctagcagaggactccagtggctgggcagaacctactaccgcagcaagtggtacaacgactacgccgtgtctctgcggagccggatcaccatcaatcccgtgaccagcaagaaccaggtggccctgcacatgaacagcgtgacccctgaagataccgccgtgtactactgtgccagagccggaattgtggtggtgcccggacctgagacattctactactacgaccacggcctggacgtgtggggccagggaacaacagtgactgtctcttctacgcgtatccagaaccctgatcctgccgtgtaccagctgcgggatagcaagagcagcgacaagagcgtgtgtctgttcaccgacttcgacagccagaccaacgtgtcccagagcaaggactccgacgtgtacatcaccgataagtgcgtgctggacatgcggagcatggacttcaagagcaactccgccgtggcctggtccaacaagtccgatttcgcctgcgccaacgccttcaacaacagcattatccccgaggacacattcttcccaagccccgagagcagctgcgacgtgaagctggtggaaaagagcttcgagacagacaccaacctgaacttccagaacctgagcgtgatcggcttcagaatcctgctgctgaaagtggccggctttaacctgctgatgaccctgcggctgtggtccagctaa

SEQ ID NO: 40126 - DNA, 2343 bp, synthetic construct
  source 1..2343: mol_type = other DNA
atggccttaccagtgaccgccttgctcctgccgctggccttgctgctccacgccgccaggccgcaagttcagctggtggaaagcggtggtggcgttgtgcaacctggtggaagtctgaggctgagctgtgccgcttctggcctgagctttagcacctacactgtggcctggttcaggcaggctcccggaaagggtcttgaaggcgtggccgccattccttacaccagccagcacatggtgtacacagacagcgtcagaggccggttcaccatcagcagagacaactccaagaatacgctctatctccagatgaactctctgcgcgccgaagatacagccgtgtattactgcgccaccgacagacggcctggcacctctatgctggctatcaacggctacaacagatggggacagggaaccaccgtgaccgtgtcatctggtaccggcggaggcggatctggcggcggaggtagcggtggcggaggatctgaattcgacatccagatgacacagagcccctctagcctgtctgccagcgtgggagacagagtgaccatcacctgtagagccagccagagcatcagaaactacctgaactggtatcagcaaaagcccggcaaggcccctgagctgctgattcatgctgcaagcagcctccagagcggcgtgccaagcagattttctggcagcggcagcggaaccgacttcaccctgacaatatctagcctccagcctgaggacttcgccagctactactgccagcagagctacagcgcccctcctatcacctttggacagggcaccagactggaaatcaagctcgaggacctgaagaacgtgttcccacctgaggtggccgtgttcgagcctagcgaggccgagatcagccacacccagaaagccaccctcgtgtgcctggctaccggcttctaccccgaccatgtggaactgtcttggtgggtcaacggcaaagaggtgcacagcggcgtgtgtaccgacccccagccactgaaagaacagcccgccctgaacgacagccggtactgcctgagcagcagactgagagtgtccgccaccttctggcagaacccccggaaccacttcagatgccaggtgcagttctacggcctgagcgagaacgacgagtggacccaggacagagccaagcccgtgacccagatcgtgtctgccgaagcctggggcagagccgattgcggctttaccagcgagagctaccagcagggcgtgctgagcgccaccatcctgtacgagatcctgctgggcaaggccaccctgtacgccgtgctggtgtctgccctggtgctgatggctatggtcaagcggaaggacagccggggaagggccaagcgatctggatctggagcaacaaacttctcactactcaaacaagcaggtgacgtggaggagaatcccgggcctactagtgccaccatggactggatttggcgcatccttttccttgtcggcgctgctaccggcgcccattccttcgaacaggttcagctccagcagtctggacctggcctggtcaagcctagccagacactgtctctgacctgtgccatcagcggcgatagcgtgtcctctaatagagccgcctggaactggatcagacagagccctagcagaggactccagtggctgggcagaacctactaccgcagcaagtggtacaacgactacgccgtgtctctgcggagccggatcaccatcaatcccgtgaccagcaagaaccaggtggccctgcacatgaacagcgtgacccctgaagataccgccgtgtactactgtgccagagccggaattgtggtggtgcccggacctgagacattctactactacgaccacggcctggacgtgtggggccagggaacaacagtgactgtctcttctacgcgtatccagaaccctgatcctgccgtgtaccagctgcgggatagcaagagcagcgacaagagcgtgtgtctgttcaccgacttcgacagccagaccaacgtgtcccagagcaaggactccgacgtgtacatcaccgataagtgcgtgctggacatgcggagcatggacttcaagagcaactccgccgtggcctggtccaacaagtccgatttcgcctgcgccaacgccttcaacaacagcattatccccgaggacacattcttcccaagccccgagagcagctgcgacgtgaagctggtggaaaagagcttcgagacagacaccaacctgaacttccagaacctgagcgtgatcggcttcagaatcctgctgctgaaagtggccggctttaacctgctgatgaccctgcggctgtggtccagctaa

SEQ ID NO: 40127 - DNA, 2340 bp, synthetic construct
  source 1..2340: mol_type = other DNA
atggccttaccagtgaccgccttgctcctgccgctggccttgctgctccacgccgccaggccggacatccagatgacacagagcccctctagcctgtctgccagcgtgggagacagagtgaccatcacctgtagagccagccagagcatcagaaactacctgaactggtatcagcaaaagcccggcaaggcccctgagctgctgattcatgctgcaagcagcctccagagcggcgtgccaagcagattttctggcagcggcagcggaaccgacttcaccctgacaatatctagcctccagcctgaggacttcgccagctactactgccagcagagctacagcgcccctcctatcacctttggacagggcaccagactggaaatcaagctcgaggacctgaagaacgtgttcccacctgaggtggccgtgttcgagcctagcgaggccgagatcagccacacccagaaagccaccctcgtgtgcctggctaccggcttctaccccgaccatgtggaactgtcttggtgggtcaacggcaaagaggtgcacagcggcgtgtgtaccgacccccagccactgaaagaacagcccgccctgaacgacagccggtactgcctgagcagcagactgagagtgtccgccaccttctggcagaacccccggaaccacttcagatgccaggtgcagttctacggcctgagcgagaacgacgagtggacccaggacagagccaagcccgtgacccagatcgtgtctgccgaagcctggggcagagccgattgcggctttaccagcgagagctaccagcagggcgtgctgagcgccaccatcctgtacgagatcctgctgggcaaggccaccctgtacgccgtgctggtgtctgccctggtgctgatggctatggtcaagcggaaggacagccggggaagggccaagcgatctggatctggagcaacaaacttctcactactcaaacaagcaggtgacgtggaggagaatcccgggcctactagtaccatggactggatttggcgcatccttttccttgtcggcgctgctaccggcgcccattccgggccccaagttcagctggtggaaagcggtggtggcgttgtgcaacctggtggaagtctgaggctgagctgtgccgcttctggcctgagctttagcacctacactgtggcctggttcaggcaggctcccggaaagggtcttgaaggcgtggccgccattccttacaccagccagcacatggtgtacacagacagcgtcagaggccggttcaccatcagcagagacaactccaagaatacgctctatctccagatgaactctctgcgcgccgaagatacagccgtgtattactgcgccaccgacagacggcctggcacctctatgctggctatcaacggctacaacagatggggacagggaaccaccgtgaccgtgtcatctggatccggcggcggaggatctggcggaggcggatctgggggcggaggctctttcgaacaggttcagctccagcagtctggacctggcctggtcaagcctagccagacactgtctctgacctgtgccatcagcggcgatagcgtgtcctctaatagagccgcctggaactggatcagacagagccctagcagaggactccagtggctgggcagaacctactaccgcagcaagtggtacaacgactacgccgtgtctctgcggagccggatcaccatcaatcccgtgaccagcaagaaccaggtggccctgcacatgaacagcgtgacccctgaagataccgccgtgtactactgtgccagagccggaattgtggtggtgcccggacctgagacattctactactacgaccacggcctggacgtgtggggccagggaacaacagtgactgtctcttctacgcgtatccagaaccctgatcctgccgtgtaccagctgcgggatagcaagagcagcgacaagagcgtgtgtctgttcaccgacttcgacagccagaccaacgtgtcccagagcaaggactccgacgtgtacatcaccgataagtgcgtgctggacatgcggagcatggacttcaagagcaactccgccgtggcctggtccaacaagtccgatttcgcctgcgccaacgccttcaacaacagcattatccccgaggacacattcttcccaagccccgagagcagctgcgacgtgaagctggtggaaaagagcttcgagacagacaccaacctgaacttccagaacctgagcgtgatcggcttcagaatcctgctgctgaaagtggccggctttaacctgctgatgaccctgcggctgtggtccagctaa

SEQ ID NO: 40128 - DNA, 2346 bp, synthetic construct
  source 1..2346: mol_type = other DNA
atggccttaccagtgaccgccttgctcctgccgctggccttgctgctccacgccgccaggccggacatccagatgacacagagcccctctagcctgtctgccagcgtgggagacagagtgaccatcacctgtagagccagccagagcatcagaaactacctgaactggtatcagcaaaagcccggcaaggcccctgagctgctgattcatgctgcaagcagcctccagagcggcgtgccaagcagattttctggcagcggcagcggaaccgacttcaccctgacaatatctagcctccagcctgaggacttcgccagctactactgccagcagagctacagcgcccctcctatcacctttggacagggcaccagactggaaatcaagctcgaggacctgaagaacgtgttcccacctgaggtggccgtgttcgagcctagcgaggccgagatcagccacacccagaaagccaccctcgtgtgcctggctaccggcttctaccccgaccatgtggaactgtcttggtgggtcaacggcaaagaggtgcacagcggcgtgtgtaccgacccccagccactgaaagaacagcccgccctgaacgacagccggtactgcctgagcagcagactgagagtgtccgccaccttctggcagaacccccggaaccacttcagatgccaggtgcagttctacggcctgagcgagaacgacgagtggacccaggacagagccaagcccgtgacccagatcgtgtctgccgaagcctggggcagagccgattgcggctttaccagcgagagctaccagcagggcgtgctgagcgccaccatcctgtacgagatcctgctgggcaaggccaccctgtacgccgtgctggtgtctgccctggtgctgatggctatggtcaagcggaaggacagccggggaagggccaagcgatctggatctggagcaacaaacttctcactactcaaacaagcaggtgacgtggaggagaatcccgggcctactagtaccatggactggatttggcgcatccttttccttgtcggcgctgctaccggcgcccattccgggcccgaggtgcagctggttgaatctggcggaggatctgttcaggctggcggctctctgagactgtcttgtgccgccagcggctacacctacagcatcaactgcatgggctggttcagacaggcccctggcaaagagagagaaggcgttgccgccatctctaccggcggaggcagaaccgattaccgggattctgtgaagggcagattcaccatcagccaggacaacgccaagaacaccgtgtacctccagatgaacagcctgaagcctgaggacaccgccatgtactactgtgccggcaagaccacctatcctggctacggatgtggcctgggcagaagcgcctacaattattggggccagggcacccaagtgaccgtgtcatctggatccggcggcggaggatctggcggaggcggatctgggggcggaggctctttcgaacaggttcagctccagcagtctggacctggcctggtcaagcctagccagacactgtctctgacctgtgccatcagcggcgatagcgtgtcctctaatagagccgcctggaactggatcagacagagccctagcagaggactccagtggctgggcagaacctactaccgcagcaagtggtacaacgactacgccgtgtctctgcggagccggatcaccatcaatcccgtgaccagcaagaaccaggtggccctgcacatgaacagcgtgacccctgaagataccgccgtgtactactgtgccagagccggaattgtggtggtgcccggacctgagacattctactactacgaccacggcctggacgtgtggggccagggaacaacagtgactgtctcttctacgcgtatccagaaccctgatcctgccgtgtaccagctgcgggatagcaagagcagcgacaagagcgtgtgtctgttcaccgacttcgacagccagaccaacgtgtcccagagcaaggactccgacgtgtacatcaccgataagtgcgtgctggacatgcggagcatggacttcaagagcaactccgccgtggcctggtccaacaagtccgatttcgcctgcgccaacgccttcaacaacagcattatccccgaggacacattcttcccaagccccgagagcagctgcgacgtgaagctggtggaaaagagcttcgagacagacaccaacctgaacttccagaacctgagcgtgatcggcttcagaatcctgctgctgaaagtggccggctttaacctgctgatgaccctgcggctgtggtccagctaa

SEQ ID NO: 40129 - DNA, 1902 bp, synthetic construct
  source 1..1902: mol_type = other DNA
atggccttaccagtgaccgccttgctcctgccgctggccttgctgctccacgccgccaggccggacatccagatgacacagagcccctctagcctgtctgccagcgtgggagacagagtgaccatcacctgtagagccagccagagcatcagaaactacctgaactggtatcagcaaaagcccggcaaggcccctgagctgctgattcatgctgcaagcagcctccagagcggcgtgccaagcagattttctggcagcggcagcggaaccgacttcaccctgacaatatctagcctccagcctgaggacttcgccagctactactgccagcagagctacagcgcccctcctatcacctttggacagggcaccagactggaaatcaagctcgaggacctgaagcacgtgttcccacctgaggtggccgtgttcgagcctagcgacgccgagatctggcacacccagaaagccaccctcgtgtgcctggctaccggcttctaccccgaccatgtggaactgtcttggtgggtcaacggcaaagaggtgcacagcggcgtgtctaccgacccccagccactgaaagaacagcccgccctgaacgacagccggtactgcctgagcagcagactgagagtgtccgccaccttctggcagaacccccggaaccacttcagatgccaggtgcagttctacggcctgagcgagaacgacgagtggacccaggacagagccaagcccgtgacccagatcgtgtctgccgaagcctggggcagagccgattgcggctttaccagcgagagctaccagcagggcgtgctgagcgccaccatcctgtacgagatcctgctgggcaaggccaccctgtacgccgtgctggtgtctgccctggtgctgatggctatggtcaagcggaaggacagccggggaagggccaagcgatctggatctggagcaacaaacttctcactactcaaacaagcaggtgacgtggaggagaatcccgggcctactagtatggactggatttggcgcatccttttccttgtcggcgctgctaccggcgcgcattccttcgaacaggttcagctccagcagtctggacctggcctggtcaagcctagccagacactgtctctgacctgtgccatcagcggcgatagcgtgtcctctaatagagccgcctggaactggatcagacagagccctagcagaggactccagtggctgggcagaacctactaccgcagcaagtggtacaacgactacgccgtgtctctgcggagccggatcaccatcaatcccgtgaccagcaagaaccaggtggccctgcacatgaacagcgtgacccctgaagataccgccgtgtactactgtgccagagccggaattgtggtggtgcccggacctgagacattctactactacgaccacggcctggacgtgtggggccagggaacaacagtgactgtctcttctacgcgtatccagaaccctgatcctgccgtgtaccagctgcgggatagcaagagcagcgacaagagcgtgtgtctgttcaccgacttcgacagccagaccaacgtgtcccagagcaaggactccgacgtgtacatcaccgataagaccgtgctggacatgcggagcatggacttcaagagcaactccgccgtggcctggtccagcaagtccgatttcgcctgcgccaacgccttcaacaacagcattatccccgaggacacattcttcccaagccccgagatggcctgcgacgtgaagctggtggaaaagagcttcgagacagacaccaacctgaacttccagaacctgctcgtgatctggctgagaatcctgctgctgaaagtggccggctttaacctgctgatgaccctgcggctgtggtccagc

SEQ ID NO: 40130 - DNA, 1902 bp, synthetic construct
  source 1..1902: mol_type = other DNA
atggccttaccagtgaccgccttgctcctgccgctggccttgctgctccacgccgccaggccggacatccagatgacacagagcccctctagcctgtctgccagcgtgggagacagagtgaccatcacctgtagagccagccagagcatcagaaactacctgaactggtatcagcaaaagcccggcaaggcccctgagctgctgattcatgctgcaagcagcctccagagcggcgtgccaagcagattttctggcagcggcagcggaaccgacttcaccctgacaatatctagcctccagcctgaggacttcgccagctactactgccagcagagctacagcgcccctcctatcacctttggacagggcaccagactggaaatcaagctcgaggacctgaagcacgtgttcccacctgaggtggccgtgttcgagcctagcgacgccgagatctggcacacccagaaagccaccctcgtgtgcctggctaccggcttctaccccgaccatgtggaactgtcttggtgggtcaacggcaaagaggtgcacagcggcgtgtctaccgacccccagccactgaaagaacagcccgccctgaacgacagccggtactgcctgagcagcagactgagagtgtccgccaccttctggcagaacccccggaaccacttcagatgccaggtgcagttctacggcctgagcgagaacgacgagtggacccaggacagagccaagcccgtgacccagatcgtgtctgccgaagcctggggcagagccgattgcggctttaccagcgagagctaccagcagggcgtgctgagcgccaccatcctgtacgagatcctgctgggcaaggccaccctgtacgccgtgctggtgtctgccctggtgctgatggctatggtcaagcggaaggacagccggggaagggccaagcgatctggatctggagcaacaaacttctcactactcaaacaagcaggtgacgtggaggagaatcccgggcctactagtatggactggatttggcgcatccttttccttgtcggcgctgctaccggcgcgcattccttcgaacaggttcagctccagcagtctggacctggcctggtcaagcctagccagacactgtctctgacctgtgccatcagcggcgatagcgtgtcctctaatagagccgcctggaactggatcagacagagccctagcagaggactccagtggctgggcagaacctactaccgcagcaagtggtacaacgactacgccgtgtctctgcggagccggatcaccatcaatcccgtgaccagcaagaaccaggtggccctgcacatgaacagcgtgacccctgaagataccgccgtgtactactgtgccagagccggaattgtggtggtgcccggacctgagacattctactactacgaccacggcctggacgtgtggggccagggaacaacagtgactgtctcttctacgcgtatccagaaccctgatcctgccgtgtaccagctgcgggatagcaagagcagcgacaagagcgtgtgtctgttcaccgacttcgacagccagaccaacgtgtcccagagcaaggactccgacgtgtacatcaccgataagaccgtgctggacatgcggagcatggacttcaagagcaactccgccgtggcctggtccaccaagtccgatttcgcctgcgccaacgccttcaacaacagcattatccccgaggacacattcttcccaagccccgaggtggtgtgcgacgtgaagctggtggaaaagagcttcgagacagacaccaacctgaacttccagaacctggtggtgatcggcgccagaatcctgctgctgaaagtggccggctttaacctgctgatgaccctgcggctgtggtccagc

SEQ ID NO: 40131 - DNA, 1902 bp, synthetic construct
  source 1..1902: mol_type = other DNA
atggccttaccagtgaccgccttgctcctgccgctggccttgctgctccacgccgccaggccggacatccagatgacacagagcccctctagcctgtctgccagcgtgggagacagagtgaccatcacctgtagagccagccagagcatcagaaactacctgaactggtatcagcaaaagcccggcaaggcccctgagctgctgattcatgctgcaagcagcctccagagcggcgtgccaagcagattttctggcagcggcagcggaaccgacttcaccctgacaatatctagcctccagcctgaggacttcgccagctactactgccagcagagctacagcgcccctcctatcacctttggacagggcaccagactggaaatcaagctcgaggacctgaagaacgtgttcccacctgaggtggccgtgttcgagcctagcaaggccgagatcagcagaacccagaaagccaccctcgtgtgcctggctaccggcttctaccctcctcatgtggaactgtcttggtgggtcaacggcaaagaggtgcacgacggcgtgtgtaccgacccccagccactgaaagaacagcccgccctgaacgacagccggtactgcctgagcagcagactgagagtgtccgccaccttctggcagaacccccggaaccacttcagatgccaggtgcagttctacggcctgagcgagaacgacgagtggacccaggacagagccaagcccgtgacccagatcgtgtctgccgaagcctggggcagagccgattgcggctttaccagcgagagctaccagcagggcgtgctgagcgccaccatcctgtacgagatcctgctgggcaaggccaccctgtacgccgtgctggtgtctgccctggtgctgatggctatggtcaagcggaaggacagccggggaagggccaagcgatctggatctggagcaacaaacttctcactactcaaacaagcaggtgacgtggaggagaatcccgggcctactagtatggactggatttggcgcatccttttccttgtcggcgctgctaccggcgcgcattccttcgaacaggttcagctccagcagtctggacctggcctggtcaagcctagccagacactgtctctgacctgtgccatcagcggcgatagcgtgtcctctaatagagccgcctggaactggatcagacagagccctagcagaggactccagtggctgggcagaacctactaccgcagcaagtggtacaacgactacgccgtgtctctgcggagccggatcaccatcaatcccgtgaccagcaagaaccaggtggccctgcacatgaacagcgtgacccctgaagataccgccgtgtactactgtgccagagccggaattgtggtggtgcccggacctgagacattctactactacgaccacggcctggacgtgtggggccagggaacaacagtgactgtctcttctacgcgtatccagaaccctgatcctgccgtgtaccagctgcgggatagcaagagcagcgacaagttcgtgtgtctgttcaccgacttcgacagccagatcaacgtgtcccagagcaaggactccgacgtgtacatcaccgataagtgcgtgctggacatgcggagcatggacttcaagagcaactccgccgtggcctggtccaacaagtccgatttcacctgcgccaacgccttcaacaacagcattatccccgaggacacattcttcccaagccccgagagcagctgcgacgtgaagctggtggaaaagagcttcgagacagacaccaacctgaacttccagaacctgagcgtgatcggcttcagaatcctgctgctgaaagtggccggctttaacctgctgatgaccctgcggctgtggtccagc

SEQ ID NO: 40132 - DNA, 2328 bp, synthetic construct
  source 1..2328: mol_type = other DNA
atggccttaccagtgaccgccttgctcctgccgctggccttgctgctccacgccgccaggccggacatccagatgacacagagcccctctagcctgtctgccagcgtgggagacagagtgaccatcacctgtagagccagccagagcatcagaaactacctgaactggtatcagcaaaagcccggcaaggcccctgagctgctgattcatgctgcaagcagcctccagagcggcgtgccaagcagattttctggcagcggcagcggaaccgacttcaccctgacaatatctagcctccagcctgaggacttcgccagctactactgccagcagagctacagcgcccctcctatcacctttggacagggcaccagactggaaatcaagctcgaggacctgaagaacgtgttcccacctgaggtggccgtgttcgagcctagcgaggccgagatcagccacacccagaaagccaccctcgtgtgcctggctaccggcttctaccccgaccatgtggaactgtcttggtgggtcaacggcaaagaggtgcacagcggcgtgtgtaccgacccccagccactgaaagaacagcccgccctgaacgacagccggtactgcctgagcagcagactgagagtgtccgccaccttctggcagaacccccggaaccacttcagatgccaggtgcagttctacggcctgagcgagaacgacgagtggacccaggacagagccaagcccgtgacccagatcgtgtctgccgaagcctggggcagagccgattgcggctttaccagcgagagctaccagcagggcgtgctgagcgccaccatcctgtacgagatcctgctgggcaaggccaccctgtacgccgtgctggtgtctgccctggtgctgatggctatggtcaagcggaaggacagccggggaagggccaagcgatctggatctggagcaacaaacttctcactactcaaacaagcaggtgacgtggaggagaatcccgggcctactagtaccatggactggatttggcgcatccttttccttgtcggcgctgctaccggcgcccattccgggccccaggtgcagctccaagaaagcggacccggactggttaagccctctcagaccctgtctctgacctgcacagttagcggagccagcattaccacaggcgagtattattggaattggtttcggcagccaccaggcaaggggcttgagtggatgggtgctattgctgcctctggcagcaccacctactctcccagctttgagagcagaacctccatcagccgggacacctccaaaaaccagttctctctgaagctgtcctccgtgaccgctgctgacaccgccgtctattattgtggccggtctttcggcgtggcagctgtgaccacaggacagaacagaggccagggaacacttgtgaccgtgtcctctggatccggcggcggaggatctggcggaggcggatctgggggcggaggctctttcgaacaggttcagctccagcagtctggacctggcctggtcaagcctagccagacactgtctctgacctgtgccatcagcggcgatagcgtgtcctctaatagagccgcctggaactggatcagacagagccctagcagaggactccagtggctgggcagaacctactaccgcagcaagtggtacaacgactacgccgtgtctctgcggagccggatcaccatcaatcccgtgaccagcaagaaccaggtggccctgcacatgaacagcgtgacccctgaagataccgccgtgtactactgtgccagagccggaattgtggtggtgcccggacctgagacattctactactacgaccacggcctggacgtgtggggccagggaacaacagtgactgtctcttctacgcgtatccagaaccctgatcctgccgtgtaccagctgcgggatagcaagagcagcgacaagagcgtgtgtctgttcaccgacttcgacagccagaccaacgtgtcccagagcaaggactccgacgtgtacatcaccgataagtgcgtgctggacatgcggagcatggacttcaagagcaactccgccgtggcctggtccaacaagtccgatttcgcctgcgccaacgccttcaacaacagcattatccccgaggacacattcttcccaagccccgagagcagctgcgacgtgaagctggtggaaaagagcttcgagacagacaccaacctgaacttccagaacctgagcgtgatcggcttcagaatcctgctgctgaaagtggccggctttaacctgctgatgaccctgcggctgtggtccagc

SEQ ID NO: 40133 - DNA, 2751 bp, synthetic construct
  source 1..2751: mol_type = other DNA
atggccttaccagtgaccgccttgctcctgccgctggccttgctgctccacgccgccaggccgcaggttcagctgcaagagtctggccctggcctggtcaagcctagccaaacactgagcctgacctgtaccgtgtctggcggctctatcaccaccggcgagttctactggaactggttcagacagcctcctggcaaaggactggaatggatgggagccattgccgccagcggcagcacaacatacagccctagcttcgagagccggaccagcatcagcagagacaccagcaagaatcagttcagcctgaagctgagcagcgtgacagccgccgatacagccgtgtattactgcggcagatcctttggagtggccgccgtgacaaccggccagaatagaggacagggcaccctggtcacagtgtctagcggtaccggcggaggcggatctggcggcggaggtagcggtggcggaggatctgaattcgacatccagatgacacagagcccctctagcctgtctgccagcgtgggagacagagtgaccatcacctgtagagccagccagagcatcagaaactacctgaactggtatcagcaaaagcccggcaaggcccctgagctgctgattcatgctgcaagcagcctccagagcggcgtgccaagcagattttctggcagcggcagcggaaccgacttcaccctgacaatatctagcctccagcctgaggacttcgccagctactactgccagcagagctacagcgcccctcctatcacctttggacagggcaccagactggaaatcaagctcgagatccagaaccctgatcctgccgtgtaccagctgcgggatagcaagagcagcgacaagagcgtgtgtctgttcaccgacttcgacagccagaccaacgtgtcccagagcaaggactccgacgtgtacatcaccgataagtgcgtgctggacatgcggagcatggacttcaagagcaactccgccgtggcctggtccaacaagtccgatttcgcctgcgccaacgccttcaacaacagcattatccccgaggacacattcttcccaagcagcgacgtgccctgcgacgtgaagctggtggaaaagagcttcgagacagacaccaacctgaacttccagaacctgagcgtgatcggcttcagaatcctgctgctgaaagtggccggctttaacctgctgatgaccctgcggctgtggtccagccgcgccaagagaagcggatctggcgtgaagcagaccctgaatttcgacctgctgaagctggctggcgacgtggaatccaacccaggccctactagtaccatggactggatttggcgcatccttttccttgtcggcgctgctaccggcgcccattccgggcccgaagtgcaactggttgaatccggtggcggcctggtgcaacccggcggatctctcagacttagctgtgccgcctccggcagaaccttcacaatgggatggtacaggcaggctccagggaaagagagagagttcgtcgccgccatctctctgtctcccacactggcctactacgccgactctgtgaaaggccggttcaccatctccagagataatagcaagaacaccgtggtgctgcaaatgaactctctgagagccgaggatacagccctgtactattgtgccgctgaccggaagtccgtgatgagcatcagacccgattactggggacagggcacactggtcacagtgtctagtggatccggcggcggaggatctggcggaggcggatctgggggcggaggctctttcgaacaggttcagctccagcagtctggacctggcctggtcaagcctagccagacactgtctctgacctgtgccatcagcggcgatagcgtgtcctctaatagagccgcctggaactggatcagacagagccctagcagaggactccagtggctgggcagaacctactaccgcagcaagtggtacaacgactacgccgtgtctctgcggagccggatcaccatcaatcccgtgaccagcaagaaccaggtggccctgcacatgaacagcgtgacccctgaagataccgccgtgtactactgtgccagagccggaattgtggtggtgcccggacctgagacattctactactacgaccacggcctggacgtgtggggccagggaacaacagtgactgtctcttctacgcgtgaggacctgaagaacgtgttcccacctgaggtggccgtgttcgagcctagcaaggccgagatcgcccacacccagaaagccaccctcgtgtgcctggctaccggcttctaccccgaccatgtggaactgtcttggtgggtcaacggcaaagaggtgcacagcggcgtgtgtaccgacccccagccactgaaagaacagcccgccctgaacgacagccggtactgcctgagcagcagactgagagtgtccgccaccttctggcagaacccccggaaccacttcagatgccaggtgcagttctacggcctgagcgagaacgacgagtggacccaggacagagccaagcccgtgacccagatcgtgtctgccgaagcctggggcagagccgattgcggcatcaccagcgccagctaccaccagggcgtgctgagcgccaccatcctgtacgagatcctgctgggcaaggccaccctgtacgccgtgctggtgtctgccctggtgctgatggctatggtcaagcggaaggacagccgggga

SEQ ID NO: 40134 - DNA, 2340 bp, synthetic construct
  source 1..2340: mol_type = other DNA
atggccttaccagtgaccgccttgctcctgccgctggccttgctgctccacgccgccaggccgcaggttcagctgcaagagtctggccctggcctggtcaagcctagccaaacactgagcctgacctgtaccgtgtctggcggctctatcaccaccggcgagttctactggaactggttcagacagcctcctggcaaaggactggaatggatgggagccattgccgccagcggcagcacaacatacagccctagcttcgagagccggaccagcatcagcagagacaccagcaagaatcagttcagcctgaagctgagcagcgtgacagccgccgatacagccgtgtattactgcggcagatcctttggagtggccgccgtgacaaccggccagaatagaggacagggcaccctggtcacagtgtctagcggtaccggcggaggcggatctggcggcggaggtagcggtggcggaggatctgaattcgacatccagatgacacagagcccctctagcctgtctgccagcgtgggagacagagtgaccatcacctgtagagccagccagagcatcagaaactacctgaactggtatcagcaaaagcccggcaaggcccctgagctgctgattcatgctgcaagcagcctccagagcggcgtgccaagcagattttctggcagcggcagcggaaccgacttcaccctgacaatatctagcctccagcctgaggacttcgccagctactactgccagcagagctacagcgcccctcctatcacctttggacagggcaccagactggaaatcaagctcgagatccagaaccctgatcctgccgtgtaccagctgcgggatagcaagagcagcgacaagagcgtgtgtctgttcaccgacttcgacagccagaccaacgtgtcccagagcaaggactccgacgtgtacatcaccgataagtgcgtgctggacatgcggagcatggacttcaagagcaactccgccgtggcctggtccaacaagtccgatttcgcctgcgccaacgccttcaacaacagcattatccccgaggacacattcttcccaagcagcgacgtgccctgcgacgtgaagctggtggaaaagagcttcgagacagacaccaacctgaacttccagaacctgagcgtgatcggcttcagaatcctgctgctgaaagtggccggctttaacctgctgatgaccctgcggctgtggtccagccgcgccaagagaagcggatctggcgtgaagcagaccctgaatttcgacctgctgaagctggctggcgacgtggaatccaacccaggccctactagtaccatggactggatttggcgcatccttttccttgtcggcgctgctaccggcgcccattccttcgaacaggttcagctccagcagtctggacctggcctggtcaagcctagccagacactgtctctgacctgtgccatcagcggcgatagcgtgtcctctaatagagccgcctggaactggatcagacagagccctagcagaggactccagtggctgggcagaacctactaccgcagcaagtggtacaacgactacgccgtgtctctgcggagccggatcaccatcaatcccgtgaccagcaagaaccaggtggccctgcacatgaacagcgtgacccctgaagataccgccgtgtactactgtgccagagccggaattgtggtggtgcccggacctgagacattctactactacgaccacggcctggacgtgtggggccagggaacaacagtgactgtctcttctacgcgtgaggacctgaagaacgtgttcccacctgaggtggccgtgttcgagcctagcaaggccgagatcgcccacacccagaaagccaccctcgtgtgcctggctaccggcttctaccccgaccatgtggaactgtcttggtgggtcaacggcaaagaggtgcacagcggcgtgtgtaccgacccccagccactgaaagaacagcccgccctgaacgacagccggtactgcctgagcagcagactgagagtgtccgccaccttctggcagaacccccggaaccacttcagatgccaggtgcagttctacggcctgagcgagaacgacgagtggacccaggacagagccaagcccgtgacccagatcgtgtctgccgaagcctggggcagagccgattgcggcatcaccagcgccagctaccaccagggcgtgctgagcgccaccatcctgtacgagatcctgctgggcaaggccaccctgtacgccgtgctggtgtctgccctggtgctgatggctatggtcaagcggaaggacagccgggga

SEQ ID NO: 40135 - DNA, 2739 bp, synthetic construct
  source 1..2739: mol_type = other DNA
atggccttaccagtgaccgccttgctcctgccgctggccttgctgctccacgccgccaggccggaagtgcagctggttgaatctggcggaggactggttcaggctggcggatctctgagactgtcttgtgccgccagcggcagaacctttagcatgggctggtttagacaggcccctggcaaagagagagagttcgtcgccgccatcacatactctggcggcagcccttactacgccgactctgtgaagggcagattcaccatcagccgggacaacgccaagaacaccgtgtacctccagatgaacagcctgaagcctgaggacaccgccgtgtactactgcgccgccaatccaacatacggcagcgactggaacgccgagaattggggccagggaacccaagtgacagtgtctagcggtaccggcggaggcggatctggcggcggaggtagcggtggcggaggatctgaattcgacatccagatgacacagagcccctctagcctgtctgccagcgtgggagacagagtgaccatcacctgtagagccagccagagcatcagaaactacctgaactggtatcagcaaaagcccggcaaggcccctgagctgctgattcatgctgcaagcagcctccagagcggcgtgccaagcagattttctggcagcggcagcggaaccgacttcaccctgacaatatctagcctccagcctgaggacttcgccagctactactgccagcagagctacagcgcccctcctatcacctttggacagggcaccagactggaaatcaagctcgaggacctgaagaacgtgttcccacctgaggtggccgtgttcgagcctagcgaggccgagatcagccacacccagaaagccaccctcgtgtgcctggctaccggcttctaccccgaccatgtggaactgtcttggtgggtcaacggcaaagaggtgcacagcggcgtgtgtaccgacccccagccactgaaagaacagcccgccctgaacgacagccggtactgcctgagcagcagactgagagtgtccgccaccttctggcagaacccccggaaccacttcagatgccaggtgcagttctacggcctgagcgagaacgacgagtggacccaggacagagccaagcccgtgacccagatcgtgtctgccgaagcctggggcagagccgattgcggctttaccagcgagagctaccagcagggcgtgctgagcgccaccatcctgtacgagatcctgctgggcaaggccaccctgtacgccgtgctggtgtctgccctggtgctgatggctatggtcaagcggaaggacagccggggaagggccaagcgatctggatctggagcaacaaacttctcactactcaaacaagcaggtgacgtggaggagaatcccgggcctactagtaccatggactggatttggcgcatccttttccttgtcggcgctgctaccggcgcccattccgggccccaggtgcagctccaagaaagcggacccggactggttaagccctctcagaccctgtctctgacctgcacagttagcggagccagcattaccacaggcgagtattattggaattggtttcggcagccaccaggcaaggggcttgagtggatgggtgctattgctgcctctggcagcaccacctactctcccagctttgagagcagaacctccatcagccgggacacctccaaaaaccagttctctctgaagctgtcctccgtgaccgctgctgacaccgccgtctattattgtggccggtctttcggcgtggcagctgtgaccacaggacagaacagaggccagggaacacttgtgaccgtgtcctctggatccggcggcggaggatctggcggaggcggatctgggggcggaggctctttcgaacaggttcagctccagcagtctggacctggcctggtcaagcctagccagacactgtctctgacctgtgccatcagcggcgatagcgtgtcctctaatagagccgcctggaactggatcagacagagccctagcagaggactccagtggctgggcagaacctactaccgcagcaagtggtacaacgactacgccgtgtctctgcggagccggatcaccatcaatcccgtgaccagcaagaaccaggtggccctgcacatgaacagcgtgacccctgaagataccgccgtgtactactgtgccagagccggaattgtggtggtgcccggacctgagacattctactactacgaccacggcctggacgtgtggggccagggaacaacagtgactgtctcttctacgcgtatccagaaccctgatcctgccgtgtaccagctgcgggatagcaagagcagcgacaagagcgtgtgtctgttcaccgacttcgacagccagaccaacgtgtcccagagcaaggactccgacgtgtacatcaccgataagtgcgtgctggacatgcggagcatggacttcaagagcaactccgccgtggcctggtccaacaagtccgatttcgcctgcgccaacgccttcaacaacagcattatccccgaggacacattcttcccaagccccgagagcagctgcgacgtgaagctggtggaaaagagcttcgagacagacaccaacctgaacttccagaacctgagcgtgatcggcttcagaatcctgctgctgaaagtggccggctttaacctgctgatgaccctgcggctgtggtccagc

SEQ ID NO: 40136 - DNA, 2760 bp, synthetic construct
  source 1..2760: mol_type = other DNA
atggccttaccagtgaccgccttgctcctgccgctggccttgctgctccacgccgccaggccggaagtgcagctggttgaatctggcggaggactggttcaggctggcggatctctgagactgtcttgtgccgccagcggcagaacctttagcatgggctggtttagacaggcccctggcaaagagagagagttcgtcgccgccatcacatactctggcggcagcccttactacgccgactctgtgaagggcagattcaccatcagccgggacaacgccaagaacaccgtgtacctccagatgaacagcctgaagcctgaggacaccgccgtgtactactgcgccgccaatccaacatacggcagcgactggaacgccgagaattggggccagggaacccaagtgacagtgtctagcggtaccggcggaggcggatctggcggcggaggtagcggtggcggaggatctgaattcgacatccagatgacacagagcccctctagcctgtctgccagcgtgggagacagagtgaccatcacctgtagagccagccagagcatcagaaactacctgaactggtatcagcaaaagcccggcaaggcccctgagctgctgattcatgctgcaagcagcctccagagcggcgtgccaagcagattttctggcagcggcagcggaaccgacttcaccctgacaatatctagcctccagcctgaggacttcgccagctactactgccagcagagctacagcgcccctcctatcacctttggacagggcaccagactggaaatcaagctcgagatccagaaccctgatcctgccgtgtaccagctgcgggatagcaagagcagcgacaagagcgtgtgtctgttcaccgacttcgacagccagaccaacgtgtcccagagcaaggactccgacgtgtacatcaccgataagtgcgtgctggacatgcggagcatggacttcaagagcaactccgccgtggcctggtccaacaagtccgatttcgcctgcgccaacgccttcaacaacagcattatccccgaggacacattcttcccaagcagcgacgtgccctgcgacgtgaagctggtggaaaagagcttcgagacagacaccaacctgaacttccagaacctgagcgtgatcggcttcagaatcctgctgctgaaagtggccggctttaacctgctgatgaccctgcggctgtggtccagccgcgccaagagaagcggatctggcgtgaagcagaccctgaatttcgacctgctgaagctggctggcgacgtggaatccaacccaggccctactagtaccatggactggatttggcgcatccttttccttgtcggcgctgctaccggcgcccattccgggccccaggtgcagctggttgaatctggcggaggactggttcagcctggcggatctctgagactgtcttgtgccgccagcggcaacatcaacagcagaaactgcatgggctggttcagacaggcccctggcaagggaagagaaggcgtggcagctatcggccaagtgaccggcagaacctactacgtggacagcgtgaagggcagattcaccatcagcctggacaacagcaagaacaccctgtacctccagatgaacagcctgagagccgaggacaccgccgtgtactattgtgctgctgcccctggctgtctgctgtctgcacttagaagcgccgactacagaaactggggccagggcacactggtcaccgtttcttctggatccggcggcggaggatctggcggaggcggatctgggggcggaggctctttcgaacaggttcagctccagcagtctggacctggcctggtcaagcctagccagacactgtctctgacctgtgccatcagcggcgatagcgtgtcctctaatagagccgcctggaactggatcagacagagccctagcagaggactccagtggctgggcagaacctactaccgcagcaagtggtacaacgactacgccgtgtctctgcggagccggatcaccatcaatcccgtgaccagcaagaaccaggtggccctgcacatgaacagcgtgacccctgaagataccgccgtgtactactgtgccagagccggaattgtggtggtgcccggacctgagacattctactactacgaccacggcctggacgtgtggggccagggaacaacagtgactgtctcttctacgcgtgaggacctgaagaacgtgttcccacctgaggtggccgtgttcgagcctagcaaggccgagatcgcccacacccagaaagccaccctcgtgtgcctggctaccggcttctaccccgaccatgtggaactgtcttggtgggtcaacggcaaagaggtgcacagcggcgtgtgtaccgacccccagccactgaaagaacagcccgccctgaacgacagccggtactgcctgagcagcagactgagagtgtccgccaccttctggcagaacccccggaaccacttcagatgccaggtgcagttctacggcctgagcgagaacgacgagtggacccaggacagagccaagcccgtgacccagatcgtgtctgccgaagcctggggcagagccgattgcggcatcaccagcgccagctaccaccagggcgtgctgagcgccaccatcctgtacgagatcctgctgggcaaggccaccctgtacgccgtgctggtgtctgccctggtgctgatggctatggtcaagcggaaggacagccgggga

SEQ ID NO: 40137 - DNA, 2748 bp, synthetic construct
  source 1..2748: mol_type = other DNA
atggccttaccagtgaccgccttgctcctgccgctggccttgctgctccacgccgccaggccggaagtgcagctggttgaatctggcggaggactggttcaggctggcggatctctgagactgtcttgtgccgccagcggcagaacctttagcatgggctggtttagacaggcccctggcaaagagagagagttcgtcgccgccatcacatactctggcggcagcccttactacgccgactctgtgaagggcagattcaccatcagccgggacaacgccaagaacaccgtgtacctccagatgaacagcctgaagcctgaggacaccgccgtgtactactgcgccgccaatccaacatacggcagcgactggaacgccgagaattggggccagggaacccaagtgacagtgtctagcggtaccggcggaggcggatctggcggcggaggtagcggtggcggaggatctgaattcgacatccagatgacacagagcccctctagcctgtctgccagcgtgggagacagagtgaccatcacctgtagagccagccagagcatcagaaactacctgaactggtatcagcaaaagcccggcaaggcccctgagctgctgattcatgctgcaagcagcctccagagcggcgtgccaagcagattttctggcagcggcagcggaaccgacttcaccctgacaatatctagcctccagcctgaggacttcgccagctactactgccagcagagctacagcgcccctcctatcacctttggacagggcaccagactggaaatcaagctcgaggacctgaagaacgtgttcccacctgaggtggccgtgttcgagcctagcgaggccgagatcagccacacccagaaagccaccctcgtgtgcctggctaccggcttctaccccgaccatgtggaactgtcttggtgggtcaacggcaaagaggtgcacagcggcgtgtgtaccgacccccagccactgaaagaacagcccgccctgaacgacagccggtactgcctgagcagcagactgagagtgtccgccaccttctggcagaacccccggaaccacttcagatgccaggtgcagttctacggcctgagcgagaacgacgagtggacccaggacagagccaagcccgtgacccagatcgtgtctgccgaagcctggggcagagccgattgcggctttaccagcgagagctaccagcagggcgtgctgagcgccaccatcctgtacgagatcctgctgggcaaggccaccctgtacgccgtgctggtgtctgccctggtgctgatggctatggtcaagcggaaggacagccggggaagggccaagcgatctggatctggagcaacaaacttctcactactcaaacaagcaggtgacgtggaggagaatcccgggcctactagtaccatggactggatttggcgcatccttttccttgtcggcgctgctaccggcgcccattccgggccccaggtgcagctggttgaatctggcggaggactggttcagcctggcggatctctgagactgtcttgtgccgccagcggcaacatcaacagcagaaactgcatgggctggttcagacaggcccctggcaagggaagagaaggcgtggcagctatcggccaagtgaccggcagaacctactacgtggacagcgtgaagggcagattcaccatcagcctggacaacagcaagaacaccctgtacctccagatgaacagcctgagagccgaggacaccgccgtgtactattgtgctgctgcccctggctgtctgctgtctgcacttagaagcgccgactacagaaactggggccagggcacactggtcaccgtttcttctggatccggcggcggaggatctggcggaggcggatctgggggcggaggctctttcgaacaggttcagctccagcagtctggacctggcctggtcaagcctagccagacactgtctctgacctgtgccatcagcggcgatagcgtgtcctctaatagagccgcctggaactggatcagacagagccctagcagaggactccagtggctgggcagaacctactaccgcagcaagtggtacaacgactacgccgtgtctctgcggagccggatcaccatcaatcccgtgaccagcaagaaccaggtggccctgcacatgaacagcgtgacccctgaagataccgccgtgtactactgtgccagagccggaattgtggtggtgcccggacctgagacattctactactacgaccacggcctggacgtgtggggccagggaacaacagtgactgtctcttctacgcgtatccagaaccctgatcctgccgtgtaccagctgcgggatagcaagagcagcgacaagagcgtgtgtctgttcaccgacttcgacagccagaccaacgtgtcccagagcaaggactccgacgtgtacatcaccgataagtgcgtgctggacatgcggagcatggacttcaagagcaactccgccgtggcctggtccaacaagtccgatttcgcctgcgccaacgccttcaacaacagcattatccccgaggacacattcttcccaagccccgagagcagctgcgacgtgaagctggtggaaaagagcttcgagacagacaccaacctgaacttccagaacctgagcgtgatcggcttcagaatcctgctgctgaaagtggccggctttaacctgctgatgaccctgcggctgtggtccagc

SEQ ID NO: 40138 - DNA, 2748 bp, synthetic construct
  source 1..2748: mol_type = other DNA
atggccttaccagtgaccgccttgctcctgccgctggccttgctgctccacgccgccaggccggaagtgcaactggttgaatccggtggcggcctggtgcaagcaggcggatctctcagacttagctgtgccgcctccggcagaaccttcacaatgggatggtttaggcaggctccagggaaagagagagagttcgtcgccgccatctctctgtctcccacactggcctactacgccgactctgtgaaaggccggttcaccatctccagagataatgccaagaacaccgtggtgctgcaaatgaactctctgaaacccgaggatacagccctgtactattgtgccgctgaccggaagtccgtgatgagcatcagacccgattactggggacagggcacacaagtcacagtgtcctctggtaccggcggaggcggatctggcggcggaggtagcggtggcggaggatctgaattcgacatccagatgacacagagcccctctagcctgtctgccagcgtgggagacagagtgaccatcacctgtagagccagccagagcatcagaaactacctgaactggtatcagcaaaagcccggcaaggcccctgagctgctgattcatgctgcaagcagcctccagagcggcgtgccaagcagattttctggcagcggcagcggaaccgacttcaccctgacaatatctagcctccagcctgaggacttcgccagctactactgccagcagagctacagcgcccctcctatcacctttggacagggcaccagactggaaatcaagctcgaggacctgaagaacgtgttcccacctgaggtggccgtgttcgagcctagcgaggccgagatcagccacacccagaaagccaccctcgtgtgcctggctaccggcttctaccccgaccatgtggaactgtcttggtgggtcaacggcaaagaggtgcacagcggcgtgtgtaccgacccccagccactgaaagaacagcccgccctgaacgacagccggtactgcctgagcagcagactgagagtgtccgccaccttctggcagaacccccggaaccacttcagatgccaggtgcagttctacggcctgagcgagaacgacgagtggacccaggacagagccaagcccgtgacccagatcgtgtctgccgaagcctggggcagagccgattgcggctttaccagcgagagctaccagcagggcgtgctgagcgccaccatcctgtacgagatcctgctgggcaaggccaccctgtacgccgtgctggtgtctgccctggtgctgatggctatggtcaagcggaaggacagccggggaagggccaagcgatctggatctggagcaacaaacttctcactactcaaacaagcaggtgacgtggaggagaatcccgggcctactagtaccatggactggatttggcgcatccttttccttgtcggcgctgctaccggcgcccattccgggccccaggtgcagctggttgaatctggcggaggactggttcagcctggcggatctctgagactgtcttgtgccgccagcggcaacatcaacagcagaaactgcatgggctggttcagacaggcccctggcaagggaagagaaggcgtggcagctatcggccaagtgaccggcagaacctactacgtggacagcgtgaagggcagattcaccatcagcctggacaacagcaagaacaccctgtacctccagatgaacagcctgagagccgaggacaccgccgtgtactattgtgctgctgcccctggctgtctgctgtctgcacttagaagcgccgactacagaaactggggccagggcacactggtcaccgtttcttctggatccggcggcggaggatctggcggaggcggatctgggggcggaggctctttcgaacaggttcagctccagcagtctggacctggcctggtcaagcctagccagacactgtctctgacctgtgccatcagcggcgatagcgtgtcctctaatagagccgcctggaactggatcagacagagccctagcagaggactccagtggctgggcagaacctactaccgcagcaagtggtacaacgactacgccgtgtctctgcggagccggatcaccatcaatcccgtgaccagcaagaaccaggtggccctgcacatgaacagcgtgacccctgaagataccgccgtgtactactgtgccagagccggaattgtggtggtgcccggacctgagacattctactactacgaccacggcctggacgtgtggggccagggaacaacagtgactgtctcttctacgcgtatccagaaccctgatcctgccgtgtaccagctgcgggatagcaagagcagcgacaagagcgtgtgtctgttcaccgacttcgacagccagaccaacgtgtcccagagcaaggactccgacgtgtacatcaccgataagtgcgtgctggacatgcggagcatggacttcaagagcaactccgccgtggcctggtccaacaagtccgatttcgcctgcgccaacgccttcaacaacagcattatccccgaggacacattcttcccaagccccgagagcagctgcgacgtgaagctggtggaaaagagcttcgagacagacaccaacctgaacttccagaacctgagcgtgatcggcttcagaatcctgctgctgaaagtggccggctttaacctgctgatgaccctgcggctgtggtccagc

SEQ ID NO: 40139 - DNA, 2760 bp, synthetic construct
  source 1..2760: mol_type = other DNA
atggccttaccagtgaccgccttgctcctgccgctggccttgctgctccacgccgccaggccgcaggttcagctgcaagagtctggccctggcctggtcaagcctagccaaacactgagcctgacctgtaccgtgtctggcggctctatcaccaccggcgagttctactggaactggttcagacagcctcctggcaaaggactggaatggatgggagccattgccgccagcggcagcacaacatacagccctagcttcgagagccggaccagcatcagcagagacaccagcaagaatcagttcagcctgaagctgagcagcgtgacagccgccgatacagccgtgtattactgcggcagatcctttggagtggccgccgtgacaaccggccagaatagaggacagggcaccctggtcacagtgtctagcggtaccggcggaggcggatctggcggcggaggtagcggtggcggaggatctgaattcgacatccagatgacacagagcccctctagcctgtctgccagcgtgggagacagagtgaccatcacctgtagagccagccagagcatcagaaactacctgaactggtatcagcaaaagcccggcaaggcccctgagctgctgattcatgctgcaagcagcctccagagcggcgtgccaagcagattttctggcagcggcagcggaaccgacttcaccctgacaatatctagcctccagcctgaggacttcgccagctactactgccagcagagctacagcgcccctcctatcacctttggacagggcaccagactggaaatcaagctcgaggacctgaagaacgtgttcccacctgaggtggccgtgttcgagcctagcgaggccgagatcagccacacccagaaagccaccctcgtgtgcctggctaccggcttctaccccgaccatgtggaactgtcttggtgggtcaacggcaaagaggtgcacagcggcgtgtgtaccgacccccagccactgaaagaacagcccgccctgaacgacagccggtactgcctgagcagcagactgagagtgtccgccaccttctggcagaacccccggaaccacttcagatgccaggtgcagttctacggcctgagcgagaacgacgagtggacccaggacagagccaagcccgtgacccagatcgtgtctgccgaagcctggggcagagccgattgcggctttaccagcgagagctaccagcagggcgtgctgagcgccaccatcctgtacgagatcctgctgggcaaggccaccctgtacgccgtgctggtgtctgccctggtgctgatggctatggtcaagcggaaggacagccggggaagggccaagcgatctggatctggagcaacaaacttctcactactcaaacaagcaggtgacgtggaggagaatcccgggcctactagtaccatggactggatttggcgcatccttttccttgtcggcgctgctaccggcgcccattccgggccccaggtgcagctggttgaatctggcggaggactggttcagcctggcggatctctgagactgtcttgtgccgccagcggcaacatcaacagcagaaactgcatgggctggttcagacaggcccctggcaagggaagagaaggcgtggcagctatcggccaagtgaccggcagaacctactacgtggacagcgtgaagggcagattcaccatcagcctggacaacagcaagaacaccctgtacctccagatgaacagcctgagagccgaggacaccgccgtgtactattgtgctgctgcccctggctgtctgctgtctgcacttagaagcgccgactacagaaactggggccagggcacactggtcaccgtttcttctggatccggcggcggaggatctggcggaggcggatctgggggcggaggctctttcgaacaggttcagctccagcagtctggacctggcctggtcaagcctagccagacactgtctctgacctgtgccatcagcggcgatagcgtgtcctctaatagagccgcctggaactggatcagacagagccctagcagaggactccagtggctgggcagaacctactaccgcagcaagtggtacaacgactacgccgtgtctctgcggagccggatcaccatcaatcccgtgaccagcaagaaccaggtggccctgcacatgaacagcgtgacccctgaagataccgccgtgtactactgtgccagagccggaattgtggtggtgcccggacctgagacattctactactacgaccacggcctggacgtgtggggccagggaacaacagtgactgtctcttctacgcgtatccagaaccctgatcctgccgtgtaccagctgcgggatagcaagagcagcgacaagagcgtgtgtctgttcaccgacttcgacagccagaccaacgtgtcccagagcaaggactccgacgtgtacatcaccgataagtgcgtgctggacatgcggagcatggacttcaagagcaactccgccgtggcctggtccaacaagtccgatttcgcctgcgccaacgccttcaacaacagcattatccccgaggacacattcttcccaagccccgagagcagctgcgacgtgaagctggtggaaaagagcttcgagacagacaccaacctgaacttccagaacctgagcgtgatcggcttcagaatcctgctgctgaaagtggccggctttaacctgctgatgaccctgcggctgtggtccagc

SEQ ID NO: 40140 - DNA, 1809 bp, synthetic construct
  source 1..1809: mol_type = other DNA
atggccttaccagtgaccgccttgctcctgccgctggccttgctgctccacgccgccaggccggacatccagatgacacagagccctagcagcctgtctgccagcgtgggagacagagtgaccatcacatgcaaggccagcgaccacatcaacaactggctggcctggtatcagcagaagcctggacaggcccctaagctgctgatctacggcgctaccacactggaaacaggcgtgcccagcagattttctggcagcggctctggcaccgactacaccctgacaatatccagcctccagcctgaggacttcgccacctactactgtcagcagagctggaacaccccttggacattcggccagggcaccaagctggaaatcaagagactcgagggacagcctaaggccaatcctaccgtgacactgttccctccaagcagcgaagaactccaggccaacaaggccacacttgtgtgcctgatctccgacttctaccctggggctgtgacagtggcttggaaggccgatggatctcctgtgaaagccggcgtggaaaccaccaagccatccaagcagagcaacaacaaatacgccgccagctcctacctgagcctgacacctgagcagtggaagtcccacagatcctacagctgccaagtgacccacgaaggcagcaccgtggaaaagacagtggcccctacagagtgcagcggcagagccgattgcggctttaccagcgagagctaccagcagggcgtgctgagcgccaccatcctgtacgagatcctgctgggcaaggccaccctgtacgccgtgctggtgtctgccctggtgctgatggctatggtcaagcggaaggacagccggggaagggccaagcgatctggatctggagcaacaaacttctcactactcaaacaagcaggtgacgtggaggagaatcccgggcctactagtatggactggatttggcgcatccttttccttgtcggcgctgctaccggcgcgcattccttcgaacaagttcagcttcaacagcctggcgctgagctggtcaaacctggcgcttctgtgaagatgagctgcaaagccagcggctacgccttcagcagctactggatcaactggatgaagcagaaacccggccagggactcgaatggatcggccaaatctatcccggcgacggcgacaccaactacaacggcaagttcaagggcagagccacactgaccgccgatacctctagcagcacagcctacatgcagctgagcagcctgaccagcgaagatagcgccgtgtacttctgtgcccggtccatcacaacagtcgtgggctgcgctatggactattggggccagggaacaagcgtgaccgtgtctagtacgcgtatccagaaccctgatcctgccgtgtaccagctgcgggatagcaagagcagcgacaagagcgtgtgtctgttcaccgacttcgacagccagaccaacgtgtcccagagcaaggactccgacgtgtacatcaccgataagaccgtgctggacatgcggagcatggacttcaagagcaactccgccgtggcctggtccaacaagtccgatttcgcctgcgccaacgccttcaacaacagcattatccccgaggacacattcttcccaagccccgagagcagctgcgacgtgaagctggtggaaaagagcttcgagacagacaccaacctgaacttccagaacctgagcgtgatcggcttcagaatcctgctgctgaaagtggccggctttaacctgctgatgaccctgcggctgtggtccagc

SEQ ID NO: 40141 - DNA, 1935 bp, synthetic construct
  source 1..1935: mol_type = other DNA
atggccttaccagtgaccgccttgctcctgccgctggccttgctgctccacgccgccaggccggacatccagatgacacagagccctagcagcctgtctgccagcgtgggagacagagtgaccatcacatgcaaggccagcgaccacatcaacaactggctggcctggtatcagcagaagcctggacaggcccctaagctgctgatctacggcgctaccacactggaaacaggcgtgcccagcagattttctggcagcggctctggcaccgactacaccctgacaatatccagcctccagcctgaggacttcgccacctactactgtcagcagagctggaacaccccttggacattcggccagggcaccaagctggaaatcaagagactcgaggacctgaagaacgtgttcccacctgaggtggccgtgttcgagcctagcgaggccgagatcagccacacccagaaagccaccctcgtgtgcctggctaccggcttctaccccgaccatgtggaactgtcttggtgggtcaacggcaaagaggtgcacagcggcgtgtctaccgacccccagccactgaaagaacagcccgccctgaacgacagccggtactgcctgagcagcagactgagagtgtccgccaccttctggcagaacccccggaaccacttcagatgccaggtgcagttctacggcctgagcgagaacgacgagtggacccaggacagagccaagcccgtgacccagatcgtgtctgccgaagcctggggcagagccgattgcggctttaccagcgagagctaccagcagggcgtgctgagcgccaccatcctgtacgagatcctgctgggcaaggccaccctgtacgccgtgctggtgtctgccctggtgctgatggctatggtcaagcggaaggacagccggggaagggccaagcgatctggatctggagcaacaaacttctcactactcaaacaagcaggtgacgtggaggagaatcccgggcctactagtatggactggatttggcgcatccttttccttgtcggcgctgctaccggcgcgcattccttcgaacaagttcagcttcaacagcctggcgctgagctggtcaaacctggcgcttctgtgaagatgagctgcaaagccagcggctacgccttcagcagctactggatcaactggatgaagcagaaacccggccagggactcgaatggatcggccaaatctatcccggcgacggcgacaccaactacaacggcaagttcaagggcagagccacactgaccgccgatacctctagcagcacagcctacatgcagctgagcagcctgaccagcgaagatagcgccgtgtacttctgtgcccggtccatcacaacagtcgtgggctgcgctatggactattggggccagggaacaagcgtgaccgtgtctagtacgcgtgcctctacaaagggaccctccgtgtttcctctggctcccagcagcaagtctacaagcggaggaacagccgctctgggctgcctggtcaaggattactttcccgagcctgtgaccgtgtcctggaatagcggagcactgacaagcggcgtgcacacctttccagccgtgctgcaaagcagcggcctgtactctctgagcagcgtggtcacagtgcctagctctagcctgggcacccagacctacatctgcaatgtgaaccacaagcctagcaacaccaaggtggacaagagagtggaacccaagagctgtatccccgaggacacattcttcccaagccccgagagcagctgcgacgtgaagctggtggaaaagagcttcgagacagacaccaacctgaacttccagaacctgagcgtgatcggcttcagaatcctgctgctgaaagtggccggctttaacctgctgatgaccctgcggctgtggtccagc

SEQ ID NO: 40142 - DNA, 1959 bp, synthetic construct
  source 1..1959: mol_type = other DNA
atggccttaccagtgaccgccttgctcctgccgctggccttgctgctccacgccgccaggccggacatccagatgacacagagccctagcagcctgtctgccagcgtgggagacagagtgaccatcacatgcaaggccagcgaccacatcaacaactggctggcctggtatcagcagaagcctggacaggcccctaagctgctgatctacggcgctaccacactggaaacaggcgtgcccagcagattttctggcagcggctctggcaccgactacaccctgacaatatccagcctccagcctgaggacttcgccacctactactgtcagcagagctggaacaccccttggacattcggccagggcaccaagctggaaatcaagagactcgaggacctgaagaacgtgttcccacctgaggtggccgtgttcgagcctagcgaggccgagatcagccacacccagaaagccaccctcgtgtgcctggctaccggcttctaccccgaccatgtggaactgtcttggtgggtcaacggcaaagaggtgcacagcggcgtgtctaccgacccccagccactgaaagaacagcccgccctgaacgacagccggtactgcctgagcagcagactgagagtgtccgccaccttctggcagaacccccggaaccacttcagatgccaggtgcagttctacggcctgagcgagaacgacgagtggacccaggacagagccaagcccgtgacccagatcgtgtctgccgaagcctggggcagagccgattgcggctttaccagcgagagctaccagcagggcgtgctgagcgccaccatcctgtacgagatcctgctgggcaaggccaccctgtacgccgtgctggtgtctgccctggtgctgatggctatggtcaagcggaaggacagccggggaagggccaagcgatctggatctggagcaacaaacttctcactactcaaacaagcaggtgacgtggaggagaatcccgggcctactagtatggactggatttggcgcatccttttccttgtcggcgctgctaccggcgcgcattccttcgaacaagttcagcttcaacagcctggcgctgagctggtcaaacctggcgcttctgtgaagatgagctgcaaagccagcggctacgccttcagcagctactggatcaactggatgaagcagaaacccggccagggactcgaatggatcggccaaatctatcccggcgacggcgacaccaactacaacggcaagttcaagggcagagccacactgaccgccgatacctctagcagcacagcctacatgcagctgagcagcctgaccagcgaagatagcgccgtgtacttctgtgcccggtccatcacaacagtcgtgggctgcgctatggactattggggccagggaacaagcgtgaccgtgtctagtacgcgtgcctctacaaagggaccctccgtgtttcctctggctcccagcagcaagtctacaagcggaggaacagccgctctgggctgcctggtcaaggattactttcccgagcctgtgaccgtgtcctggaatagcggagcactgacaagcggcgtgcacacctttccagccgtgctgcaaagcagcggcctgtactctctgagcagcgtggtcacagtgcctagctctagcctgggcacccagacctacatctgcaatgtgaaccacaagcctagcaacaccaaggtggacaagagagtggaacccaagagctgtgaagtgaaaaccgactccaccgaccacgtgaagcccaaagagacagagaacaccaagcagcccagcaagagctgccacaagcccaaggccatcgtgcacaccgagaaagtgaacatgatgagcctgaccgtgctgggcctgcggatgctgttcgccaaaaccgtggccgtgaacttcctgctgaccgccaagctgttcttcctc

SEQ ID NO: 40143 - DNA, 1929 bp, synthetic construct
  source 1..1929: mol_type = other DNA
atggccttaccagtgaccgccttgctcctgccgctggccttgctgctccacgccgccaggccggacatccagatgacacagagccctagcagcctgtctgccagcgtgggagacagagtgaccatcacatgcaaggccagcgaccacatcaacaactggctggcctggtatcagcagaagcctggacaggcccctaagctgctgatctacggcgctaccacactggaaacaggcgtgcccagcagattttctggcagcggctctggcaccgactacaccctgacaatatccagcctccagcctgaggacttcgccacctactactgtcagcagagctggaacaccccttggacattcggccagggcaccaagctggaaatcaagagactcgaggccgacgtgtcccccaagcctaccatcttcctgccctctatcgccgagacaaagctccagaaggccggcacctacctgtgcctgctggaaaagttcttcccagatgtgattaagatccactggcaggaaaagaagtccaacaccatcctgggcagccaggaaggcaacaccatgaagaccaacgacacctacatgaagttcagctggctgaccgtgcccgagaagtccctggacaaagaacacagatgcatcgtgcggcacgaaaacaacaagaacggcgtggaccaggaaatcatcttcccacccatcaagaccgatgtgattacaatggaccccaaggacaactgctccaaggacgccaacgataccctgctgctccagctgaccaacaccagcgcctactacatgtacttgttgctgctgctgaagtccgtggtgtacttcgccatcatcacatgctgcctgctgcggagaaccgccttctgctgcaacggcgagaagtctagggccaagcgatctggatctggagcaacaaacttctcactactcaaacaagcaggtgacgtggaggagaatcccgggcctactagtatggactggatttggcgcatccttttccttgtcggcgctgctaccggcgcgcattccttcgaacaagttcagcttcaacagcctggcgctgagctggtcaaacctggcgcttctgtgaagatgagctgcaaagccagcggctacgccttcagcagctactggatcaactggatgaagcagaaacccggccagggactcgaatggatcggccaaatctatcccggcgacggcgacaccaactacaacggcaagttcaagggcagagccacactgaccgccgatacctctagcagcacagcctacatgcagctgagcagcctgaccagcgaagatagcgccgtgtacttctgtgcccggtccatcacaacagtcgtgggctgcgctatggactattggggccagggaacaagcgtgaccgtgtctagtacgcgtgcctctacaaagggaccctccgtgtttcctctggctcccagcagcaagtctacaagcggaggaacagccgctctgggctgcctggtcaaggattactttcccgagcctgtgaccgtgtcctggaatagcggagcactgacaagcggcgtgcacacctttccagccgtgctgcaaagcagcggcctgtactctctgagcagcgtggtcacagtgcctagctctagcctgggcacccagacctacatctgcaatgtgaaccacaagcctagcaacaccaaggtggacaagagagtggaacccaagagctgtgaagtgaaaaccgactccaccgaccacgtgaagcccaaagagacagagaacaccaagcagcccagcaagagctgccacaagcccaaggccatcgtgcacaccgagaaagtgaacatgatgagcctgaccgtgctgggcctgcggatgctgttcgccaaaaccgtggccgtgaacttcctgctgaccgccaagctgttcttcctc

SEQ ID NO: 40144 - DNA, 1890 bp, synthetic construct
  source 1..1890: mol_type = other DNA
atggccttaccagtgaccgccttgctcctgccgctggccttgctgctccacgccgccaggccggacatccagatgacacagagccctagcagcctgtctgccagcgtgggagacagagtgaccatcacatgcaaggccagcgaccacatcaacaactggctggcctggtatcagcagaagcctggacaggcccctaagctgctgatctacggcgctaccacactggaaacaggcgtgcccagcagattttctggcagcggctctggcaccgactacaccctgacaatatccagcctccagcctgaggacttcgccacctactactgtcagcagagctggaacaccccttggacattcggccagggcaccaagctggaaatcaagagactcgagggacagcctaaggccaatcctaccgtgacactgttccctccaagcagcgaagaactccaggccaacaaggccacacttgtgtgcctgatctccgacttctaccctggggctgtgacagtggcttggaaggccgatggatctcctgtgaaagccggcgtggaaaccaccaagccatccaagcagagcaacaacaaatacgccgccagctcctacctgagcctgacacctgagcagtggaagtcccacagatcctacagctgccaagtgacccacgaaggcagcaccgtggaaaagacagtggcccctacagagtgcagccccatcaagaccgatgtgattacaatggaccccaaggacaactgctccaaggacgccaacgataccctgctgctccagctgaccaacaccagcgcctactacatgtacttgttgctgctgctgaagtccgtggtgtacttcgccatcatcacatgctgcctgctgcggagaaccgccttctgctgcaacggcgagaagtctagggccaagcgatctggatctggagcaacaaacttctcactactcaaacaagcaggtgacgtggaggagaatcccgggcctactagtatggactggatttggcgcatccttttccttgtcggcgctgctaccggcgcgcattccttcgaacaagttcagcttcaacagcctggcgctgagctggtcaaacctggcgcttctgtgaagatgagctgcaaagccagcggctacgccttcagcagctactggatcaactggatgaagcagaaacccggccagggactcgaatggatcggccaaatctatcccggcgacggcgacaccaactacaacggcaagttcaagggcagagccacactgaccgccgatacctctagcagcacagcctacatgcagctgagcagcctgaccagcgaagatagcgccgtgtacttctgtgcccggtccatcacaacagtcgtgggctgcgctatggactattggggccagggaacaagcgtgaccgtgtctagtacgcgtagccagcctcacaccaagcccagcgtgttcgtgatgaagaacggcaccaacgtggcctgcctcgtgaaagagttctaccccaaggacatcaggatcaacctggtgtccagcaagaagatcaccgagttcgaccccgccatcgtgatctcccccagcggcaagtacaacgccgtgaagctggggaagtacgaggacagcaacagcgtgacctgctccgtgcagcacgacaacaagaccgtgcacagcaccgactttgaagtgaaaaccgactccaccgaccacgtgaagcccaaagagacagagaacaccaagcagcccagcaagagctgccacaagcccaaggccatcgtgcacaccgagaaagtgaacatgatgagcctgaccgtgctgggcctgcggatgctgttcgccaaaaccgtggccgtgaacttcctgctgaccgccaagctgttcttcctc

SEQ ID NO: 40145 - DNA, 1968 bp, synthetic construct
  source 1..1968: mol_type = other DNA
atggccttaccagtgaccgccttgctcctgccgctggccttgctgctccacgccgccaggccggacatccagatgacacagagccctagcagcctgtctgccagcgtgggagacagagtgaccatcacatgcaaggccagcgaccacatcaacaactggctggcctggtatcagcagaagcctggacaggcccctaagctgctgatctacggcgctaccacactggaaacaggcgtgcccagcagattttctggcagcggctctggcaccgactacaccctgacaatatccagcctccagcctgaggacttcgccacctactactgtcagcagagctggaacaccccttggacattcggccagggcaccaagctggaaatcaagagactcgagggacagcctaaggccaatcctaccgtgacactgttccctccaagcagcgaagaactccaggccaacaaggccacacttgtgtgcctgatctccgacttctaccctggggctgtgacagtggcttggaaggccgatggatctcctgtgaaagccggcgtggaaaccaccaagccatccaagcagagcaacaacaaatacgccgccagctcctacctgagcctgacacctgagcagtggaagtcccacagatcctacagctgccaagtgacccacgaaggcagcaccgtggaaaagacagtggcccctacagagtgcagccccatcaagaccgatgtgattacaatggaccccaaggacaactgctccaaggacgccaacgataccctgctgctccagctgaccaacaccagcgcctactacatgtacttgttgctgctgctgaagtccgtggtgtacttcgccatcatcacatgctgcctgctgcggagaaccgccttctgctgcaacggcgagaagtctagggccaagcgatctggatctggagcaacaaacttctcactactcaaacaagcaggtgacgtggaggagaatcccgggcctactagtatggactggatttggcgcatccttttccttgtcggcgctgctaccggcgcgcattccttcgaacaagttcagcttcaacagcctggcgctgagctggtcaaacctggcgcttctgtgaagatgagctgcaaagccagcggctacgccttcagcagctactggatcaactggatgaagcagaaacccggccagggactcgaatggatcggccaaatctatcccggcgacggcgacaccaactacaacggcaagttcaagggcagagccacactgaccgccgatacctctagcagcacagcctacatgcagctgagcagcctgaccagcgaagatagcgccgtgtacttctgtgcccggtccatcacaacagtcgtgggctgcgctatggactattggggccagggaacaagcgtgaccgtgtctagtacgcgtgaggacctgaagaacgtgttcccacctgaggtggccgtgttcgagcctagcgaggccgagatcagccacacccagaaagccaccctcgtgtgcctggctaccggcttctaccccgaccatgtggaactgtcttggtgggtcaacggcaaagaggtgcacagcggcgtgtctaccgacccccagccactgaaagaacagcccgccctgaacgacagccggtactgcctgagcagcagactgagagtgtccgccaccttctggcagaacccccggaaccacttcagatgccaggtgcagttctacggcctgagcgagaacgacgagtggacccaggacagagccaagcccgtgacccagatcgtgtctgccgaagcctggggcagagccgattgcggctttaccagcgagagctaccagcagggcgtgctgagcgccaccatcctgtacgagatcctgctgggcaaggccaccctgtacgccgtgctggtgtctgccctggtgctgatggctatggtcaagcggaaggacagccgggga

SEQ ID NO: 40146 - DNA, 1812 bp, synthetic construct
  source 1..1812: mol_type = other DNA
atggccttaccagtgaccgccttgctcctgccgctggccttgctgctccacgccgccaggccggacatccagatgacacagagccctagcagcctgtctgccagcgtgggagacagagtgaccatcacatgcaaggccagcgaccacatcaacaactggctggcctggtatcagcagaagcctggacaggcccctaagctgctgatctacggcgctaccacactggaaacaggcgtgcccagcagattttctggcagcggctctggcaccgactacaccctgacaatatccagcctccagcctgaggacttcgccacctactactgtcagcagagctggaacaccccttggacattcggccagggcaccaagctggaaatcaagagactcgagggacagcctaaggccaatcctaccgtgacactgttccctccaagcagcgaagaactccaggccaacaaggccacacttgtgtgcctgatctccgacttctaccctggggctgtgacagtggcttggaaggccgatggatctcctgtgaaagccggcgtggaaaccaccaagccatccaagcagagcaacaacaaatacgccgccagctcctacctgagcctgacacctgagcagtggaagtcccacagatcctacagctgccaagtgacccacgaaggcagcaccgtggaaaagacagtggcccctacagagtgcagcggcagagccgattgcggctttaccagcgagagctaccagcagggcgtgctgagcgccaccatcctgtacttgttgctgctgctgaagtccgtggtgtacttcgccatcatcacatgctgcctgctgcggagaaccgccttctgctgcaacggcgagaagtctagggccaagcgatctggatctggagcaacaaacttctcactactcaaacaagcaggtgacgtggaggagaatcccgggcctactagtatggactggatttggcgcatccttttccttgtcggcgctgctaccggcgcgcattccttcgaacaagttcagcttcaacagcctggcgctgagctggtcaaacctggcgcttctgtgaagatgagctgcaaagccagcggctacgccttcagcagctactggatcaactggatgaagcagaaacccggccagggactcgaatggatcggccaaatctatcccggcgacggcgacaccaactacaacggcaagttcaagggcagagccacactgaccgccgatacctctagcagcacagcctacatgcagctgagcagcctgaccagcgaagatagcgccgtgtacttctgtgcccggtccatcacaacagtcgtgggctgcgctatggactattggggccagggaacaagcgtgaccgtgtctagtacgcgtatccagaaccctgatcctgccgtgtaccagctgcgggatagcaagagcagcgacaagagcgtgtgtctgttcaccgacttcgacagccagaccaacgtgtcccagagcaaggactccgacgtgtacatcaccgataagaccgtgctggacatgcggagcatggacttcaagagcaactccgccgtggcctggtccaacaagtccgatttcgcctgcgccaacgccttcaacaacagcattatccccgaggacacattcttcccaagccccgagagcagctgcgacgtgaagctggtggaaaagagcttcgagacagacaccaacctgaacttccagaacctgagcgtgatcggcttcagaatcctgctgctgaaagtggccggctttaacctgctgatgaccctgcggctgtggtccagc

SEQ ID NO: 40147 - DNA, 1812 bp, synthetic construct
  source 1..1812: mol_type = other DNA
atggccttaccagtgaccgccttgctcctgccgctggccttgctgctccacgccgccaggccggacatccagatgacacagagccctagcagcctgtctgccagcgtgggagacagagtgaccatcacatgcaaggccagcgaccacatcaacaactggctggcctggtatcagcagaagcctggacaggcccctaagctgctgatctacggcgctaccacactggaaacaggcgtgcccagcagattttctggcagcggctctggcaccgactacaccctgacaatatccagcctccagcctgaggacttcgccacctactactgtcagcagagctggaacaccccttggacattcggccagggcaccaagctggaaatcaagagactcgagggacagcctaaggccaatcctaccgtgacactgttccctccaagcagcgaagaactccaggccaacaaggccacacttgtgtgcctgatctccgacttctaccctggggctgtgacagtggcttggaaggccgatggatctcctgtgaaagccggcgtggaaaccaccaagccatccaagcagagcaacaacaaatacgccgccagctcctacctgagcctgacacctgagcagtggaagtcccacagatcctacagctgccaagtgacccacgaaggcagcaccgtggaaaagacagtggcccctacagagtgcagcggcagagccgattgcggctttaccagcgagagctaccagcagggcgtgctgagcgcctactacatgtacttgttgctgctgctgaagtccgtggtgtacttcgccatcatcacatgctgcctgctgcggagaaccgccttctgctgcaacggcgagaagtctagggccaagcgatctggatctggagcaacaaacttctcactactcaaacaagcaggtgacgtggaggagaatcccgggcctactagtatggactggatttggcgcatccttttccttgtcggcgctgctaccggcgcgcattccttcgaacaagttcagcttcaacagcctggcgctgagctggtcaaacctggcgcttctgtgaagatgagctgcaaagccagcggctacgccttcagcagctactggatcaactggatgaagcagaaacccggccagggactcgaatggatcggccaaatctatcccggcgacggcgacaccaactacaacggcaagttcaagggcagagccacactgaccgccgatacctctagcagcacagcctacatgcagctgagcagcctgaccagcgaagatagcgccgtgtacttctgtgcccggtccatcacaacagtcgtgggctgcgctatggactattggggccagggaacaagcgtgaccgtgtctagtacgcgtatccagaaccctgatcctgccgtgtaccagctgcgggatagcaagagcagcgacaagagcgtgtgtctgttcaccgacttcgacagccagaccaacgtgtcccagagcaaggactccgacgtgtacatcaccgataagaccgtgctggacatgcggagcatggacttcaagagcaactccgccgtggcctggtccaacaagtccgatttcgcctgcgccaacgccttcaacaacagcattatccccgaggacacattcttcccaagccccgagagcagctgcgacgtgaagctggtggaaaagagcttcgagacagacaccaacctgaacttccagaacctgagcgtgatcggcttcagaatcctgctgctgaaagtggccggctttaacctgctgatgaccctgcggctgtggtccagc

SEQ ID NO: 40148 - DNA, 1812 bp, synthetic construct
  source 1..1812: mol_type = other DNA
atggccttaccagtgaccgccttgctcctgccgctggccttgctgctccacgccgccaggccggacatccagatgacacagagccctagcagcctgtctgccagcgtgggagacagagtgaccatcacatgcaaggccagcgaccacatcaacaactggctggcctggtatcagcagaagcctggacaggcccctaagctgctgatctacggcgctaccacactggaaacaggcgtgcccagcagattttctggcagcggctctggcaccgactacaccctgacaatatccagcctccagcctgaggacttcgccacctactactgtcagcagagctggaacaccccttggacattcggccagggcaccaagctggaaatcaagagactcgagggacagcctaaggccaatcctaccgtgacactgttccctccaagcagcgaagaactccaggccaacaaggccacacttgtgtgcctgatctccgacttctaccctggggctgtgacagtggcttggaaggccgatggatctcctgtgaaagccggcgtggaaaccaccaagccatccaagcagagcaacaacaaatacgccgccagctcctacctgagcctgacacctgagcagtggaagtcccacagatcctacagctgccaagtgacccacgaaggcagcaccgtggaaaagacagtggcccctacagagtgcagcggcagagccgattgcggctttaccagcgagagctaccagcagggcgtgctgagcgcctactacacatacctgctgctgctcctcaagagcgtgatctacctggccatcatcagcttcagcctgctgcggagaacaagcgtgtgcggcaacgagaagaagtccagggccaagcgatctggatctggagcaacaaacttctcactactcaaacaagcaggtgacgtggaggagaatcccgggcctactagtatggactggatttggcgcatccttttccttgtcggcgctgctaccggcgcgcattccttcgaacaagttcagcttcaacagcctggcgctgagctggtcaaacctggcgcttctgtgaagatgagctgcaaagccagcggctacgccttcagcagctactggatcaactggatgaagcagaaacccggccagggactcgaatggatcggccaaatctatcccggcgacggcgacaccaactacaacggcaagttcaagggcagagccacactgaccgccgatacctctagcagcacagcctacatgcagctgagcagcctgaccagcgaagatagcgccgtgtacttctgtgcccggtccatcacaacagtcgtgggctgcgctatggactattggggccagggaacaagcgtgaccgtgtctagtacgcgtatccagaaccctgatcctgccgtgtaccagctgcgggatagcaagagcagcgacaagagcgtgtgtctgttcaccgacttcgacagccagaccaacgtgtcccagagcaaggactccgacgtgtacatcaccgataagaccgtgctggacatgcggagcatggacttcaagagcaactccgccgtggcctggtccaacaagtccgatttcgcctgcgccaacgccttcaacaacagcattatccccgaggacacattcttcccaagccccgagagcagctgcgacgtgaagctggtggaaaagagcttcgagacagacaccaacctgaacttccagaacctgagcgtgatcggcttcagaatcctgctgctgaaagtggccggctttaacctgctgatgaccctgcggctgtggtccagc

SEQ ID NO: 40149 - DNA, 1809 bp, synthetic construct
  source 1..1809: mol_type = other DNA
atggccttaccagtgaccgccttgctcctgccgctggccttgctgctccacgccgccaggccggacatccagatgacacagagccctagcagcctgtctgccagcgtgggagacagagtgaccatcacatgcaaggccagcgaccacatcaacaactggctggcctggtatcagcagaagcctggacaggcccctaagctgctgatctacggcgctaccacactggaaacaggcgtgcccagcagattttctggcagcggctctggcaccgactacaccctgacaatatccagcctccagcctgaggacttcgccacctactactgtcagcagagctggaacaccccttggacattcggccagggcaccaagctggaaatcaagagactcgagggacagcctaaggccaatcctaccgtgacactgttccctccaagcagcgaagaactccaggccaacaaggccacacttgtgtgcctgatctccgacttctaccctggggctgtgacagtggcttggaaggccgatggatctcctgtgaaagccggcgtggaaaccaccaagccatccaagcagagcaacaacaaatacgccgccagctcctacctgagcctgacacctgagcagtggaagtcccacagatcctacagctgccaagtgacccacgaaggcagcaccgtggaaaagacagtggcccctacagagtgcagcggcagagccgattgcggctttaccagcgagagctaccagcagggcgtgctgagcgcctactacatgtacttgttgctgctgctgaagtccgtggtgtacttcgccatcatcacatgctgcctgctgatggctatggtcaagcggaaggacagccggggaagggccaagcgatctggatctggagcaacaaacttctcactactcaaacaagcaggtgacgtggaggagaatcccgggcctactagtatggactggatttggcgcatccttttccttgtcggcgctgctaccggcgcgcattccttcgaacaagttcagcttcaacagcctggcgctgagctggtcaaacctggcgcttctgtgaagatgagctgcaaagccagcggctacgccttcagcagctactggatcaactggatgaagcagaaacccggccagggactcgaatggatcggccaaatctatcccggcgacggcgacaccaactacaacggcaagttcaagggcagagccacactgaccgccgatacctctagcagcacagcctacatgcagctgagcagcctgaccagcgaagatagcgccgtgtacttctgtgcccggtccatcacaacagtcgtgggctgcgctatggactattggggccagggaacaagcgtgaccgtgtctagtacgcgtatccagaaccctgatcctgccgtgtaccagctgcgggatagcaagagcagcgacaagagcgtgtgtctgttcaccgacttcgacagccagaccaacgtgtcccagagcaaggactccgacgtgtacatcaccgataagaccgtgctggacatgcggagcatggacttcaagagcaactccgccgtggcctggtccaacaagtccgatttcgcctgcgccaacgccttcaacaacagcattatccccgaggacacattcttcccaagccccgagagcagctgcgacgtgaagctggtggaaaagagcttcgagacagacaccaacctgaacttccagaacctgagcgtgatcggcttcagaatcctgctgctgaaagtggccggctttaacctgctgatgaccctgcggctgtggtccagc

SEQ ID NO: 40150 - DNA, 1812 bp, synthetic construct
  source 1..1812: mol_type = other DNA
atggccttaccagtgaccgccttgctcctgccgctggccttgctgctccacgccgccaggccggacatccagatgacacagagccctagcagcctgtctgccagcgtgggagacagagtgaccatcacatgcaaggccagcgaccacatcaacaactggctggcctggtatcagcagaagcctggacaggcccctaagctgctgatctacggcgctaccacactggaaacaggcgtgcccagcagattttctggcagcggctctggcaccgactacaccctgacaatatccagcctccagcctgaggacttcgccacctactactgtcagcagagctggaacaccccttggacattcggccagggcaccaagctggaaatcaagagactcgagggacagcctaaggccaatcctaccgtgacactgttccctccaagcagcgaagaactccaggccaacaaggccacacttgtgtgcctgatctccgacttctaccctggggctgtgacagtggcttggaaggccgatggatctcctgtgaaagccggcgtggaaaccaccaagccatccaagcagagcaacaacaaatacgccgccagctcctacctgagcctgacacctgagcagtggaagtcccacagatcctacagctgccaagtgacccacgaaggcagcaccgtggaaaagacagtggcccctacagagtgcagcggcagagccgattgcggctttaccagcgagagctaccagcagggcgtgctgagcgccaccatcctgtacttgttgctgctgctgaagtccgtggtgtacctggccatcatcagcttcagcctgctgcggagaaccgccttctgctgcaacggcgagaagtctagggccaagcgatctggatctggagcaacaaacttctcactactcaaacaagcaggtgacgtggaggagaatcccgggcctactagtatggactggatttggcgcatccttttccttgtcggcgctgctaccggcgcgcattccttcgaacaagttcagcttcaacagcctggcgctgagctggtcaaacctggcgcttctgtgaagatgagctgcaaagccagcggctacgccttcagcagctactggatcaactggatgaagcagaaacccggccagggactcgaatggatcggccaaatctatcccggcgacggcgacaccaactacaacggcaagttcaagggcagagccacactgaccgccgatacctctagcagcacagcctacatgcagctgagcagcctgaccagcgaagatagcgccgtgtacttctgtgcccggtccatcacaacagtcgtgggctgcgctatggactattggggccagggaacaagcgtgaccgtgtctagtacgcgtatccagaaccctgatcctgccgtgtaccagctgcgggatagcaagagcagcgacaagagcgtgtgtctgttcaccgacttcgacagccagaccaacgtgtcccagagcaaggactccgacgtgtacatcaccgataagaccgtgctggacatgcggagcatggacttcaagagcaactccgccgtggcctggtccaacaagtccgatttcgcctgcgccaacgccttcaacaacagcattatccccgaggacacattcttcccaagccccgagagcagctgcgacgtgaagctggtggaaaagagcttcgagacagacaccaacctgaacttccagaacctgagcgtgatcggcttcagaatcctgctgctgaaagtggccggctttaacctgctgatgaccctgcggctgtggtccagc

SEQ ID NO: 40151 - DNA, 1935 bp, synthetic construct
  source 1..1935: mol_type = other DNA
atggccttaccagtgaccgccttgctcctgccgctggccttgctgctccacgccgccaggccggacatccagatgacacagagccctagcagcctgtctgccagcgtgggagacagagtgaccatcacatgcaaggccagcgaccacatcaacaactggctggcctggtatcagcagaagcctggacaggcccctaagctgctgatctacggcgctaccacactggaaacaggcgtgcccagcagattttctggcagcggctctggcaccgactacaccctgacaatatccagcctccagcctgaggacttcgccacctactactgtcagcagagctggaacaccccttggacattcggccagggcaccaagctggaaatcaagagactcgaggacctgaagaacgtgttcccacctgaggtggccgtgttcgagcctagcgaggccgagatcagccacacccagaaagccaccctcgtgtgcctggctaccggcttctaccccgaccatgtggaactgtcttggtgggtcaacggcaaagaggtgcacagcggcgtgtctaccgacccccagccactgaaagaacagcccgccctgaacgacagccggtactgcctgagcagcagactgagagtgtccgccaccttctggcagaacccccggaaccacttcagatgccaggtgcagttctacggcctgagcgagaacgacgagtggacccaggacagagccaagcccgtgacccagatcgtgtctgccgaagcctggggcagagccgattgcggctttaccagcgagagctaccagcagggcgtgctgagcgccaccatcctgtacgagatcctgctgggcaaggccaccctgtacgccgtgctggtgtctgccctggtgctgatggctatggtcaagcggaaggacagccggggaagggccaagcgatctggatctggagcaacaaacttctcactactcaaacaagcaggtgacgtggaggagaatcccgggcctactagtatggactggatttggcgcatccttttccttgtcggcgctgctaccggcgcgcattccttcgaacaagttcagcttcaacagcctggcgctgagctggtcaaacctggcgcttctgtgaagatgagctgcaaagccagcggctacgccttcagcagctactggatcaactggatgaagcagaaacccggccagggactcgaatggatcggccaaatctatcccggcgacggcgacaccaactacaacggcaagttcaagggcagagccacactgaccgccgatacctctagcagcacagcctacatgcagctgagcagcctgaccagcgaagatagcgccgtgtacttctgtgcccggtccatcacaacagtcgtgggctgcgctatggactattggggccagggaacaagcgtgaccgtgtctagtacgcgtgcctctacaaagggaccctccgtgtttcctctggctcccagcagcaagtctacaagcggaggaacagccgctctgggctgcctggtcaaggattactttcccgagcctgtgaccgtgtcctggaatagcggagcactgacaagcggcgtgcacacctttccagccgtgctgcaaagcagcggcctgtactctctgagcagcgtggtcacagtgcctagctctagcctgggcacccagacctacatctgcaatgtgaaccacaagcctagcaacaccaaggtggacaagagagtggaacccaagagctgtatccccgaggacacattcttcccaagccccgagagcagctgcgacgtgaagctggtggaaaagagcttcgagacagacaccaacctgaacttccagaacctgagcgtgatcggcctgcggatgctgttcgccaaaaccgtggccgtgaacttcctgctgaccgccaagctgttcttcctc

SEQ ID NO: 40152 - DNA, 1935 bp, synthetic construct
  source 1..1935: mol_type = other DNA
atggccttaccagtgaccgccttgctcctgccgctggccttgctgctccacgccgccaggccggacatccagatgacacagagccctagcagcctgtctgccagcgtgggagacagagtgaccatcacatgcaaggccagcgaccacatcaacaactggctggcctggtatcagcagaagcctggacaggcccctaagctgctgatctacggcgctaccacactggaaacaggcgtgcccagcagattttctggcagcggctctggcaccgactacaccctgacaatatccagcctccagcctgaggacttcgccacctactactgtcagcagagctggaacaccccttggacattcggccagggcaccaagctggaaatcaagagactcgaggacctgaagaacgtgttcccacctgaggtggccgtgttcgagcctagcgaggccgagatcagccacacccagaaagccaccctcgtgtgcctggctaccggcttctaccccgaccatgtggaactgtcttggtgggtcaacggcaaagaggtgcacagcggcgtgtctaccgacccccagccactgaaagaacagcccgccctgaacgacagccggtactgcctgagcagcagactgagagtgtccgccaccttctggcagaacccccggaaccacttcagatgccaggtgcagttctacggcctgagcgagaacgacgagtggacccaggacagagccaagcccgtgacccagatcgtgtctgccgaagcctggggcagagccgattgcggctttaccagcgagagctaccagcagggcgtgctgagcgccaccatcctgtacgagatcctgctgggcaaggccaccctgtacgccgtgctggtgtctgccctggtgctgatggctatggtcaagcggaaggacagccggggaagggccaagcgatctggatctggagcaacaaacttctcactactcaaacaagcaggtgacgtggaggagaatcccgggcctactagtatggactggatttggcgcatccttttccttgtcggcgctgctaccggcgcgcattccttcgaacaagttcagcttcaacagcctggcgctgagctggtcaaacctggcgcttctgtgaagatgagctgcaaagccagcggctacgccttcagcagctactggatcaactggatgaagcagaaacccggccagggactcgaatggatcggccaaatctatcccggcgacggcgacaccaactacaacggcaagttcaagggcagagccacactgaccgccgatacctctagcagcacagcctacatgcagctgagcagcctgaccagcgaagatagcgccgtgtacttctgtgcccggtccatcacaacagtcgtgggctgcgctatggactattggggccagggaacaagcgtgaccgtgtctagtacgcgtgcctctacaaagggaccctccgtgtttcctctggctcccagcagcaagtctacaagcggaggaacagccgctctgggctgcctggtcaaggattactttcccgagcctgtgaccgtgtcctggaatagcggagcactgacaagcggcgtgcacacctttccagccgtgctgcaaagcagcggcctgtactctctgagcagcgtggtcacagtgcctagctctagcctgggcacccagacctacatctgcaatgtgaaccacaagcctagcaacaccaaggtggacaagagagtggaacccaagagctgtatccccgaggacacattcttcccaagccccgagagcagctgcgacgtgaagctggtggaaaagagcttcgagacagacaccaacctgaacttccagaacctgagcgtgctgggcctgcggatgctgttcgccaaaaccgtggccgtgaacttcctgctgaccgccaagctgttcttcctc

SEQ ID NO: 40153 - DNA, 1935 bp, synthetic construct
  source 1..1935: mol_type = other DNA
atggccttaccagtgaccgccttgctcctgccgctggccttgctgctccacgccgccaggccggacatccagatgacacagagccctagcagcctgtctgccagcgtgggagacagagtgaccatcacatgcaaggccagcgaccacatcaacaactggctggcctggtatcagcagaagcctggacaggcccctaagctgctgatctacggcgctaccacactggaaacaggcgtgcccagcagattttctggcagcggctctggcaccgactacaccctgacaatatccagcctccagcctgaggacttcgccacctactactgtcagcagagctggaacaccccttggacattcggccagggcaccaagctggaaatcaagagactcgaggacctgaagaacgtgttcccacctgaggtggccgtgttcgagcctagcgaggccgagatcagccacacccagaaagccaccctcgtgtgcctggctaccggcttctaccccgaccatgtggaactgtcttggtgggtcaacggcaaagaggtgcacagcggcgtgtctaccgacccccagccactgaaagaacagcccgccctgaacgacagccggtactgcctgagcagcagactgagagtgtccgccaccttctggcagaacccccggaaccacttcagatgccaggtgcagttctacggcctgagcgagaacgacgagtggacccaggacagagccaagcccgtgacccagatcgtgtctgccgaagcctggggcagagccgattgcggctttaccagcgagagctaccagcagggcgtgctgagcgccaccatcctgtacgagatcctgctgggcaaggccaccctgtacgccgtgctggtgtctgccctggtgctgatggctatggtcaagcggaaggacagccggggaagggccaagcgatctggatctggagcaacaaacttctcactactcaaacaagcaggtgacgtggaggagaatcccgggcctactagtatggactggatttggcgcatccttttccttgtcggcgctgctaccggcgcgcattccttcgaacaagttcagcttcaacagcctggcgctgagctggtcaaacctggcgcttctgtgaagatgagctgcaaagccagcggctacgccttcagcagctactggatcaactggatgaagcagaaacccggccagggactcgaatggatcggccaaatctatcccggcgacggcgacaccaactacaacggcaagttcaagggcagagccacactgaccgccgatacctctagcagcacagcctacatgcagctgagcagcctgaccagcgaagatagcgccgtgtacttctgtgcccggtccatcacaacagtcgtgggctgcgctatggactattggggccagggaacaagcgtgaccgtgtctagtacgcgtgcctctacaaagggaccctccgtgtttcctctggctcccagcagcaagtctacaagcggaggaacagccgctctgggctgcctggtcaaggattactttcccgagcctgtgaccgtgtcctggaatagcggagcactgacaagcggcgtgcacacctttccagccgtgctgcaaagcagcggcctgtactctctgagcagcgtggtcacagtgcctagctctagcctgggcacccagacctacatctgcaatgtgaaccacaagcctagcaacaccaaggtggacaagagagtggaacccaagagctgtatccccgaggacacattcttcccaagccccgagagcagctgcgacgtgaagctggtggaaaagagcttcgagacagacaccaacctgaacttccagaacctgaccgtgctgggcctgcggatgctgttcgccaaaaccgtggccgtgaacttcctgctgaccgccaagctgttcttcctc

SEQ ID NO: 40154 - DNA, 1935 bp, synthetic construct; identical to SEQ ID NO: 40153
  source 1..1935: mol_type = other DNA

SEQ ID NO: 40155 - DNA, 1941 bp, synthetic construct
  source 1..1941: mol_type = other DNA
atggccttaccagtgaccgccttgctcctgccgctggccttgctgctccacgccgccaggccggacatccagatgacacagagccctagcagcctgtctgccagcgtgggagacagagtgaccatcacatgcaaggccagcgaccacatcaacaactggctggcctggtatcagcagaagcctggacaggcccctaagctgctgatctacggcgctaccacactggaaacaggcgtgcccagcagattttctggcagcggctctggcaccgactacaccctgacaatatccagcctccagcctgaggacttcgccacctactactgtcagcagagctggaacaccccttggacattcggccagggcaccaagctggaaatcaagagactcgaggacctgaagaacgtgttcccacctgaggtggccgtgttcgagcctagcgaggccgagatcagccacacccagaaagccaccctcgtgtgcctggctaccggcttctaccccgaccatgtggaactgtcttggtgggtcaacggcaaagaggtgcacagcggcgtgtctaccgacccccagccactgaaagaacagcccgccctgaacgacagccggtactgcctgagcagcagactgagagtgtccgccaccttctggcagaacccccggaaccacttcagatgccaggtgcagttctacggcctgagcgagaacgacgagtggacccaggacagagccaagcccgtgacccagatcgtgtctgccgaagcctggggcagagccgattgcggctttaccagcgagagctaccagcagggcgtgctgagcgccaccatcctgtacgagatcctgctgggcaaggccaccctgtacgccgtgctggtgtctgccctggtgctgatggctatggtcaagcggaaggacagccggggaagggccaagcgatctggatctggagcaacaaacttctcactactcaaacaagcaggtgacgtggaggagaatcccgggcctactagtatggactggatttggcgcatccttttccttgtcggcgctgctaccggcgcgcattccttcgaacaagttcagcttcaacagcctggcgctgagctggtcaaacctggcgcttctgtgaagatgagctgcaaagccagcggctacgccttcagcagctactggatcaactggatgaagcagaaacccggccagggactcgaatggatcggccaaatctatcccggcgacggcgacaccaactacaacggcaagttcaagggcagagccacactgaccgccgatacctctagcagcacagcctacatgcagctgagcagcctgaccagcgaagatagcgccgtgtacttctgtgcccggtccatcacaacagtcgtgggctgcgctatggactattggggccagggaacaagcgtgaccgtgtctagtacgcgtgcctctacaaagggaccctccgtgtttcctctggctcccagcagcaagtctacaagcggaggaacagccgctctgggctgcctggtcaaggattactttcccgagcctgtgaccgtgtcctggaatagcggagcactgacaagcggcgtgcacacctttccagccgtgctgcaaagcagcggcctgtactctctgagcagcgtggtcacagtgcctagctctagcctgggcacccagacctacatctgcaatgtgaaccacaagcctagcaacaccaaggtggacaagagagtggaacccaagagctgtatcttcaaagagacaaacgccacctacccctccagcgacgtgccctgtgacgccaccctgaccgagaagtccttcgagacagacatgaacctcaacttccagaacctgaccgtgctgggcctgcggatgctgttcgccaaaaccgtggccgtgaacttcctgctgaccgccaagctgttcttcctc

SEQ ID NO: 40156 - DNA, 1887 bp, synthetic construct
  source 1..1887: mol_type = other DNA
atggccttaccagtgaccgccttgctcctgccgctggccttgctgctccacgccgccaggccggacatccagatgacacagagccctagcagcctgtctgccagcgtgggagacagagtgaccatcacatgcaaggccagcgaccacatcaacaactggctggcctggtatcagcagaagcctggacaggcccctaagctgctgatctacggcgctaccacactggaaacaggcgtgcccagcagattttctggcagcggctctggcaccgactacaccctgacaatatccagcctccagcctgaggacttcgccacctactactgtcagcagagctggaacaccccttggacattcggccagggcaccaagctggaaatcaagagactcgagggacagcctaaggccaatcctaccgtgacactgttccctccaagcagcgaagaactccaggccaacaaggccacacttgtgtgcctgatctccgacttctaccctggggctgtgacagtggcttggaaggccgatggatctcctgtgaaagccggcgtggaaaccaccaagccatccaagcagagcaacaacaaatacgccgccagctcctacctgagcctgacacctgagcagtggaagtcccacagatcctacagctgccaagtgacccacgaaggcagcaccgtggaaaagacagtggcccctacagagtgcagccccatcaagaccgatgtgattacaatggaccccaaggacaactgctccaaggacgccaacgataccctgctgctccagctgaccaacaccagcgcctactacatgtacgagatcctgctgggcaaggccaccctgtacgccgtgctggtgtctgccctggtgctgatggctatggtcaagcggaaggacagccggggaagggccaagcgatctggatctggagcaacaaacttctcactactcaaacaagcaggtgacgtggaggagaatcccgggcctactagtatggactggatttggcgcatccttttccttgtcggcgctgctaccggcgcgcattccttcgaacaagttcagcttcaacagcctggcgctgagctggtcaaacctggcgcttctgtgaagatgagctgcaaagccagcggctacgccttcagcagctactggatcaactggatgaagcagaaacccggccagggactcgaatggatcggccaaatctatcccggcgacggcgacaccaactacaacggcaagttcaagggcagagccacactgaccgccgatacctctagcagcacagcctacatgcagctgagcagcctgaccagcgaagatagcgccgtgtacttctgtgcccggtccatcacaacagtcgtgggctgcgctatggactattggggccagggaacaagcgtgaccgtgtctagtacgcgtagccagcctcacaccaagcccagcgtgttcgtgatgaagaacggcaccaacgtggcctgcctcgtgaaagagttctaccccaaggacatcaggatcaacctggtgtccagcaagaagatcaccgagttcgaccccgccatcgtgatctcccccagcggcaagtacaacgccgtgaagctggggaagtacgaggacagcaacagcgtgacctgctccgtgcagcacgacaacaagaccgtgcacagcaccgactttgaagtgaaaaccgactccaccgaccacgtgaagcccaaagagacagagaacaccaagcagcccagcaagagctgccacaagcccaaggccatcgtgcacaccgagaaagtgaacatgatgagcctgaccgtgctgggcctgcggatgctgttcgccaaaaccgtggccgtgaacttcctgctgaccgccaagctgttcttcctc

SEQ ID NO: 40157 - DNA, 1887 bp, synthetic construct
  source 1..1887: mol_type = other DNA
atggccttaccagtgaccgccttgctcctgccgctggccttgctgctccacgccgccaggccggacatccagatgacacagagccctagcagcctgtctgccagcgtgggagacagagtgaccatcacatgcaaggccagcgaccacatcaacaactggctggcctggtatcagcagaagcctggacaggcccctaagctgctgatctacggcgctaccacactggaaacaggcgtgcccagcagattttctggcagcggctctggcaccgactacaccctgacaatatccagcctccagcctgaggacttcgccacctactactgtcagcagagctggaacaccccttggacattcggccagggcaccaagctggaaatcaagagactcgagggacagcctaaggccaatcctaccgtgacactgttccctccaagcagcgaagaactccaggccaacaaggccacacttgtgtgcctgatctccgacttctaccctggggctgtgacagtggcttggaaggccgatggatctcctgtgaaagccggcgtggaaaccaccaagccatccaagcagagcaacaacaaatacgccgccagctcctacctgagcctgacacctgagcagtggaagtcccacagatcctacagctgccaagtgacccacgaaggcagcaccgtggaaaagacagtggcccctacagagtgcagccccatcaagaccgatgtgattacaatggaccccaaggacaactgctccaaggacgccaacgataccctgctgctccagctgaccaacaccagcgccaccatcctgtacgagatcctgctgggcaaggccaccctgtacgccgtgctggtgtctgccctggtgctgatggctatggtcaagcggaaggacagccggggaagggccaagcgatctggatctggagcaacaaacttctcactactcaaacaagcaggtgacgtggaggagaatcccgggcctactagtatggactggatttggcgcatccttttccttgtcggcgctgctaccggcgcgcattccttcgaacaagttcagcttcaacagcctggcgctgagctggtcaaacctggcgcttctgtgaagatgagctgcaaagccagcggctacgccttcagcagctactggatcaactggatgaagcagaaacccggccagggactcgaatggatcggccaaatctatcccggcgacggcgacaccaactacaacggcaagttcaagggcagagccacactgaccgccgatacctctagcagcacagcctacatgcagctgagcagcctgaccagcgaagatagcgccgtgtacttctgtgcccggtccatcacaacagtcgtgggctgcgctatggactattggggccagggaacaagcgtgaccgtgtctagtacgcgtagccagcctcacaccaagcccagcgtgttcgtgatgaagaacggcaccaacgtggcctgcctcgtgaaagagttctaccccaaggacatcaggatcaacctggtgtccagcaagaagatcaccgagttcgaccccgccatcgtgatctcccccagcggcaagtacaacgccgtgaagctggggaagtacgaggacagcaacagcgtgacctgctccgtgcagcacgacaacaagaccgtgcacagcaccgactttgaagtgaaaaccgactccaccgaccacgtgaagcccaaagagacagagaacaccaagcagcccagcaagagctgccacaagcccaaggccatcgtgcacaccgagaaagtgaacatgatgagcctgaccgtgctgggcctgcggatgctgttcgccaaaaccgtggccgtgaacttcctgctgaccgccaagctgttcttcctc

SEQ ID NO: 40158 - DNA, 1890 bp, synthetic construct
  source 1..1890: mol_type = other DNA
atggccttaccagtgaccgccttgctcctgccgctggccttgctgctccacgccgccaggccggacatccagatgacacagagccctagcagcctgtctgccagcgtgggagacagagtgaccatcacatgcaaggccagcgaccacatcaacaactggctggcctggtatcagcagaagcctggacaggcccctaagctgctgatctacggcgctaccacactggaaacaggcgtgcccagcagattttctggcagcggctctggcaccgactacaccctgacaatatccagcctccagcctgaggacttcgccacctactactgtcagcagagctggaacaccccttggacattcggccagggcaccaagctggaaatcaagagactcgagggacagcctaaggccaatcctaccgtgacactgttccctccaagcagcgaagaactccaggccaacaaggccacacttgtgtgcctgatctccgacttctaccctggggctgtgacagtggcttggaaggccgatggatctcctgtgaaagccggcgtggaaaccaccaagccatccaagcagagcaacaacaaatacgccgccagctcctacctgagcctgacacctgagcagtggaagtcccacagatcctacagctgccaagtgacccacgaaggcagcaccgtggaaaagacagtggcccctacagagtgcagccccatcaagaccgatgtgattacaatggaccccaaggacaactgctccaaggacgccaacgataccctgctgctccagctgaccaacaccagcgcctactacacatacctgctgctgctcctcaagagcgtgatctacctggccatcatcagcttcagcctgctgcggagaacaagcgtgtgcggcaacgagaagaagtccagggccaagcgatctggatctggagcaacaaacttctcactactcaaacaagcaggtgacgtggaggagaatcccgggcctactagtatggactggatttggcgcatccttttccttgtcggcgctgctaccggcgcgcattccttcgaacaagttcagcttcaacagcctggcgctgagctggtcaaacctggcgcttctgtgaagatgagctgcaaagccagcggctacgccttcagcagctactggatcaactggatgaagcagaaacccggccagggactcgaatggatcggccaaatctatcccggcgacggcgacaccaactacaacggcaagttcaagggcagagccacactgaccgccgatacctctagcagcacagcctacatgcagctgagcagcctgaccagcgaagatagcgccgtgtacttctgtgcccggtccatcacaacagtcgtgggctgcgctatggactattggggccagggaacaagcgtgaccgtgtctagtacgcgtagccagcctcacaccaagcccagcgtgttcgtgatgaagaacggcaccaacgtggcctgcctcgtgaaagagttctaccccaaggacatcaggatcaacctggtgtccagcaagaagatcaccgagttcgaccccgccatcgtgatctcccccagcggcaagtacaacgccgtgaagctggggaagtacgaggacagcaacagcgtgacctgctccgtgcagcacgacaacaagaccgtgcacagcaccgactttgaagtgaaaaccgactccaccgaccacgtgaagcccaaagagacagagaacaccaagcagcccagcaagagctgccacaagcccaaggccatcgtgcacaccgagaaagtgaacatgatgagcctgaccgtgctgggcctgcggatgctgttcgccaaaaccgtggccgtgaacttcctgctgaccgccaagctgttcttcctc

SEQ ID NO: 40159 - DNA, 1887 bp, synthetic construct
  source 1..1887: mol_type = other DNA
atggccttaccagtgaccgccttgctcctgccgctggccttgctgctccacgccgccaggccggacatccagatgacacagagccctagcagcctgtctgccagcgtgggagacagagtgaccatcacatgcaaggccagcgaccacatcaacaactggctggcctggtatcagcagaagcctggacaggcccctaagctgctgatctacggcgctaccacactggaaacaggcgtgcccagcagattttctggcagcggctctggcaccgactacaccctgacaatatccagcctccagcctgaggacttcgccacctactactgtcagcagagctggaacaccccttggacattcggccagggcaccaagctggaaatcaagagactcgagggacagcctaaggccaatcctaccgtgacactgttccctccaagcagcgaagaactccaggccaacaaggccacacttgtgtgcctgatctccgacttctaccctggggctgtgacagtggcttggaaggccgatggatctcctgtgaaagccggcgtggaaaccaccaagccatccaagcagagcaacaacaaatacgccgccagctcctacctgagcctgacacctgagcagtggaagtcccacagatcctacagctgccaagtgacccacgaaggcagcaccgtggaaaagacagtggcccctacagagtgcagcagcatcaagaaagtggccgtgtccaccaagccaaccacctgttggcaggacaagaacgacgtgctccagctccagttcaccatcaccagcgcctactacacatacctgctgctgctcctcaagagcgtgatctacctggccatcatcagcttcagcctgctgcggagaacaagcgtgtgcggcaacgagaagaagtccagggccaagcgatctggatctggagcaacaaacttctcactactcaaacaagcaggtgacgtggaggagaatcccgggcctactagtatggactggatttggcgcatccttttccttgtcggcgctgctaccggcgcgcattccttcgaacaagttcagcttcaacagcctggcgctgagctggtcaaacctggcgcttctgtgaagatgagctgcaaagccagcggctacgccttcagcagctactggatcaactggatgaagcagaaacccggccagggactcgaatggatcggccaaatctatcccggcgacggcgacaccaactacaacggcaagttcaagggcagagccacactgaccgccgatacctctagcagcacagcctacatgcagctgagcagcctgaccagcgaagatagcgccgtgtacttctgtgcccggtccatcacaacagtcgtgggctgcgctatggactattggggccagggaacaagcgtgaccgtgtctagtacgcgtagccagcctcacaccaagcccagcgtgttcgtgatgaagaacggcaccaacgtggcctgcctcgtgaaagagttctaccccaaggacatcaggatcaacctggtgtccagcaagaagatcaccgagttcgaccccgccatcgtgatctcccccagcggcaagtacaacgccgtgaagctggggaagtacgaggacagcaacagcgtgacctgctccgtgcagcacgacaacaagaccgtgcacagcaccgactttgaagtgaaaaccgactccaccgaccacgtgaagcccaaagagacagagaacaccaagcagcccagcaagagctgccacaagcccaaggccatcgtgcacaccgagaaagtgaacatgatgagcctgaccgtgctgggcctgcggatgctgttcgccaaaaccgtggccgtgaacttcctgctgaccgccaagctgttcttcctc

SEQ ID NO: 40160 - DNA, 1929 bp, synthetic construct
  source 1..1929: mol_type = other DNA
atggccttaccagtgaccgccttgctcctgccgctggccttgctgctccacgccgccaggccggacatccagatgacacagagccctagcagcctgtctgccagcgtgggagacagagtgaccatcacatgcaaggccagcgaccacatcaacaactggctggcctggtatcagcagaagcctggacaggcccctaagctgctgatctacggcgctaccacactggaaacaggcgtgcccagcagattttctggcagcggctctggcaccgactacaccctgacaatatccagcctccagcctgaggacttcgccacctactactgtcagcagagctggaacaccccttggacattcggccagggcaccaagctggaaatcaagagactcgaggccgacgtgtcccccaagcctaccatcttcctgccctctatcgccgagacaaagctccagaaggccggcacctacctgtgcctgctggaaaagttcttcccagatgtgattaagatccactggcaggaaaagaagtccaacaccatcctgggcagccaggaaggcaacaccatgaagaccaacgacacctacatgaagttcagctggctgaccgtgcccgagaagtccctggacaaagaacacagatgcatcgtgcggcacgaaaacaacaagaacggcgtggaccaggaaatcatcttcccacccatcaagaccgatgtgattacaatggaccccaaggacaactgctccaaggacgccaacgataccctgctgctccagctgaccaacaccagcgcctactacatgtacttgttgctgctgctgaagtccgtggtgtacttcgccatcatcacatgctgcctgctgcggagaaccgccttctgctgcaacggcgagaagtctagggccaagcgatctggatctggagcaacaaacttctcactactcaaacaagcaggtgacgtggaggagaatcccgggcctactagtatggactggatttggcgcatccttttccttgtcggcgctgctaccggcgcgcattccttcgaacaagttcagcttcaacagcctggcgctgagctggtcaaacctggcgcttctgtgaagatgagctgcaaagccagcggctacgccttcagcagctactggatcaactggatgaagcagaaacccggccagggactcgaatggatcggccaaatctatcccggcgacggcgacaccaactacaacggcaagttcaagggcagagccacactgaccgccgatacctctagcagcacagcctacatgcagctgagcagcctgaccagcgaagatagcgccgtgtacttctgtgcccggtccatcacaacagtcgtgggctgcgctatggactattggggccagggaacaagcgtgaccgtgtctagtacgcgtgcctctacaaagggaccctccgtgtttcctctggctcccagcagcaagtctacaagcggaggaacagccgctctgggctgcctggtcaaggattactttcccgagcctgtgaccgtgtcctggaatagcggagcactgacaagcggcgtgcacacctttccagccgtgctgcaaagcagcggcctgtactctctgagcagcgtggtcacagtgcctagctctagcctgggcacccagacctacatctgcaatgtgaaccacaagcctagcaacaccaaggtggacaagagagtggaacccaagagctgtgaagtgaaaaccgactccaccgaccacgtgaagcccaaagagacagagaacaccaagcagcccagcaagagctgccacaagcccaaggccatcgtgcacaccgagaaagtgaacatgatgagcctgaccgtgctgggcttcagaatcctgctgctgaaagtggccggctttaacctgctgatgaccctgcggctgtggtccagc

SEQ ID NO: 40161 - DNA, 1929 bp, synthetic construct
  source 1..1929: mol_type = other DNA
atggccttaccagtgaccgccttgctcctgccgctggccttgctgctccacgccgccaggccggacatccagatgacacagagccctagcagcctgtctgccagcgtgggagacagagtgaccatcacatgcaaggccagcgaccacatcaacaactggctggcctggtatcagcagaagcctggacaggcccctaagctgctgatctacggcgctaccacactggaaacaggcgtgcccagcagattttctggcagcggctctggcaccgactacaccctgacaatatccagcctccagcctgaggacttcgccacctactactgtcagcagagctggaacaccccttggacattcggccagggcaccaagctggaaatcaagagactcgaggccgacgtgtcccccaagcctaccatcttcctgccctctatcgccgagacaaagctccagaaggccggcacctacctgtgcctgctggaaaagttcttcccagatgtgattaagatccactggcaggaaaagaagtccaacaccatcctgggcagccaggaaggcaacaccatgaagaccaacgacacctacatgaagttcagctggctgaccgtgcccgagaagtccctggacaaagaacacagatgcatcgtgcggcacgaaaacaacaagaacggcgtggaccaggaaatcatcttcccacccatcaagaccgatgtgattacaatggaccccaaggacaactgctccaaggacgccaacgataccctgctgctccagctgaccaacaccagcgcctactacatgtacttgttgctgctgctgaagtccgtggtgtacttcgccatcatcacatgctgcctgctgcggagaaccgccttctgctgcaacggcgagaagtctagggccaagcgatctggatctggagcaacaaacttctcactactcaaacaagcaggtgacgtggaggagaatcccgggcctactagtatggactggatttggcgcatccttttccttgtcggcgctgctaccggcgcgcattccttcgaacaagttcagcttcaacagcctggcgctgagctggtcaaacctggcgcttctgtgaagatgagctgcaaagccagcggctacgccttcagcagctactggatcaactggatgaagcagaaacccggccagggactcgaatggatcggccaaatctatcccggcgacggcgacaccaactacaacggcaagttcaagggcagagccacactgaccgccgatacctctagcagcacagcctacatgcagctgagcagcctgaccagcgaagatagcgccgtgtacttctgtgcccggtccatcacaacagtcgtgggctgcgctatggactattggggccagggaacaagcgtgaccgtgtctagtacgcgtgcctctacaaagggaccctccgtgtttcctctggctcccagcagcaagtctacaagcggaggaacagccgctctgggctgcctggtcaaggattactttcccgagcctgtgaccgtgtcctggaatagcggagcactgacaagcggcgtgcacacctttccagccgtgctgcaaagcagcggcctgtactctctgagcagcgtggtcacagtgcctagctctagcctgggcacccagacctacatctgcaatgtgaaccacaagcctagcaacaccaaggtggacaagagagtggaacccaagagctgtgaagtgaaaaccgactccaccgaccacgtgaagcccaaagagacagagaacaccaagcagcccagcaagagctgccacaagcccaaggccatcgtgcacaccgagaaagtgaacatgatgagcctgaccgtgatcggcttcagaatcctgctgctgaaagtggccggctttaacctgctgatgaccctgcggctgtggtccagc

SEQ ID NO: 40162 - DNA, 1881 bp, synthetic construct
  source 1..1881: mol_type = other DNA
atggccttaccagtgaccgccttgctcctgccgctggccttgctgctccacgccgccaggccggacatccagatgacacagagccctagcagcctgtctgccagcgtgggagacagagtgaccatcacatgcaaggccagcgaccacatcaacaactggctggcctggtatcagcagaagcctggacaggcccctaagctgctgatctacggcgctaccacactggaaacaggcgtgcccagcagattttctggcagcggctctggcaccgactacaccctgacaatatccagcctccagcctgaggacttcgccacctactactgtcagcagagctggaacaccccttggacattcggccagggcaccaagctggaaatcaagagactcgagggacagcctaaggccaatcctaccgtgacactgttccctccaagcagcgaagaactccaggccaacaaggccacacttgtgtgcctgatctccgacttctaccctggggctgtgacagtggcttggaaggccgatggatctcctgtgaaagccggcgtggaaaccaccaagccatccaagcagagcaacaacaaatacgccgccagctcctacctgagcctgacacctgagcagtggaagtcccacagatcctacagctgccaagtgacccacgaaggcagcaccgtggaaaagacagtggcccctacagagtgcagcggcagagccgattgcggctttaccagcgagagctaccagcagggcgtgctgagcgcctactacatgtacttgttgctgctgctgaagtccgtggtgtacttcgccatcatcacatgctgcctgctgcggagaaccgccttctgctgcaacggcgagaagtctagggccaagcgatctggatctggagcaacaaacttctcactactcaaacaagcaggtgacgtggaggagaatcccgggcctactagtatggactggatttggcgcatccttttccttgtcggcgctgctaccggcgcgcattccttcgaacaagttcagcttcaacagcctggcgctgagctggtcaaacctggcgcttctgtgaagatgagctgcaaagccagcggctacgccttcagcagctactggatcaactggatgaagcagaaacccggccagggactcgaatggatcggccaaatctatcccggcgacggcgacaccaactacaacggcaagttcaagggcagagccacactgaccgccgatacctctagcagcacagcctacatgcagctgagcagcctgaccagcgaagatagcgccgtgtacttctgtgcccggtccatcacaacagtcgtgggctgcgctatggactattggggccagggaacaagcgtgaccgtgtctagtacgcgtgcctctacaaagggaccctccgtgtttcctctggctcccagcagcaagtctacaagcggaggaacagccgctctgggctgcctggtcaaggattactttcccgagcctgtgaccgtgtcctggaatagcggagcactgacaagcggcgtgcacacctttccagccgtgctgcaaagcagcggcctgtactctctgagcagcgtggtcacagtgcctagctctagcctgggcacccagacctacatctgcaatgtgaaccacaagcctagcaacaccaaggtggacaagagagtggaacccaagagctgtatccccgaggacacattcttcccaagccccgagagcagctgcgacgtgaagctggtggaaaagagcttcgagacagacaccaacctgaacttccagaacctgagcgtgatcggcctgcggatgctgttcgccaaaaccgtggccgtgaacttcctgctgaccgccaagctgttcttcctc

SEQ ID NO: 40163 - DNA, 1881 bp, synthetic construct
  source 1..1881: mol_type = other DNA
atggccttaccagtgaccgccttgctcctgccgctggccttgctgctccacgccgccaggccggacatccagatgacacagagccctagcagcctgtctgccagcgtgggagacagagtgaccatcacatgcaaggccagcgaccacatcaacaactggctggcctggtatcagcagaagcctggacaggcccctaagctgctgatctacggcgctaccacactggaaacaggcgtgcccagcagattttctggcagcggctctggcaccgactacaccctgacaatatccagcctccagcctgaggacttcgccacctactactgtcagcagagctggaacaccccttggacattcggccagggcaccaagctggaaatcaagagactcgagggacagcctaaggccaatcctaccgtgacactgttccctccaagcagcgaagaactccaggccaacaaggccacacttgtgtgcctgatctccgacttctaccctggggctgtgacagtggcttggaaggccgatggatctcctgtgaaagccggcgtggaaaccaccaagccatccaagcagagcaacaacaaatacgccgccagctcctacctgagcctgacacctgagcagtggaagtcccacagatcctacagctgccaagtgacccacgaaggcagcaccgtggaaaagacagtggcccctacagagtgcagcggcagagccgattgcggctttaccagcgagagctaccagcagggcgtgctgagcgcctactacatgtacttgttgctgctgctgaagtccgtggtgtacttcgccatcatcacatgctgcctgctgcggagaaccgccttctgctgcaacggcgagaagtctagggccaagcgatctggatctggagcaacaaacttctcactactcaaacaagcaggtgacgtggaggagaatcccgggcctactagtatggactggatttggcgcatccttttccttgtcggcgctgctaccggcgcgcattccttcgaacaagttcagcttcaacagcctggcgctgagctggtcaaacctggcgcttctgtgaagatgagctgcaaagccagcggctacgccttcagcagctactggatcaactggatgaagcagaaacccggccagggactcgaatggatcggccaaatctatcccggcgacggcgacaccaactacaacggcaagttcaagggcagagccacactgaccgccgatacctctagcagcacagcctacatgcagctgagcagcctgaccagcgaagatagcgccgtgtacttctgtgcccggtccatcacaacagtcgtgggctgcgctatggactattggggccagggaacaagcgtgaccgtgtctagtacgcgtgcctctacaaagggaccctccgtgtttcctctggctcccagcagcaagtctacaagcggaggaacagccgctctgggctgcctggtcaaggattactttcccgagcctgtgaccgtgtcctggaatagcggagcactgacaagcggcgtgcacacctttccagccgtgctgcaaagcagcggcctgtactctctgagcagcgtggtcacagtgcctagctctagcctgggcacccagacctacatctgcaatgtgaaccacaagcctagcaacaccaaggtggacaagagagtggaacccaagagctgtatccccgaggacacattcttcccaagccccgagagcagctgcgacgtgaagctggtggaaaagagcttcgagacagacaccaacctgaacttccagaacctgagcgtgctgggcctgcggatgctgttcgccaaaaccgtggccgtgaacttcctgctgaccgccaagctgttcttcctc

SEQ ID NO: 40164 - DNA, 1881 bp, synthetic construct
  source 1..1881: mol_type = other DNA
atggccttaccagtgaccgccttgctcctgccgctggccttgctgctccacgccgccaggccggacatccagatgacacagagccctagcagcctgtctgccagcgtgggagacagagtgaccatcacatgcaaggccagcgaccacatcaacaactggctggcctggtatcagcagaagcctggacaggcccctaagctgctgatctacggcgctaccacactggaaacaggcgtgcccagcagattttctggcagcggctctggcaccgactacaccctgacaatatccagcctccagcctgaggacttcgccacctactactgtcagcagagctggaacaccccttggacattcggccagggcaccaagctggaaatcaagagactcgagggacagcctaaggccaatcctaccgtgacactgttccctccaagcagcgaagaactccaggccaacaaggccacacttgtgtgcctgatctccgacttctaccctggggctgtgacagtggcttggaaggccgatggatctcctgtgaaagccggcgtggaaaccaccaagccatccaagcagagcaacaacaaatacgccgccagctcctacctgagcctgacacctgagcagtggaagtcccacagatcctacagctgccaagtgacccacgaaggcagcaccgtggaaaagacagtggcccctacagagtgcagcggcagagccgattgcggctttaccagcgagagctaccagcagggcgtgctgagcgcctactacatgtacttgttgctgctgctgaagtccgtggtgtacttcgccatcatcacatgctgcctgctgcggagaaccgccttctgctgcaacggcgagaagtctagggccaagcgatctggatctggagcaacaaacttctcactactcaaacaagcaggtgacgtggaggagaatcccgggcctactagtatggactggatttggcgcatccttttccttgtcggcgctgctaccggcgcgcattccttcgaacaagttcagcttcaacagcctggcgctgagctggtcaaacctggcgcttctgtgaagatgagctgcaaagccagcggctacgccttcagcagctactggatcaactggatgaagcagaaacccggccagggactcgaatggatcggccaaatctatcccggcgacggcgacaccaactacaacggcaagttcaagggcagagccacactgaccgccgatacctctagcagcacagcctacatgcagctgagcagcctgaccagcgaagatagcgccgtgtacttctgtgcccggtccatcacaacagtcgtgggctgcgctatggactattggggccagggaacaagcgtgaccgtgtctagtacgcgtgcctctacaaagggaccctccgtgtttcctctggctcccagcagcaagtctacaagcggaggaacagccgctctgggctgcctggtcaaggattactttcccgagcctgtgaccgtgtcctggaatagcggagcactgacaagcggcgtgcacacctttccagccgtgctgcaaagcagcggcctgtactctctgagcagcgtggtcacagtgcctagctctagcctgggcacccagacctacatctgcaatgtgaaccacaagcctagcaacaccaaggtggacaagagagtggaacccaagagctgtatccccgaggacacattcttcccaagccccgagagcagctgcgacgtgaagctggtggaaaagagcttcgagacagacaccaacctgaacttccagaacctgaccgtgctgggcctgcggatgctgttcgccaaaaccgtggccgtgaacttcctgctgaccgccaagctgttcttcctc

SEQ ID NO: 40165 - DNA, 1881 bp, synthetic construct; identical to SEQ ID NO: 40164
  source 1..1881: mol_type = other DNA

SEQ ID NO: 40166 - DNA, 1887 bp, synthetic construct
  source 1..1887: mol_type = other DNA
atggccttaccagtgaccgccttgctcctgccgctggccttgctgctccacgccgccaggccggacatccagatgacacagagccctagcagcctgtctgccagcgtgggagacagagtgaccatcacatgcaaggccagcgaccacatcaacaactggctggcctggtatcagcagaagcctggacaggcccctaagctgctgatctacggcgctaccacactggaaacaggcgtgcccagcagattttctggcagcggctctggcaccgactacaccctgacaatatccagcctccagcctgaggacttcgccacctactactgtcagcagagctggaacaccccttggacattcggccagggcaccaagctggaaatcaagagactcgagggacagcctaaggccaatcctaccgtgacactgttccctccaagcagcgaagaactccaggccaacaaggccacacttgtgtgcctgatctccgacttctaccctggggctgtgacagtggcttggaaggccgatggatctcctgtgaaagccggcgtggaaaccaccaagccatccaagcagagcaacaacaaatacgccgccagctcctacctgagcctgacacctgagcagtggaagtcccacagatcctacagctgccaagtgacccacgaaggcagcaccgtggaaaagacagtggcccctacagagtgcagcggcagagccgattgcggctttaccagcgagagctaccagcagggcgtgctgagcgcctactacatgtacttgttgctgctgctgaagtccgtggtgtacttcgccatcatcacatgctgcctgctgcggagaaccgccttctgctgcaacggcgagaagtctagggccaagcgatctggatctggagcaacaaacttctcactactcaaacaagcaggtgacgtggaggagaatcccgggcctactagtatggactggatttggcgcatccttttccttgtcggcgctgctaccggcgcgcattccttcgaacaagttcagcttcaacagcctggcgctgagctggtcaaacctggcgcttctgtgaagatgagctgcaaagccagcggctacgccttcagcagctactggatcaactggatgaagcagaaacccggccagggactcgaatggatcggccaaatctatcccggcgacggcgacaccaactacaacggcaagttcaagggcagagccacactgaccgccgatacctctagcagcacagcctacatgcagctgagcagcctgaccagcgaagatagcgccgtgtacttctgtgcccggtccatcacaacagtcgtgggctgcgctatggactattggggccagggaacaagcgtgaccgtgtctagtacgcgtgcctctacaaagggaccctccgtgtttcctctggctcccagcagcaagtctacaagcggaggaacagccgctctgggctgcctggtcaaggattactttcccgagcctgtgaccgtgtcctggaatagcggagcactgacaagcggcgtgcacacctttccagccgtgctgcaaagcagcggcctgtactctctgagcagcgtggtcacagtgcctagctctagcctgggcacccagacctacatctgcaatgtgaaccacaagcctagcaacaccaaggtggacaagagagtggaacccaagagctgtatcttcaaagagacaaacgccacctacccctccagcgacgtgccctgtgacgccaccctgaccgagaagtccttcgagacagacatgaacctcaacttccagaacctgaccgtgctgggcctgcggatgctgttcgccaaaaccgtggccgtgaacttcctgctgaccgccaagctgttcttcctc

SEQ ID NO: 40167 - DNA, 1941 bp, synthetic construct
  source 1..1941: mol_type = other DNA
atggccttaccagtgaccgccttgctcctgccgctggccttgctgctccacgccgccaggccggacatccagatgacacagagccctagcagcctgtctgccagcgtgggagacagagtgaccatcacatgcaaggccagcgaccacatcaacaactggctggcctggtatcagcagaagcctggacaggcccctaagctgctgatctacggcgctaccacactggaaacaggcgtgcccagcagattttctggcagcggctctggcaccgactacaccctgacaatatccagcctccagcctgaggacttcgccacctactactgtcagcagagctggaacaccccttggacattcggccagggcaccaagctggaaatcaagagactcgagggacagcctaaggccaatcctaccgtgacactgttccctccaagcagcgaagaactccaggccaacaaggccacacttgtgtgcctgatctccgacttctaccctggggctgtgacagtggcttggaaggccgatggatctcctgtgaaagccggcgtggaaaccaccaagccatccaagcagagcaacaacaaatacgccgccagctcctacctgagcctgacacctgagcagtggaagtcccacagatcctacagctgccaagtgacccacgaaggcagcaccgtggaaaagacagtggcccctacagagtgcagccccatcaagaccgatgtgattacaatggaccccaaggacaactgctccaaggacgccaacgataccctgctgctccagctgaccaacaccagcgcctactacatgtacgagatcctgctgggcaaggccaccctgtacgccgtgctggtgtctgccctggtgctgatggctatggtcaagcggaaggacagccggggaagggccaagcgatctggatctggagcaacaaacttctcactactcaaacaagcaggtgacgtggaggagaatcccgggcctactagtatggactggatttggcgcatccttttccttgtcggcgctgctaccggcgcgcattccttcgaacaagttcagcttcaacagcctggcgctgagctggtcaaacctggcgcttctgtgaagatgagctgcaaagccagcggctacgccttcagcagctactggatcaactggatgaagcagaaacccggccagggactcgaatggatcggccaaatctatcccggcgacggcgacaccaactacaacggcaagttcaagggcagagccacactgaccgccgatacctctagcagcacagcctacatgcagctgagcagcctgaccagcgaagatagcgccgtgtacttctgtgcccggtccatcacaacagtcgtgggctgcgctatggactattggggccagggaacaagcgtgaccgtgtctagtacgcgtgcctctacaaagggaccctccgtgtttcctctggctcccagcagcaagtctacaagcggaggaacagccgctctgggctgcctggtcaaggattactttcccgagcctgtgaccgtgtcctggaatagcggagcactgacaagcggcgtgcacacctttccagccgtgctgcaaagcagcggcctgtactctctgagcagcgtggtcacagtgcctagctctagcctgggcacccagacctacatctgcaatgtgaaccacaagcctagcaacaccaaggtggacaagagagtggaacccaagagctgtgaagtgaaaaccgactccaccgaccacgtgaagcccaaagagacagagaacaccaagcagcccagcaagagctgccacaagcccaaggccatcgtgcacaccgagaaagtgaacatgatgagcctgaccgtgatcggcttcagaatcctgctgctgaaagtggccggctttaacctgctgatgaccctgcggctgtggtccagc

SEQ ID NO: 40168 - DNA, 1929 bp, synthetic construct; identical to SEQ ID NO: 40160
  source 1..1929: mol_type = other DNA

SEQ ID NO: 40169 - DNA, 1941 bp, synthetic construct
  source 1..1941: mol_type = other DNA
atggccttaccagtgaccgccttgctcctgccgctggccttgctgctccacgccgccaggccggacatccagatgacacagagccctagcagcctgtctgccagcgtgggagacagagtgaccatcacatgcaaggccagcgaccacatcaacaactggctggcctggtatcagcagaagcctggacaggcccctaagctgctgatctacggcgctaccacactggaaacaggcgtgcccagcagattttctggcagcggctctggcaccgactacaccctgacaatatccagcctccagcctgaggacttcgccacctactactgtcagcagagctggaacaccccttggacattcggccagggcaccaagctggaaatcaagagactcgagggacagcctaaggccaatcctaccgtgacactgttccctccaagcagcgaagaactccaggccaacaaggccacacttgtgtgcctgatctccgacttctaccctggggctgtgacagtggcttggaaggccgatggatctcctgtgaaagccggcgtggaaaccaccaagccatccaagcagagcaacaacaaatacgccgccagctcctacctgagcctgacacctgagcagtggaagtcccacagatcctacagctgccaagtgacccacgaaggcagcaccgtggaaaagacagtggcccctacagagtgcagccccatcaagaccgatgtgattacaatggaccccaaggacaactgctccaaggacgccaacgataccctgctgctccagctgaccaacaccagcgccaccatcctgtacgagatcctgctgggcaaggccaccctgtacgccgtgctggtgtctgccctggtgctgatggctatggtcaagcggaaggacagccggggaagggccaagcgatctggatctggagcaacaaacttctcactactcaaacaagcaggtgacgtggaggagaatcccgggcctactagtatggactggatttggcgcatccttttccttgtcggcgctgctaccggcgcgcattccttcgaacaagttcagcttcaacagcctggcgctgagctggtcaaacctggcgcttctgtgaagatgagctgcaaagccagcggctacgccttcagcagctactggatcaactggatgaagcagaaacccggccagggactcgaatggatcggccaaatctatcccggcgacggcgacaccaactacaacggcaagttcaagggcagagccacactgaccgccgatacctctagcagcacagcctacatgcagctgagcagcctgaccagcgaagatagcgccgtgtacttctgtgcccggtccatcacaacagtcgtgggctgcgctatggactattggggccagggaacaagcgtgaccgtgtctagtacgcgtgcctctacaaagggaccctccgtgtttcctctggctcccagcagcaagtctacaagcggaggaacagccgctctgggctgcctggtcaaggattactttcccgagcctgtgaccgtgtcctggaatagcggagcactgacaagcggcgtgcacacctttccagccgtgctgcaaagcagcggcctgtactctctgagcagcgtggtcacagtgcctagctctagcctgggcacccagacctacatctgcaatgtgaaccacaagcctagcaacaccaaggtggacaagagagtggaacccaagagctgtgaagtgaaaaccgactccaccgaccacgtgaagcccaaagagacagagaacaccaagcagcccagcaagagctgccacaagcccaaggccatcgtgcacaccgagaaagtgaacatgatgagcctgaccgtgctgggcttcagaatcctgctgctgaaagtggccggctttaacctgctgatgaccctgcggctgtggtccagc

SEQ ID NO: 40170 - DNA, 1905 bp, synthetic construct
  source 1..1905: mol_type = other DNA
atggccttaccagtgaccgccttgctcctgccgctggccttgctgctccacgccgccaggccggacatccagatgacacagagccctagcagcctgtctgccagcgtgggagacagagtgaccatcacatgcaaggccagcgaccacatcaacaactggctggcctggtatcagcagaagcctggacaggcccctaagctgctgatctacggcgctaccacactggaaacaggcgtgcccagcagattttctggcagcggctctggcaccgactacaccctgacaatatccagcctccagcctgaggacttcgccacctactactgtcagcagagctggaacaccccttggacattcggccagggcaccaagctggaaatcaagagactcgagggacagcctaaggccaatcctaccgtgacactgttccctccaagcagcgaagaactccaggccaacaaggccacacttgtgtgcctgatctccgacttctaccctggggctgtgacagtggcttggaaggccgatggatctcctgtgaaagccggcgtggaaaccaccaagccatccaagcagagcaacaacaaatacgccgccagctcctacctgagcctgacacctgagcagtggaagtcccacagatcctacagctgccaagtgacccacgaaggcagcaccgtggaaaagacagtggcccctacagagtgcagcggcagagccgattgcggctttaccagcgagagctaccagcagggcgtgctgagcgcctactacatgtacttgttgctgctgctgaagtccgtggtgtacttcgccatcatcacatgctgcctgctgcggagaaccgccttctgctgcaacggcgagaagtctagggccaagcgatctggatctggagcaacaaacttctcactactcaaacaagcaggtgacgtggaggagaatcccgggcctactagtatggactggatttggcgcatccttttccttgtcggcgctgctaccggcgcgcattccttcgaacaagttcagcttcaacagcctggcgctgagctggtcaaacctggcgcttctgtgaagatgagctgcaaagccagcggctacgccttcagcagctactggatcaactggatgaagcagaaacccggccagggactcgaatggatcggccaaatctatcccggcgacggcgacaccaactacaacggcaagttcaagggcagagccacactgaccgccgatacctctagcagcacagcctacatgcagctgagcagcctgaccagcgaagatagcgccgtgtacttctgtgcccggtccatcacaacagtcgtgggctgcgctatggactattggggccagggaacaagcgtgaccgtgtctagtacgcgtgcctctacaaagggaccctccgtgtttcctctggctcccagcagcaagtctacaagcggaggaacagccgctctgggctgcctggtcaaggattactttcccgagcctgtgaccgtgtcctggaatagcggagcactgacaagcggcgtgcacacctttccagccgtgctgcaaagcagcggcctgtactctctgagcagcgtggtcacagtgcctagctctagcctgggcacccagacctacatctgcaatgtgaaccacaagcctagcaacaccaaggtggacaagagagtggaacccaagagctgtgaagtgaaaaccgactccaccgaccacgtgaagcccaaagagacagagaacaccaagcagcccagcaagagctgccacaagcccaaggccatcgtgcacaccgagaaagtgaacatgatgagcctgaccgtgctgggcttcagaatcctgctgctgaaagtggccggctttaacctgctgatgaccctgcggctgtggtccagc

SEQ ID NO: 40171 - DNA, 1917 bp, synthetic construct
  source 1..1917: mol_type = other DNA
atggccttaccagtgaccgccttgctcctgccgctggccttgctgctccacgccgccaggccggacatccagatgacacagagccctagcagcctgtctgccagcgtgggagacagagtgaccatcacatgcaaggccagcgaccacatcaacaactggctggcctggtatcagcagaagcctggacaggcccctaagctgctgatctacggcgctaccacactggaaacaggcgtgcccagcagattttctggcagcggctctggcaccgactacaccctgacaatatccagcctccagcctgaggacttcgccacctactactgtcagcagagctggaacaccccttggacattcggccagggcaccaagctggaaatcaagagactcgagggacagcctaaggccaatcctaccgtgacactgttccctccaagcagcgaagaactccaggccaacaaggccacacttgtgtgcctgatctccgacttctaccctggggctgtgacagtggcttggaaggccgatggatctcctgtgaaagccggcgtggaaaccaccaagccatccaagcagagcaacaacaaatacgccgccagctcctacctgagcctgacacctgagcagtggaagtcccacagatcctacagctgccaagtgacccacgaaggcagcaccgtggaaaagacagtggcccctacagagtgcagccccatcaagaccgatgtgattacaatggaccccaaggacaactgctccaaggacgccaacgataccctgctgctccagctgaccaacaccagcgcctactacatgtacgagatcctgctgggcaaggccaccctgtacgccgtgctggtgtctgccctggtgctgatggctatggtcaagcggaaggacagccggggaagggccaagcgatctggatctggagcaacaaacttctcactactcaaacaagcaggtgacgtggaggagaatcccgggcctactagtatggactggatttggcgcatccttttccttgtcggcgctgctaccggcgcgcattccttcgaacaagttcagcttcaacagcctggcgctgagctggtcaaacctggcgcttctgtgaagatgagctgcaaagccagcggctacgccttcagcagctactggatcaactggatgaagcagaaacccggccagggactcgaatggatcggccaaatctatcccggcgacggcgacaccaactacaacggcaagttcaagggcagagccacactgaccgccgatacctctagcagcacagcctacatgcagctgagcagcctgaccagcgaagatagcgccgtgtacttctgtgcccggtccatcacaacagtcgtgggctgcgctatggactattggggccagggaacaagcgtgaccgtgtctagtacgcgtgcctctacaaagggaccctccgtgtttcctctggctcccagcagcaagtctacaagcggaggaacagccgctctgggctgcctggtcaaggattactttcccgagcctgtgaccgtgtcctggaatagcggagcactgacaagcggcgtgcacacctttccagccgtgctgcaaagcagcggcctgtactctctgagcagcgtggtcacagtgcctagctctagcctgggcacccagacctacatctgcaatgtgaaccacaagcctagcaacaccaaggtggacaagagagtggaacccaagagctgtatccccgaggacacattcttcccaagccccgagagcagctgcgacgtgaagctggtggaaaagagcttcgagacagacaccaacctgaacttccagaacctgagcgtgatcggcctgcggatgctgttcgccaaaaccgtggccgtgaacttcctgctgaccgccaagctgttcttcctc

SEQ ID NO: 40172 - DNA, 1956 bp, synthetic construct
  source 1..1956: mol_type = other DNA
atggccttaccagtgaccgccttgctcctgccgctggccttgctgctccacgccgccaggccgagctacgtgctgacacagcctccatccgtgtctgtggctccaggacagaccgccagaatcacatgcggcggcaacaacatcggcggcaagagcgtgcactggtatcagcagccacctggacaggctccagtggtggtggtgtacgacgacagcgatagacctagcggcatccccgagagattcagcggcagcaattccggcaataccgccacactgaccatcagcagagtggaagctggcgacgaggccgtgtactactgccaagtgtgggacagcagcagcgatcacgtggtgtttggcggcggaacaaagctgacagtgcttctcgaggagggacagcctaaggccaatcctaccgtgacactgttccctccaagcagcgaagaactccaggccaacaaggccacacttgtgtgcctgatctccgacttctaccctggggctgtgacagtggcttggaaggccgatggatctcctgtgaaagccggcgtggaaaccaccaagccatccaagcagagcaacaacaaatacgccgccagctcctacctgagcctgacacctgagcagtggaagtcccacagatcctacagctgccaagtgacccacgaaggcagcaccgtggaaaagacagtggcccctacagagtgcagccccatcaagaccgatgtgattacaatggaccccaaggacaactgctccaaggacgccaacgataccctgctgctccagctgaccaacaccagcgcctactacatgtacgagatcctgctgggcaaggccaccctgtacgccgtgctggtgtctgccctggtgctgatggctatggtcaagcggaaggacagccggggacgcgccaagagaagcggatctggcgtgaagcagaccctgaatttcgacctgctgaagctggctggcgacgtggaatccaacccaggccctactagtatggactggatttggcgcatccttttccttgtcggcgctgctaccggcgcgcattccttcgaacaactccagctgcaagagtctggccctggcctggtcaagcctagcgaaacactgagcctgacctgtaccgtgtctggcggctctatcagctccagcagctatttctggggctggatcagacaacctcctggcaaaggactggaatggatcggctccatctactacagcggcatcacctactacaaccccagcctgaagtccagagtgaccatctccgtggacaccagcaagaaccagttctccctgaagctgagcagcgtgacagccgccgataccgccgtgtattattgtgccagacatgacggcgctgtggccggcctgtttgattattggggacagggcaccctggtcaccgtgtcatctgctacgcgtgcctctacaaagggaccctccgtgtttcctctggctcccagcagcaagtctacaagcggaggaacagccgctctgggctgcctggtcaaggattactttcccgagcctgtgaccgtgtcctggaatagcggagcactgacaagcggcgtgcacacctttccagccgtgctgcaaagcagcggcctgtactctctgagcagcgtggtcacagtgcctagctctagcctgggcacccagacctacatctgcaatgtgaaccacaagcctagcaacaccaaggtggacaagagagtggaacccaagagctgtgaagtgaaaaccgactccaccgaccacgtgaagcccaaagagacagagaacaccaagcagcccagcaagagctgccacaagcccaaggccatcgtgcacaccgagaaagtgaacatgatgagcctgaccgtgctgggcttcagaatcctgctgctgaaagtggccggctttaacctgctgatgaccctgcggctgtggtccagc

SEQ ID NO: 40173 - DNA, 1953 bp, synthetic construct
  source 1..1953: mol_type = other DNA
atggccttaccagtgaccgccttgctcctgccgctggccttgctgctccacgccgccaggccggacatccagatgacacagagccctagcagcctgtctgccagcgtgggagacagagtgaccatcacatgcaaggccagcgaccacatcaacaactggctggcctggtatcagcagaagcctggacaggcccctaagctgctgatctacggcgctaccacactggaaacaggcgtgcccagcagattttctggcagcggctctggcaccgactacaccctgacaatatccagcctccagcctgaggacttcgccacctactactgtcagcagagctggaacaccccttggacattcggccagggcaccaagctggaaatcaagagactcgaggagggacagcctaaggccaatcctaccgtgacactgttccctccaagcagcgaagaactccaggccaacaaggccacacttgtgtgcctgatctccgacttctaccctggggctgtgacagtggcttggaaggccgatggatctcctgtgaaagccggcgtggaaaccaccaagccatccaagcagagcaacaacaaatacgccgccagctcctacctgagcctgacacctgagcagtggaagtcccacagatcctacagctgccaagtgacccacgaaggcagcaccgtggaaaagacagtggcccctacagagtgcagccccatcaagaccgatgtgattacaatggaccccaaggacaactgctccaaggacgccaacgataccctgctgctccagctgaccaacaccagcgcctactacatgtacgagatcctgctgggcaaggccaccctgtacgccgtgctggtgtctgccctggtgctgatggctatggtcaagcggaaggacagccggggacgcgccaagagaagcggatctggcgtgaagcagaccctgaatttcgacctgctgaagctggctggcgacgtggaatccaacccaggccctactagtatggactggatttggcgcatccttttccttgtcggcgctgctaccggcgcgcattccttcgaacaagttcagcttcaacagcctggcgctgagctggtcaaacctggcgcttctgtgaagatgagctgcaaagccagcggctacaccttcagcagctactggatcaactggatgaagcagaaacccggccagggactcgaatggatcggccaaatctatcccggcgacggcgacaccaactacaacggcaagttcaagggcagagccacactgaccgccgatacctctagcagcacagcctacatgcagctgagcagcctgaccagcgaagatagcgccgtgtacttctgtgcccggtccatcacaacagtcgtgggctgcgctatggactattggggccagggaacaagcgtgaccgtgtctagtacgcgtgcctctacaaagggaccctccgtgtttcctctggctcccagcagcaagtctacaagcggaggaacagccgctctgggctgcctggtcaaggattactttcccgagcctgtgaccgtgtcctggaatagcggagcactgacaagcggcgtgcacacctttccagccgtgctgcaaagcagcggcctgtactctctgagcagcgtggtcacagtgcctagctctagcctgggcacccagacctacatctgcaatgtgaaccacaagcctagcaacaccaaggtggacaagagagtggaacccaagagctgtgaagtgaaaaccgactccaccgaccacgtgaagcccaaagagacagagaacaccaagcagcccagcaagagctgccacaagcccaaggccatcgtgcacaccgagaaagtgaacatgatgagcctgaccgtgctgggcttcagaatcctgctgctgaaagtggccggctttaacctgctgatgaccctgcggctgtggtccagc

SEQ ID NO: 40174 - DNA, 1953 bp, synthetic construct
  source 1..1953: mol_type = other DNA
atggccttaccagtgaccgccttgctcctgccgctggccttgctgctccacgccgccaggccggacatccagatgacacagagccctagcagcctgtctgccagcgtgggagacagagtgaccatcacatgcaaggccagcgaccacatcaacaactggctggcctggtatcagcagaagcctggacaggcccctaagctgctgatctacggcgctaccacactggaaacaggcgtgcccagcagattttctggcagcggctctggcaccgactacaccctgacaatatccagcctccagcctgaggacttcgccacctactactgtcagcagagctggaacaccccttggacattcggccagggcaccaagctggaaatcaagagactcgaggagggacagcctaaggccaatcctaccgtgacactgttccctccaagcagcgaagaactccaggccaacaaggccacacttgtgtgcctgatctccgacttctaccctggggctgtgacagtggcttggaaggccgatggatctcctgtgaaagccggcgtggaaaccaccaagccatccaagcagagcaacaacaaatacgccgccagctcctacctgagcctgacacctgagcagtggaagtcccacagatcctacagctgccaagtgacccacgaaggcagcaccgtggaaaagacagtggcccctacagagtgcagccccatcaagaccgatgtgattacaatggaccccaaggacaactgctccaaggacgccaacgataccctgctgctccagctgaccaacaccagcgcctactacatgtacgagatcctgctgggcaaggccaccctgtacgccgtgctggtgtctgccctggtgctgatggctatggtcaagcggaaggacagccggggacgcgccaagagaagcggatctggcgtgaagcagaccctgaatttcgacctgctgaagctggctggcgacgtggaatccaacccaggccctactagtatggactggatttggcgcatccttttccttgtcggcgctgctaccggcgcgcattccttcgaacaagttcagcttcaacagcctggcgctgagctggtcaaacctggcgcttctgtgaagatgagctgcaaagccagcggctacgccttcagcagctcttggatcaactggatgaagcagaaacccggccagggactcgaatggatcggccaaatctatcccggcgacggcgacaccaactacaacggcaagttcaagggcagagccacactgaccgccgatacctctagcagcacagcctacatgcagctgagcagcctgaccagcgaagatagcgccgtgtacttctgtgcccggtccatcacaacagtcgtgggctgcgctatggactattggggccagggaacaagcgtgaccgtgtctagtacgcgtgcctctacaaagggaccctccgtgtttcctctggctcccagcagcaagtctacaagcggaggaacagccgctctgggctgcctggtcaaggattactttcccgagcctgtgaccgtgtcctggaatagcggagcactgacaagcggcgtgcacacctttccagccgtgctgcaaagcagcggcctgtactctctgagcagcgtggtcacagtgcctagctctagcctgggcacccagacctacatctgcaatgtgaaccacaagcctagcaacaccaaggtggacaagagagtggaacccaagagctgtgaagtgaaaaccgactccaccgaccacgtgaagcccaaagagacagagaacaccaagcagcccagcaagagctgccacaagcccaaggccatcgtgcacaccgagaaagtgaacatgatgagcctgaccgtgctgggcttcagaatcctgctgctgaaagtggccggctttaacctgctgatgaccctgcggctgtggtccagc

SEQ ID NO: 40175 - DNA, 1953 bp, synthetic construct
  source 1..1953: mol_type = other DNA
atggccttaccagtgaccgccttgctcctgccgctggccttgctgctccacgccgccaggccggagatcgtgctgacacagagccctgccaccctgtctctgagccctggcgaaagagccaccctgagctgtagagccagccagagcgtgtccagctacctggcctggtatcagcagaagcccggccaggctccccggctgctgatctacgatgccagcaatagagccaccggcatccccgccagattttccggctctggcagcggcaccgacttcaccctgaccatcagctccctggaacccgaggacttcgccgtgtactactgccagcagcggagcaactggcccatcacattcggccagggcacccggctggaaatcaaactcgaggagggacagcctaaggccaatcctaccgtgacactgttccctccaagcagcgaagaactccaggccaacaaggccacacttgtgtgcctgatctccgacttctaccctggggctgtgacagtggcttggaaggccgatggatctcctgtgaaagccggcgtggaaaccaccaagccatccaagcagagcaacaacaaatacgccgccagctcctacctgagcctgacacctgagcagtggaagtcccacagatcctacagctgccaagtgacccacgaaggcagcaccgtggaaaagacagtggcccctacagagtgcagccccatcaagaccgatgtgattacaatggaccccaaggacaactgctccaaggacgccaacgataccctgctgctccagctgaccaacaccagcgcctactacatgtacgagatcctgctgggcaaggccaccctgtacgccgtgctggtgtctgccctggtgctgatggctatggtcaagcggaaggacagccggggacgcgccaagagaagcggatctggcgtgaagcagaccctgaatttcgacctgctgaagctggctggcgacgtggaatccaacccaggccctactagtatggactggatttggcgcatccttttccttgtcggcgctgctaccggcgcgcattccttcgaagaagtgcagctggtggaatcaggcggcggactggtgcagcctggcagaagcctgagactgagctgtgccgccagcggcttcaccttcaacgactacgccatgcactgggtgcgccaggcccctggaaaaggactggaatgggtgtccacaatcagctggaacagcggcagcatcggctacgccgatagcgtgaagggccggttcaccatcagccgggacaacgccaagaagtccctgtacctccagatgaacagcctgcgggccgaggacacagccctgtactattgcgccaaggacatccagtacggcaactactactacggcatggacgtgtggggccagggaaccaccgtgaccgtgtcatctacgcgtgcctctacaaagggaccctccgtgtttcctctggctcccagcagcaagtctacaagcggaggaacagccgctctgggctgcctggtcaaggattactttcccgagcctgtgaccgtgtcctggaatagcggagcactgacaagcggcgtgcacacctttccagccgtgctgcaaagcagcggcctgtactctctgagcagcgtggtcacagtgcctagctctagcctgggcacccagacctacatctgcaatgtgaaccacaagcctagcaacaccaaggtggacaagagagtggaacccaagagctgtgaagtgaaaaccgactccaccgaccacgtgaagcccaaagagacagagaacaccaagcagcccagcaagagctgccacaagcccaaggccatcgtgcacaccgagaaagtgaacatgatgagcctgaccgtgctgggcttcagaatcctgctgctgaaagtggccggctttaacctgctgatgaccctgcggctgtggtccagc

SEQ ID NO: 40176 - DNA, 1962 bp, synthetic construct
  source 1..1962: mol_type = other DNA
atggccttaccagtgaccgccttgctcctgccgctggccttgctgctccacgccgccaggccgatccagatgacccagagccccagcagcctgtctgccagcgtgggcgacagagtgaccatcacctgtcggagcagccagagcatcgtgcactccgtgggcaacaccttcctggaatggtatcagcagaagcccggcaaggcccccaagctgctgatctacaaggtgtccaacagattcagcggcgtgcccagcaggtttagcggctctggcagcggcaccgacttcaccctgaccatctctagcctccagcccgaggacttcgccacctactactgttttcaaggcagccagttcccctacaccttcggccagggaacaaaggtggaaatcaagcggctcgaggagggacagcctaaggccaatcctaccgtgacactgttccctccaagcagcgaagaactccaggccaacaaggccacacttgtgtgcctgatctccgacttctaccctggggctgtgacagtggcttggaaggccgatggatctcctgtgaaagccggcgtggaaaccaccaagccatccaagcagagcaacaacaaatacgccgccagctcctacctgagcctgacacctgagcagtggaagtcccacagatcctacagctgccaagtgacccacgaaggcagcaccgtggaaaagacagtggcccctacagagtgcagccccatcaagaccgatgtgattacaatggaccccaaggacaactgctccaaggacgccaacgataccctgctgctccagctgaccaacaccagcgcctactacatgtacgagatcctgctgggcaaggccaccctgtacgccgtgctggtgtctgccctggtgctgatggctatggtcaagcggaaggacagccggggacgcgccaagagaagcggatctggcgtgaagcagaccctgaatttcgacctgctgaagctggctggcgacgtggaatccaacccaggccctactagtatggactggatttggcgcatccttttccttgtcggcgctgctaccggcgcgcattccttcgaagaagtgcaactggtggaaagcggaggcggcctggtgcagcctggcggatctctgagactgagctgtgccgccagcggctacgagttcagccggtcctggatgaactgggtgcgccaggcccctggcaagggactggaatgggtgggaagaatctaccccggcgacggcgacaccaactacagcggcaagttcaagggccggttcaccatcagcgccgacaccagcaagaacaccgcctacctccagatgaacagcctgcgggccgaggataccgccgtgtactactgtgccagagatggcagctcctgggactggtacttcgacgtgtggggacagggaacccttgtgaccgtgtccagcacgcgtgcctctacaaagggaccctccgtgtttcctctggctcccagcagcaagtctacaagcggaggaacagccgctctgggctgcctggtcaaggattactttcccgagcctgtgaccgtgtcctggaatagcggagcactgacaagcggcgtgcacacctttccagccgtgctgcaaagcagcggcctgtactctctgagcagcgtggtcacagtgcctagctctagcctgggcacccagacctacatctgcaatgtgaaccacaagcctagcaacaccaaggtggacaagagagtggaacccaagagctgtgaagtgaaaaccgactccaccgaccacgtgaagcccaaagagacagagaacaccaagcagcccagcaagagctgccacaagcccaaggccatcgtgcacaccgagaaagtgaacatgatgagcctgaccgtgctgggcttcagaatcctgctgctgaaagtggccggctttaacctgctgatgaccctgcggctgtggtccagc

SEQ ID NO: 40177 - DNA, 1974 bp, synthetic construct
  source 1..1974: mol_type = other DNA
atggccttaccagtgaccgccttgctcctgccgctggccttgctgctccacgccgccaggccggaactgcaaagcgtgctgacacagcctcctagcgcctctggaacacctggacagagagtgacaatcagctgctccggcagctccagcaacatcggcagcaactacgtgaactggtatcagcagctgcctggcacagcccctaaactgctgatctacggcgactaccagaggccaagcggcgtgccagatagattcagcggcagcaagtctggcacaagcgccagcctggctatctctggactgagaagcgaggacgaggccgactactactgtgccaccagagatgatagcctgagcggcagcgtggtgtttggcacaggcacaaagctgacagtgctgggcctcgaggagggacagcctaaggccaatcctaccgtgacactgttccctccaagcagcgaagaactccaggccaacaaggccacacttgtgtgcctgatctccgacttctaccctggggctgtgacagtggcttggaaggccgatggatctcctgtgaaagccggcgtggaaaccaccaagccatccaagcagagcaacaacaaatacgccgccagctcctacctgagcctgacacctgagcagtggaagtcccacagatcctacagctgccaagtgacccacgaaggcagcaccgtggaaaagacagtggcccctacagagtgcagccccatcaagaccgatgtgattacaatggaccccaaggacaactgctccaaggacgccaacgataccctgctgctccagctgaccaacaccagcgcctactacatgtacgagatcctgctgggcaaggccaccctgtacgccgtgctggtgtctgccctggtgctgatggctatggtcaagcggaaggacagccggggacgcgccaagagaagcggatctggcgtgaagcagaccctgaatttcgacctgctgaagctggctggcgacgtggaatccaacccaggccctactagtatggactggatttggcgcatccttttccttgtcggcgctgctaccggcgcgcattccttcgaagaagttcagctggttcagagcggagccgaagtgaagaagcctggcgagagcctgaagattagctgcaaaggcagcggctacggcttcaccagctattggatcggctgggtccgacagatgcctggcaaaggactggaatggatgggcatcattcaccccgacgacagcgacaccaagtacagccctagcttccagggccaagtgaccatcagcgccgacaagagcatcagcacagcctacctccagtggtcctctctgaaggccagcgataccgccatgtactactgcgccagcagctacctgagaggactgtggggcggctacttcgatttttggggccagggcacactggtcaccgttagttctacgcgtgcctctacaaagggaccctccgtgtttcctctggctcccagcagcaagtctacaagcggaggaacagccgctctgggctgcctggtcaaggattactttcccgagcctgtgaccgtgtcctggaatagcggagcactgacaagcggcgtgcacacctttccagccgtgctgcaaagcagcggcctgtactctctgagcagcgtggtcacagtgcctagctctagcctgggcacccagacctacatctgcaatgtgaaccacaagcctagcaacaccaaggtggacaagagagtggaacccaagagctgtgaagtgaaaaccgactccaccgaccacgtgaagcccaaagagacagagaacaccaagcagcccagcaagagctgccacaagcccaaggccatcgtgcacaccgagaaagtgaacatgatgagcctgaccgtgctgggcttcagaatcctgctgctgaaagtggccggctttaacctgctgatgaccctgcggctgtggtccagc

SEQ ID NO: 40178 - DNA, 1965 bp, synthetic construct
  source 1..1965: mol_type = other DNA
atggccttaccagtgaccgccttgctcctgccgctggccttgctgctccacgccgccaggccggacttcgtgatgacacagagccctgatagcctggccgtgtctctcggcgagcgagtgaccatgagctgcaagtctagccagagcctgctgaacagcggcaaccagaagaactacctgacctggtatcagcagaagcccggccagcctcctaagctgctgatctactgggccagcaccagagaaagcggcgtgcccgatagattttctggctctggcagcggcaccgacttcaccctgacaatttctagcctgcaagccgaggacgtggccgtgtactactgccagaacgactacagctacccctacaccttcggccagggcaccaagctggaaatcaaactcgaggagggacagcctaaggccaatcctaccgtgacactgttccctccaagcagcgaagaactccaggccaacaaggccacacttgtgtgcctgatctccgacttctaccctggggctgtgacagtggcttggaaggccgatggatctcctgtgaaagccggcgtggaaaccaccaagccatccaagcagagcaacaacaaatacgccgccagctcctacctgagcctgacacctgagcagtggaagtcccacagatcctacagctgccaagtgacccacgaaggcagcaccgtggaaaagacagtggcccctacagagtgcagccccatcaagaccgatgtgattacaatggaccccaaggacaactgctccaaggacgccaacgataccctgctgctccagctgaccaacaccagcgcctactacatgtacgagatcctgctgggcaaggccaccctgtacgccgtgctggtgtctgccctggtgctgatggctatggtcaagcggaaggacagccggggacgcgccaagagaagcggatctggcgtgaagcagaccctgaatttcgacctgctgaagctggctggcgacgtggaatccaacccaggccctactagtatggactggatttggcgcatccttttccttgtcggcgctgctaccggcgcgcattccttcgaagaagtgcaactggttcagagcggagccgagctgaagaaacctggggccagcgtgaaggtgtcctgtaaagccagcggctacacctttaccgactactacatgaaatgggtccgacaggccccaggccagggactcgaatggatcggcgatattatccccagcaacggggccaccttctacaaccagaaattcaagggccgcgtgaccatcaccgtggacaagagcacaagcaccgcctacatggaactgagcagcctgagaagcgaggacaccgccgtgtattattgcgccagaagccatctgctgcgggccagttggttcgcctattggggacagggaaccctggtcaccgttagctctacgcgtgcctctacaaagggaccctccgtgtttcctctggctcccagcagcaagtctacaagcggaggaacagccgctctgggctgcctggtcaaggattactttcccgagcctgtgaccgtgtcctggaatagcggagcactgacaagcggcgtgcacacctttccagccgtgctgcaaagcagcggcctgtactctctgagcagcgtggtcacagtgcctagctctagcctgggcacccagacctacatctgcaatgtgaaccacaagcctagcaacaccaaggtggacaagagagtggaacccaagagctgtgaagtgaaaaccgactccaccgaccacgtgaagcccaaagagacagagaacaccaagcagcccagcaagagctgccacaagcccaaggccatcgtgcacaccgagaaagtgaacatgatgagcctgaccgtgctgggcttcagaatcctgctgctgaaagtggccggctttaacctgctgatgaccctgcggctgtggtccagc

SEQ ID NO: 40179 - DNA, 1971 bp, synthetic construct
  source 1..1971: mol_type = other DNA
atggccttaccagtgaccgccttgctcctgccgctggccttgctgctccacgccgccaggccggagatcgtgctgacacagtctcccgccacactgtcactgtctccaggcgaaagagccacactgagctgtagcgtgtccagcagcatcagcagcagcaacctgcactggtatcagcagaagcctggacaggcccctcggctgctgatctacgccacatctaatctggcctctggcatccccgccagattttctggctctggaagcggcaccgacttcaccctgaccataagcagcctggaacctgaggacttcgccgtgtactactgccagcagtggtccagctatccccacacatttggcggaggcaccaaggtggaaatcaagagactcgaggagggacagcctaaggccaatcctaccgtgacactgttccctccaagcagcgaagaactccaggccaacaaggccacacttgtgtgcctgatctccgacttctaccctggggctgtgacagtggcttggaaggccgatggatctcctgtgaaagccggcgtggaaaccaccaagccatccaagcagagcaacaacaaatacgccgccagctcctacctgagcctgacacctgagcagtggaagtcccacagatcctacagctgccaagtgacccacgaaggcagcaccgtggaaaagacagtggcccctacagagtgcagccccatcaagaccgatgtgattacaatggaccccaaggacaactgctccaaggacgccaacgataccctgctgctccagctgaccaacaccagcgcctactacatgtacgagatcctgctgggcaaggccaccctgtacgccgtgctggtgtctgccctggtgctgatggctatggtcaagcggaaggacagccggggacgcgccaagagaagcggatctggcgtgaagcagaccctgaatttcgacctgctgaagctggctggcgacgtggaatccaacccaggccctactagtatggactggatttggcgcatccttttccttgtcggcgctgctaccggcgcgcattccttcgaacaggttcagctggttcagagcggagccgaagtgaagaaacctggggcctctgtgaaggtgtcctgcaaggcttccggctacacctttaccaactacctgatcgagtgggtccgacaggctccaggacaaggactggaatggatgggcctgattaaccctggcagcggcggcaccaactacaacgagaagttcaagggcagagtgaccatgaccaccgacaccagcacaagcaccgcctacatggaactgcggagcctgagaagcgacgacaccgccgtgtattattgcgccagaagaagccctctcggctcttggatctactacgcctatgacggcgtggcctattggggccagggaacactggttacagtgtcctctacgcgtgcctctacaaagggaccctccgtgtttcctctggctcccagcagcaagtctacaagcggaggaacagccgctctgggctgcctggtcaaggattactttcccgagcctgtgaccgtgtcctggaatagcggagcactgacaagcggcgtgcacacctttccagccgtgctgcaaagcagcggcctgtactctctgagcagcgtggtcacagtgcctagctctagcctgggcacccagacctacatctgcaatgtgaaccacaagcctagcaacaccaaggtggacaagagagtggaacccaagagctgtgaagtgaaaaccgactccaccgaccacgtgaagcccaaagagacagagaacaccaagcagcccagcaagagctgccacaagcccaaggccatcgtgcacaccgagaaagtgaacatgatgagcctgaccgtgctgggcttcagaatcctgctgctgaaagtggccggctttaacctgctgatgaccctgcggctgtggtccagc

SEQ ID NO: 40180 - DNA, 1938 bp, synthetic construct
  source 1..1938: mol_type = other DNA
atggccttaccagtgaccgccttgctcctgccgctggccttgctgctccacgccgccaggccgcagatcgtgctgacacagagccccgccatcatgtctgttagccctggcgagaaagtgaccatgacctgtagcgccagcagcagcgtgaactacatgcactggttccagcagaagcccggcacaagccctaagctgtgggtgtacagcaccagcaatctggcctctggcgtgccagccagattttctggctctggcagcggcaccagctacagcctgacaatcagcagcatggaagccgaggatgccgccacctactattgtcagcagcggagcatctacccaccttggacatttggcggaggcaccaagctggaaatcaaactcgaggagggacagcctaaggccaatcctaccgtgacactgttccctccaagcagcgaagaactccaggccaacaaggccacacttgtgtgcctgatctccgacttctaccctggggctgtgacagtggcttggaaggccgatggatctcctgtgaaagccggcgtggaaaccaccaagccatccaagcagagcaacaacaaatacgccgccagctcctacctgagcctgacacctgagcagtggaagtcccacagatcctacagctgccaagtgacccacgaaggcagcaccgtggaaaagacagtggcccctacagagtgcagccccatcaagaccgatgtgattacaatggaccccaaggacaactgctccaaggacgccaacgataccctgctgctccagctgaccaacaccagcgcctactacatgtacgagatcctgctgggcaaggccaccctgtacgccgtgctggtgtctgccctggtgctgatggctatggtcaagcggaaggacagccggggacgcgccaagagaagcggatctggcgtgaagcagaccctgaatttcgacctgctgaagctggctggcgacgtggaatccaacccaggccctactagtatggactggatttggcgcatccttttccttgtcggcgctgctaccggcgcgcattccttcgaagaagttcagctccagcagagcggccctgagcttgtgaaacctggcgcttccgtgaagatcagctgcaaggccagcggctacagcttcaccggctacaccatgaactgggtcaagcagtcccacggcaagaacctggaatggatcggcctgattaacccctacaacggcggcacctcctacaaccagaagttcaaggccaaggccacactgaccgtggacaagagcagcagcacagcctacatgcagctgaagtccctgaccagcgaggacagcgccgtgtactactgcgccagagattacggctacgtgctggactattggggccagggcacaagcgtgacagtgtctagtacgcgtgcctctacaaagggaccctccgtgtttcctctggctcccagcagcaagtctacaagcggaggaacagccgctctgggctgcctggtcaaggattactttcccgagcctgtgaccgtgtcctggaatagcggagcactgacaagcggcgtgcacacctttccagccgtgctgcaaagcagcggcctgtactctctgagcagcgtggtcacagtgcctagctctagcctgggcacccagacctacatctgcaatgtgaaccacaagcctagcaacaccaaggtggacaagagagtggaacccaagagctgtgaagtgaaaaccgactccaccgaccacgtgaagcccaaagagacagagaacaccaagcagcccagcaagagctgccacaagcccaaggccatcgtgcacaccgagaaagtgaacatgatgagcctgaccgtgctgggcttcagaatcctgctgctgaaagtggccggctttaacctgctgatgaccctgcggctgtggtccagc

SEQ ID NO: 40181 - DNA, 1944 bp, synthetic construct
  source 1..1944: mol_type = other DNA
atggccttaccagtgaccgccttgctcctgccgctggccttgctgctccacgccgccaggccggacatcgtgatgacccagagccctgccaccctgtccgtgtctccaggcgaaagagccaccctgagctgcagagcttcccagagcgtgtccaacgacgtcgtgtggtatcagcagaagcccggccaggcccccagactgctgatctactacgccagcaacagatacaccggcatccccgccagattcagcggctctggcagcggcaccgagttcaccctgacaatcagcagcctccagagcgaggacttcgccgtgtactactgtcagcaggactacaccagcccctggaccttcggccagggcaccaagctggaaatcaagagactcgaggagggacagcctaaggccaatcctaccgtgacactgttccctccaagcagcgaagaactccaggccaacaaggccacacttgtgtgcctgatctccgacttctaccctggggctgtgacagtggcttggaaggccgatggatctcctgtgaaagccggcgtggaaaccaccaagccatccaagcagagcaacaacaaatacgccgccagctcctacctgagcctgacacctgagcagtggaagtcccacagatcctacagctgccaagtgacccacgaaggcagcaccgtggaaaagacagtggcccctacagagtgcagccccatcaagaccgatgtgattacaatggaccccaaggacaactgctccaaggacgccaacgataccctgctgctccagctgaccaacaccagcgcctactacatgtacgagatcctgctgggcaaggccaccctgtacgccgtgctggtgtctgccctggtgctgatggctatggtcaagcggaaggacagccggggacgcgccaagagaagcggatctggcgtgaagcagaccctgaatttcgacctgctgaagctggctggcgacgtggaatccaacccaggccctactagtatggactggatttggcgcatccttttccttgtcggcgctgctaccggcgcgcattccttcgaagaggtgcaactggtgcagagcggagccgaagtgaagaaacctggggccagcgtgcgggtgtcctgcaaggccagcggctacacctttaccaactacggcatgaactgggtgcgccaggctcctggacagggcctggaatggatgggctggatcaacacctacaccggcgagcccacctacgccgacgacttcaagggcagagtgaccatgaccaccgacaccagcacctccaccgcctacatggaactgcggagcctgagaagcgacgacaccgccgtgtattattgcgcccggatcggcgacagcagccccagcgattattggggccagggaaccctcgtgaccgtgtcctctacgcgtgcctctacaaagggaccctccgtgtttcctctggctcccagcagcaagtctacaagcggaggaacagccgctctgggctgcctggtcaaggattactttcccgagcctgtgaccgtgtcctggaatagcggagcactgacaagcggcgtgcacacctttccagccgtgctgcaaagcagcggcctgtactctctgagcagcgtggtcacagtgcctagctctagcctgggcacccagacctacatctgcaatgtgaaccacaagcctagcaacaccaaggtggacaagagagtggaacccaagagctgtgaagtgaaaaccgactccaccgaccacgtgaagcccaaagagacagagaacaccaagcagcccagcaagagctgccacaagcccaaggccatcgtgcacaccgagaaagtgaacatgatgagcctgaccgtgctgggcttcagaatcctgctgctgaaagtggccggctttaacctgctgatgaccctgcggctgtggtccagc

SEQ ID NO: 40182 - DNA, 1950 bp, synthetic construct
  source 1..1950: mol_type = other DNA
atggccttaccagtgaccgccttgctcctgccgctggccttgctgctccacgccgccaggccggacatccagatgacacagagccctagcagcctgtctgccagcgtgggagacagagtgaccatcacctgtagagccagccaggacgtgcggaacatcgtcgtgtggttccagcagaagcctggcaaggcccctaagctgctgatctacagcggcagctacagatacagcggcgtgcccagcagattttccggctctggctctggcaccgacttcaccctgacaatatccagcctccagcctgaggacttcgccacctactactgccagcagcactacagccctccatacacattcggccagggcaccaaggtggaaatcaagagactcgaggagggacagcctaaggccaatcctaccgtgacactgttccctccaagcagcgaagaactccaggccaacaaggccacacttgtgtgcctgatctccgacttctaccctggggctgtgacagtggcttggaaggccgatggatctcctgtgaaagccggcgtggaaaccaccaagccatccaagcagagcaacaacaaatacgccgccagctcctacctgagcctgacacctgagcagtggaagtcccacagatcctacagctgccaagtgacccacgaaggcagcaccgtggaaaagacagtggcccctacagagtgcagccccatcaagaccgatgtgattacaatggaccccaaggacaactgctccaaggacgccaacgataccctgctgctccagctgaccaacaccagcgcctactacatgtacgagatcctgctgggcaaggccaccctgtacgccgtgctggtgtctgccctggtgctgatggctatggtcaagcggaaggacagccggggacgcgccaagagaagcggatctggcgtgaagcagaccctgaatttcgacctgctgaagctggctggcgacgtggaatccaacccaggccctactagtatggactggatttggcgcatccttttccttgtcggcgctgctaccggcgcgcattccttcgaagaagttcagctggtggaatctggccctggcctggtcaagcctagcgagacactgagcctgacctgtaccgtgtccggcttcagcctgaccagatttggcgtgcactgggtccgacagccacctggcaaaggactggaatggctgggagtgatttggagaggcggcagcaccgattacaacgccgccttcatgagccggctgaccatcagcaaggacaacagcaagaaccaggtgtccctgaagctgagcagcgtgacagccgctgataccgccgtgtactactgctccaaccactactacggcagctccgactacgccctggataattggggccagggaaccctggtcaccgtgtcatctacgcgtgcctctacaaagggaccctccgtgtttcctctggctcccagcagcaagtctacaagcggaggaacagccgctctgggctgcctggtcaaggattactttcccgagcctgtgaccgtgtcctggaatagcggagcactgacaagcggcgtgcacacctttccagccgtgctgcaaagcagcggcctgtactctctgagcagcgtggtcacagtgcctagctctagcctgggcacccagacctacatctgcaatgtgaaccacaagcctagcaacaccaaggtggacaagagagtggaacccaagagctgtgaagtgaaaaccgactccaccgaccacgtgaagcccaaagagacagagaacaccaagcagcccagcaagagctgccacaagcccaaggccatcgtgcacaccgagaaagtgaacatgatgagcctgaccgtgctgggcttcagaatcctgctgctgaaagtggccggctttaacctgctgatgaccctgcggctgtggtccagc

SEQ ID NO: 40183 - DNA, 1956 bp, synthetic construct
  source 1..1956: mol_type = other DNA
atggccttaccagtgaccgccttgctcctgccgctggccttgctgctccacgccgccaggccggacatcgtgctgacccagagccctctgagcctggccgtgtctctgggacagcctgccatcatcagctgtagggccagccagagcgtgtcctttgccggcacctctctgatgcactggtatcaccagaagcccggccagcagcccagactgctgatctacagagccagcaacctggaagccggcgtgcccgatagattttccggcagcggcagcaagaccgacttcaccctgaccatcagccccgtggaagccgaagatgccgccacctactactgccagcagagcagagagtacccctacaccttcggcggaggcaccaagctggaaatcaagaggctcgaggagggacagcctaaggccaatcctaccgtgacactgttccctccaagcagcgaagaactccaggccaacaaggccacacttgtgtgcctgatctccgacttctaccctggggctgtgacagtggcttggaaggccgatggatctcctgtgaaagccggcgtggaaaccaccaagccatccaagcagagcaacaacaaatacgccgccagctcctacctgagcctgacacctgagcagtggaagtcccacagatcctacagctgccaagtgacccacgaaggcagcaccgtggaaaagacagtggcccctacagagtgcagccccatcaagaccgatgtgattacaatggaccccaaggacaactgctccaaggacgccaacgataccctgctgctccagctgaccaacaccagcgcctactacatgtacgagatcctgctgggcaaggccaccctgtacgccgtgctggtgtctgccctggtgctgatggctatggtcaagcggaaggacagccggggacgcgccaagagaagcggatctggcgtgaagcagaccctgaatttcgacctgctgaagctggctggcgacgtggaatccaacccaggccctactagtatggactggatttggcgcatccttttccttgtcggcgctgctaccggcgcgcattccttcgaacaggtccaactggtgcagagcggagccgaggtcgtgaagcctggcgcttccgtgaagattagctgcaaagccagcggctacacctttaccggctactttatgcactgggtcaagcagagccctggccagagcctggaatggatcggcagaatccacccctacgacggcgacaccttctacaaccagaagttccagggcaaggccaccctgacagtggacaagagcagcaacaccgcccacatggaactgctgagcctgaccagcgaggacttcgccgtgtactactgcaccagatacgacggcagccgggctatggactattggggccagggcaccaccgtgaccgtgtctagtacgcgtgcctctacaaagggaccctccgtgtttcctctggctcccagcagcaagtctacaagcggaggaacagccgctctgggctgcctggtcaaggattactttcccgagcctgtgaccgtgtcctggaatagcggagcactgacaagcggcgtgcacacctttccagccgtgctgcaaagcagcggcctgtactctctgagcagcgtggtcacagtgcctagctctagcctgggcacccagacctacatctgcaatgtgaaccacaagcctagcaacaccaaggtggacaagagagtggaacccaagagctgtgaagtgaaaaccgactccaccgaccacgtgaagcccaaagagacagagaacaccaagcagcccagcaagagctgccacaagcccaaggccatcgtgcacaccgagaaagtgaacatgatgagcctgaccgtgctgggcttcagaatcctgctgctgaaagtggccggctttaacctgctgatgaccctgcggctgtggtccagc

SEQ ID NO: 40184 - DNA, 1938 bp, synthetic construct
  source 1..1938: mol_type = other DNA
atggccttaccagtgaccgccttgctcctgccgctggccttgctgctccacgccgccaggccggacatccagatgacacagagccctagcagcctgtctgccagcgtgggagacagagtgaccatcacatgcaaggccagccagagcgtgtccaacgacgtgacctggtatcagcagaagcctggacaggcccctaagctgctgatctacagcgccagcaacagatacagcggagtgcccgccagattttccggctctggctacggcaccgagttcacctttaccatcagcagcgtgcagagcgaggacttcgccgtgtacttctgccagcaagactacagcagcttcggccagggcaccaagctggaaatcaagagactcgaggagggacagcctaaggccaatcctaccgtgacactgttccctccaagcagcgaagaactccaggccaacaaggccacacttgtgtgcctgatctccgacttctaccctggggctgtgacagtggcttggaaggccgatggatctcctgtgaaagccggcgtggaaaccaccaagccatccaagcagagcaacaacaaatacgccgccagctcctacctgagcctgacacctgagcagtggaagtcccacagatcctacagctgccaagtgacccacgaaggcagcaccgtggaaaagacagtggcccctacagagtgcagccccatcaagaccgatgtgattacaatggaccccaaggacaactgctccaaggacgccaacgataccctgctgctccagctgaccaacaccagcgcctactacatgtacgagatcctgctgggcaaggccaccctgtacgccgtgctggtgtctgccctggtgctgatggctatggtcaagcggaaggacagccggggacgcgccaagagaagcggatctggcgtgaagcagaccctgaatttcgacctgctgaagctggctggcgacgtggaatccaacccaggccctactagtatggactggatttggcgcatccttttccttgtcggcgctgctaccggcgcgcattccttcgaacaggtgcagctggtggaatctggacctggcgtggtgcagcctggcagaagcctgagaatcagctgtgccgtgtccggcttcagcgtgaccaactacggcgtgcactgggtgcgccagccacctggaaaaggactggaatggctgggcgtgatctgggctggcggcatcaccaactacaacagcgccttcatgtcccggctgaccatctccaaggacaacagcaagaacaccgtgtacctccagatgaacagcctgcgggccgaggacaccgccatgtactactgtgcttccagaggcggccactacggctacgccctggattattggggccagggaaccctcgtgaccgtgtcctctacgcgtgcctctacaaagggaccctccgtgtttcctctggctcccagcagcaagtctacaagcggaggaacagccgctctgggctgcctggtcaaggattactttcccgagcctgtgaccgtgtcctggaatagcggagcactgacaagcggcgtgcacacctttccagccgtgctgcaaagcagcggcctgtactctctgagcagcgtggtcacagtgcctagctctagcctgggcacccagacctacatctgcaatgtgaaccacaagcctagcaacaccaaggtggacaagagagtggaacccaagagctgtgaagtgaaaaccgactccaccgaccacgtgaagcccaaagagacagagaacaccaagcagcccagcaagagctgccacaagcccaaggccatcgtgcacaccgagaaagtgaacatgatgagcctgaccgtgctgggcttcagaatcctgctgctgaaagtggccggctttaacctgctgatgaccctgcggctgtggtccagc

SEQ ID NO: 40185 - DNA, 1950 bp, synthetic construct
  source 1..1950: mol_type = other DNA
atggccttaccagtgaccgccttgctcctgccgctggccttgctgctccacgccgccaggccggagaacgtgctgacacagagccctgccatcatgagtgcctctccaggcgagaaagtgaccatgacctgtagagccagcagcagcgtgtccagcagctacctgcactggtatcagcagaagtccggcgcaagccccaaagtgtggatctacagcaccagcaatctggcctctggcgtgccaggcagattttctggctctggcagcggcacaagctacagcctgacaatcagctccgtggaagccgaagatgccgccacctactactgccagcagtacagcggctaccccatcacatttggagccggcaccaaggtggaagtgaagagactcgaggagggacagcctaaggccaatcctaccgtgacactgttccctccaagcagcgaagaactccaggccaacaaggccacacttgtgtgcctgatctccgacttctaccctggggctgtgacagtggcttggaaggccgatggatctcctgtgaaagccggcgtggaaaccaccaagccatccaagcagagcaacaacaaatacgccgccagctcctacctgagcctgacacctgagcagtggaagtcccacagatcctacagctgccaagtgacccacgaaggcagcaccgtggaaaagacagtggcccctacagagtgcagccccatcaagaccgatgtgattacaatggaccccaaggacaactgctccaaggacgccaacgataccctgctgctccagctgaccaacaccagcgcctactacatgtacgagatcctgctgggcaaggccaccctgtacgccgtgctggtgtctgccctggtgctgatggctatggtcaagcggaaggacagccggggacgcgccaagagaagcggatctggcgtgaagcagaccctgaatttcgacctgctgaagctggctggcgacgtggaatccaacccaggccctactagtatggactggatttggcgcatccttttccttgtcggcgctgctaccggcgcgcattccttcgaacaggttcagctcaaagaatctggccccgtgctggtggccccaagccagacactgtctatcacctgtaccgtgtccggcttcagcctggcctcctacaacatccactgggtccgacagcctccaggcaaaggactggaatggctgggagtgatttgggctggcggcagcaccaactacaacagcgcactgatgagccggctgagcatcagcaaggacaacagcaagagccaggtgttcctccagatgaactccctccagaccgacgacaccgccatgtactactgcgccaagagaagcgacgactacagttggttcgcctactggggccagggcacactggttactgtgtctgcttctacgcgtgcctctacaaagggaccctccgtgtttcctctggctcccagcagcaagtctacaagcggaggaacagccgctctgggctgcctggtcaaggattactttcccgagcctgtgaccgtgtcctggaatagcggagcactgacaagcggcgtgcacacctttccagccgtgctgcaaagcagcggcctgtactctctgagcagcgtggtcacagtgcctagctctagcctgggcacccagacctacatctgcaatgtgaaccacaagcctagcaacaccaaggtggacaagagagtggaacccaagagctgtgaagtgaaaaccgactccaccgaccacgtgaagcccaaagagacagagaacaccaagcagcccagcaagagctgccacaagcccaaggccatcgtgcacaccgagaaagtgaacatgatgagcctgaccgtgctgggcttcagaatcctgctgctgaaagtggccggctttaacctgctgatgaccctgcggctgtggtccagc

SEQ ID NO: 40186 - DNA, 1962 bp, synthetic construct
  source 1..1962: mol_type = other DNA
atggccttaccagtgaccgccttgctcctgccgctggccttgctgctccacgccgccaggccggagatcgtgctgacacagtctcccgccacactgtcactgtctccaggcgaaagagccacactgagctgtagagccagccagagcgtgtcctcttacctggcctggtatcagcagaagcctggacaggctccccggctgctgatctacgatgccagcaatagagccacaggcatccccgccagattttctggctctggcagcggcaccgatttcaccctgaccataagcagcctggaacctgaggacttcgccgtgtactactgccagcagagaagcaactggcctcctacattcggccagggcaccaaggtggaaatcaaactcgaggagggacagcctaaggccaatcctaccgtgacactgttccctccaagcagcgaagaactccaggccaacaaggccacacttgtgtgcctgatctccgacttctaccctggggctgtgacagtggcttggaaggccgatggatctcctgtgaaagccggcgtggaaaccaccaagccatccaagcagagcaacaacaaatacgccgccagctcctacctgagcctgacacctgagcagtggaagtcccacagatcctacagctgccaagtgacccacgaaggcagcaccgtggaaaagacagtggcccctacagagtgcagccccatcaagaccgatgtgattacaatggaccccaaggacaactgctccaaggacgccaacgataccctgctgctccagctgaccaacaccagcgcctactacatgtacgagatcctgctgggcaaggccaccctgtacgccgtgctggtgtctgccctggtgctgatggctatggtcaagcggaaggacagccggggacgcgccaagagaagcggatctggcgtgaagcagaccctgaatttcgacctgctgaagctggctggcgacgtggaatccaacccaggccctactagtatggactggatttggcgcatccttttccttgtcggcgctgctaccggcgcgcattccttcgaacaactccagctgcaagagtctggccccggactggtcaagcctagcgaaacactgagcctgacctgtaccgtgtctggcggcagcatcagcagcagctcttattggtggggctggaccagacagcctcctggcagaggactggaatggatcggcaccatgtactacagcggcaacatctactacaaccccagcctccagagccgggccaccatctctgtggacaccagcaagaaccagttcagcctgaagctgagcagcgtgacagccgccgataccgccgtgtattattgcgccagacatgtgggctacagctacggcagacggttctggtacttcgacctgtggggcagaggcaccctggtcacagtttcttctacgcgtgcctctacaaagggaccctccgtgtttcctctggctcccagcagcaagtctacaagcggaggaacagccgctctgggctgcctggtcaaggattactttcccgagcctgtgaccgtgtcctggaatagcggagcactgacaagcggcgtgcacacctttccagccgtgctgcaaagcagcggcctgtactctctgagcagcgtggtcacagtgcctagctctagcctgggcacccagacctacatctgcaatgtgaaccacaagcctagcaacaccaaggtggacaagagagtggaacccaagagctgtgaagtgaaaaccgactccaccgaccacgtgaagcccaaagagacagagaacaccaagcagcccagcaagagctgccacaagcccaaggccatcgtgcacaccgagaaagtgaacatgatgagcctgaccgtgctgggcttcagaatcctgctgctgaaagtggccggctttaacctgctgatgaccctgcggctgtggtccagc

SEQ ID NO: 40187 - DNA, 1953 bp, synthetic construct
  source 1..1953: mol_type = other DNA
atggccttaccagtgaccgccttgctcctgccgctggccttgctgctccacgccgccaggccggacatccagatgacacagagccctagcagcctgtctgccagcgtgggagacagagtgaccatcacatgcaaggccagcgaccacatcaacaactggctggcctggtatcagcagaagcctggcaaggcccctaagctgctgatctacggcgctaccacactggaaacaggcgtgcccagcagattttctggcagcggctctggcaccgacttcaccctgacaatatccagcctccagcctgaggacttcgccacctactactgtcagcagagctggaacaccccttggacattcggccagggcaccaaggtggaaatcaagagactcgaggagggacagcctaaggccaatcctaccgtgacactgttccctccaagcagcgaagaactccaggccaacaaggccacacttgtgtgcctgatctccgacttctaccctggggctgtgacagtggcttggaaggccgatggatctcctgtgaaagccggcgtggaaaccaccaagccatccaagcagagcaacaacaaatacgccgccagctcctacctgagcctgacacctgagcagtggaagtcccacagatcctacagctgccaagtgacccacgaaggcagcaccgtggaaaagacagtggcccctacagagtgcagccccatcaagaccgatgtgattacaatggaccccaaggacaactgctccaaggacgccaacgataccctgctgctccagctgaccaacaccagcgcctactacatgtacgagatcctgctgggcaaggccaccctgtacgccgtgctggtgtctgccctggtgctgatggctatggtcaagcggaaggacagccggggacgcgccaagagaagcggatctggcgtgaagcagaccctgaatttcgacctgctgaagctggctggcgacgtggaatccaacccaggccctactagtatggactggatttggcgcatccttttccttgtcggcgctgctaccggcgcgcattccttcgaagaagttcagctggttgaatctggcggcggactggttcaacctggcggatctctgagactgagctgtgccgcctctggctacacctttagcagctactgggtcaactgggttcgacaggcccctggcaaaggactggaatgggtcgcccaaatctatcccggcgacggcgacaccaactacaacggcaagttcaagggcagattcaccatcagccgggacaacagcaagaacaccctgtacctccagatgaactccctgagagccgaggacaccgccgtgtactattgtgccagatccatcaccaccgtcgtgggctgcgctatggattattggggccagggaaccctggtcaccgtgtcctctacgcgtgcctctacaaagggaccctccgtgtttcctctggctcccagcagcaagtctacaagcggaggaacagccgctctgggctgcctggtcaaggattactttcccgagcctgtgaccgtgtcctggaatagcggagcactgacaagcggcgtgcacacctttccagccgtgctgcaaagcagcggcctgtactctctgagcagcgtggtcacagtgcctagctctagcctgggcacccagacctacatctgcaatgtgaaccacaagcctagcaacaccaaggtggacaagagagtggaacccaagagctgtgaagtgaaaaccgactccaccgaccacgtgaagcccaaagagacagagaacaccaagcagcccagcaagagctgccacaagcccaaggccatcgtgcacaccgagaaagtgaacatgatgagcctgaccgtgctgggcttcagaatcctgctgctgaaagtggccggctttaacctgctgatgaccctgcggctgtggtccagc

SEQ ID NO: 40188 - DNA, 1953 bp, synthetic construct
  source 1..1953: mol_type = other DNA
atggccttaccagtgaccgccttgctcctgccgctggccttgctgctccacgccgccaggccggacatccagatgacacagagccctagcagcctgtctgccagcgtgggagacagagtgaccatcacatgcaaggccagcgaccacatcaacaactggctggcctggtatcagcagaagcctggcaaggcccctaagctgctgatctacggcgctaccacactggaaacaggcgtgcccagcagattttctggcagcggctctggcaccgacttcaccctgacaatatccagcctccagcctgaggacttcgccacctactactgtcagcagagctggaacaccccttggacattcggccagggcaccaaggtggaaatcaagagactcgaggagggacagcctaaggccaatcctaccgtgacactgttccctccaagcagcgaagaactccaggccaacaaggccacacttgtgtgcctgatctccgacttctaccctggggctgtgacagtggcttggaaggccgatggatctcctgtgaaagccggcgtggaaaccaccaagccatccaagcagagcaacaacaaatacgccgccagctcctacctgagcctgacacctgagcagtggaagtcccacagatcctacagctgccaagtgacccacgaaggcagcaccgtggaaaagacagtggcccctacagagtgcagccccatcaagaccgatgtgattacaatggaccccaaggacaactgctccaaggacgccaacgataccctgctgctccagctgaccaacaccagcgcctactacatgtacgagatcctgctgggcaaggccaccctgtacgccgtgctggtgtctgccctggtgctgatggctatggtcaagcggaaggacagccggggacgcgccaagagaagcggatctggcgtgaagcagaccctgaatttcgacctgctgaagctggctggcgacgtggaatccaacccaggccctactagtatggactggatttggcgcatccttttccttgtcggcgctgctaccggcgcgcattccttcgaagaagttcagctggttgaatctggcggcggactggttcaacctggcggatctctgagactgagctgtgccgcctctggctacgcctttagcaactactgggtcaactgggttcgacaggcccctggcaaaggactggaatgggtcgcccaaatctatcccggcgacggcgacaccaactacaacggcaagttcaagggcagattcaccatcagccgggacaacagcaagaacaccctgtacctccagatgaactccctgagagccgaggacaccgccgtgtactattgtgccagatccatcaccaccgtcgtgggctgcgctatggattattggggccagggaaccctggtcaccgtgtcctctacgcgtgcctctacaaagggaccctccgtgtttcctctggctcccagcagcaagtctacaagcggaggaacagccgctctgggctgcctggtcaaggattactttcccgagcctgtgaccgtgtcctggaatagcggagcactgacaagcggcgtgcacacctttccagccgtgctgcaaagcagcggcctgtactctctgagcagcgtggtcacagtgcctagctctagcctgggcacccagacctacatctgcaatgtgaaccacaagcctagcaacaccaaggtggacaagagagtggaacccaagagctgtgaagtgaaaaccgactccaccgaccacgtgaagcccaaagagacagagaacaccaagcagcccagcaagagctgccacaagcccaaggccatcgtgcacaccgagaaagtgaacatgatgagcctgaccgtgctgggcttcagaatcctgctgctgaaagtggccggctttaacctgctgatgaccctgcggctgtggtccagc

SEQ ID NO: 40189 - DNA, 1944 bp, synthetic construct
  source 1..1944: mol_type = other DNA
atggccttaccagtgaccgccttgctcctgccgctggccttgctgctccacgccgccaggccggacatccagatgacacagagccctagcagcctgtctgccagcgtgggagacagagtgaccatcacatgcaagagcagccagagcctgctggactccgatggcaagacctacctgaactggtatcagcagaagcccggcaaggcccctaagctgctgatctacctggtgtccaagctggatagcggcgtgcccagcagattttctggcagcggcagcggaaccgacttcaccctgacaatatccagcctccagcctgaggacttcgccacctactactgcttccaaggcacccactttccattcaccttcggccagggcaccaaggtggaaatcaaaagactcgaggagggacagcctaaggccaatcctaccgtgacactgttccctccaagcagcgaagaactccaggccaacaaggccacacttgtgtgcctgatctccgacttctaccctggggctgtgacagtggcttggaaggccgatggatctcctgtgaaagccggcgtggaaaccaccaagccatccaagcagagcaacaacaaatacgccgccagctcctacctgagcctgacacctgagcagtggaagtcccacagatcctacagctgccaagtgacccacgaaggcagcaccgtggaaaagacagtggcccctacagagtgcagccccatcaagaccgatgtgattacaatggaccccaaggacaactgctccaaggacgccaacgataccctgctgctccagctgaccaacaccagcgcctactacatgtacgagatcctgctgggcaaggccaccctgtacgccgtgctggtgtctgccctggtgctgatggctatggtcaagcggaaggacagccggggacgcgccaagagaagcggatctggcgtgaagcagaccctgaatttcgacctgctgaagctggctggcgacgtggaatccaacccaggccctactagtatggactggatttggcgcatccttttccttgtcggcgctgctaccggcgcgcattccttcgaagaagtgcagctggttgaatcaggcggaggactggttcagcctggcggatctctgagactgtcttgtgccgccagcggctacaccttcaccagctactggatgaactgggtccgacaggcccctggcaaaggactggaatgggtcggaatgatcgaccccagcgacagcgagacacactacaaccacatcttcaaggaccgcttcaccatcagcgccgacaccagcaagaataccgcctacctccagatgaactccctgagagccgaggacaccgccgtgtactactgcgccagaaacctgtatctgttcggccagggaaccctggtcacagtgtcatctacgcgtgcctctacaaagggaccctccgtgtttcctctggctcccagcagcaagtctacaagcggaggaacagccgctctgggctgcctggtcaaggattactttcccgagcctgtgaccgtgtcctggaatagcggagcactgacaagcggcgtgcacacctttccagccgtgctgcaaagcagcggcctgtactctctgagcagcgtggtcacagtgcctagctctagcctgggcacccagacctacatctgcaatgtgaaccacaagcctagcaacaccaaggtggacaagagagtggaacccaagagctgtgaagtgaaaaccgactccaccgaccacgtgaagcccaaagagacagagaacaccaagcagcccagcaagagctgccacaagcccaaggccatcgtgcacaccgagaaagtgaacatgatgagcctgaccgtgctgggcttcagaatcctgctgctgaaagtggccggctttaacctgctgatgaccctgcggctgtggtccagc

SEQ ID NO: 40190 - DNA, 1944 bp, synthetic construct
  source 1..1944: mol_type = other DNA
atggccttaccagtgaccgccttgctcctgccgctggccttgctgctccacgccgccaggccggacatccagatgacacagagccctagcagcctgtctgccagcgtgggagacagagtgaccatcacatgcaagagcagccagagcctgctggactccgatggcaagacctacctgaactggtatcagcagaagcccggcaaggcccctaagctgctgatctacctggtgtccaagctggatagcggcgtgcccagcagattttctggcagcggcagcggaaccgacttcaccctgacaatatccagcctccagcctgaggacttcgccacctactactgcttccaaggcacccactttccattcaccttcggccagggcaccaaggtggaaatcaaaagactcgaggagggacagcctaaggccaatcctaccgtgacactgttccctccaagcagcgaagaactccaggccaacaaggccacacttgtgtgcctgatctccgacttctaccctggggctgtgacagtggcttggaaggccgatggatctcctgtgaaagccggcgtggaaaccaccaagccatccaagcagagcaacaacaaatacgccgccagctcctacctgagcctgacacctgagcagtggaagtcccacagatcctacagctgccaagtgacccacgaaggcagcaccgtggaaaagacagtggcccctacagagtgcagccccatcaagaccgatgtgattacaatggaccccaaggacaactgctccaaggacgccaacgataccctgctgctccagctgaccaacaccagcgcctactacatgtacgagatcctgctgggcaaggccaccctgtacgccgtgctggtgtctgccctggtgctgatggctatggtcaagcggaaggacagccggggacgcgccaagagaagcggatctggcgtgaagcagaccctgaatttcgacctgctgaagctggctggcgacgtggaatccaacccaggccctactagtatggactggatttggcgcatccttttccttgtcggcgctgctaccggcgcgcattccttcgaagaagtgcagctggttgaatcaggcggaggactggttcagcctggcggatctctgagactgtcttgtgccgccagcggctacaccttcagcagctactggatgaactgggtccgacaggcccctggcaaaggactggaatgggtcggaatgatcgaccccagcgacagcgagacacactacaaccacatcttcaaggaccgcttcaccatcagcgccgacaccagcaagaataccgcctacctccagatgaactccctgagagccgaggacaccgccgtgtactactgcgccagaaacctgtatctgtggggccagggaaccctggtcacagtgtcatctacgcgtgcctctacaaagggaccctccgtgtttcctctggctcccagcagcaagtctacaagcggaggaacagccgctctgggctgcctggtcaaggattactttcccgagcctgtgaccgtgtcctggaatagcggagcactgacaagcggcgtgcacacctttccagccgtgctgcaaagcagcggcctgtactctctgagcagcgtggtcacagtgcctagctctagcctgggcacccagacctacatctgcaatgtgaaccacaagcctagcaacaccaaggtggacaagagagtggaacccaagagctgtgaagtgaaaaccgactccaccgaccacgtgaagcccaaagagacagagaacaccaagcagcccagcaagagctgccacaagcccaaggccatcgtgcacaccgagaaagtgaacatgatgagcctgaccgtgctgggcttcagaatcctgctgctgaaagtggccggctttaacctgctgatgaccctgcggctgtggtccagc

SEQ ID NO: 40191 - DNA, 1944 bp, synthetic construct
  source 1..1944: mol_type = other DNA
atggccttaccagtgaccgccttgctcctgccgctggccttgctgctccacgccgccaggccggacatccagatgacacagagccctagcagcctgtctgccagcgtgggagacagagtgaccatcacatgcaagagcagccagagcctgctggactccgatggcaagacctacctgaactggtatcagcagaagcccggcaaggcccctaagctgctgatctacctggtgtccaagctggatagcggcgtgcccagcagattttctggcagcggcagcggaaccgacttcaccctgacaatatccagcctccagcctgaggacttcgccacctactactgctggcaaggcacccactttccattcaccttcggccagggcaccaaggtggaaatcaaaagactcgaggagggacagcctaaggccaatcctaccgtgacactgttccctccaagcagcgaagaactccaggccaacaaggccacacttgtgtgcctgatctccgacttctaccctggggctgtgacagtggcttggaaggccgatggatctcctgtgaaagccggcgtggaaaccaccaagccatccaagcagagcaacaacaaatacgccgccagctcctacctgagcctgacacctgagcagtggaagtcccacagatcctacagctgccaagtgacccacgaaggcagcaccgtggaaaagacagtggcccctacagagtgcagccccatcaagaccgatgtgattacaatggaccccaaggacaactgctccaaggacgccaacgataccctgctgctccagctgaccaacaccagcgcctactacatgtacgagatcctgctgggcaaggccaccctgtacgccgtgctggtgtctgccctggtgctgatggctatggtcaagcggaaggacagccggggacgcgccaagagaagcggatctggcgtgaagcagaccctgaatttcgacctgctgaagctggctggcgacgtggaatccaacccaggccctactagtatggactggatttggcgcatccttttccttgtcggcgctgctaccggcgcgcattccttcgaagaagtgcagctggttgaatcaggcggaggactggttcagcctggcggatctctgagactgtcttgtgccgccagcggctacaccttcaccagctactggatgaactgggtccgacaggcccctggcaaaggactggaatgggtcggaatgatcgaccccagcgacagcgagacacactacaaccacatcttcaaggaccgcttcaccatcagcgccgacaccagcaagaataccgcctacctccagatgaactccctgagagccgaggacaccgccgtgtactactgcgccagaaacctgtatctgttcggccagggaaccctggtcacagtgtcatctacgcgtgcctctacaaagggaccctccgtgtttcctctggctcccagcagcaagtctacaagcggaggaacagccgctctgggctgcctggtcaaggattactttcccgagcctgtgaccgtgtcctggaatagcggagcactgacaagcggcgtgcacacctttccagccgtgctgcaaagcagcggcctgtactctctgagcagcgtggtcacagtgcctagctctagcctgggcacccagacctacatctgcaatgtgaaccacaagcctagcaacaccaaggtggacaagagagtggaacccaagagctgtgaagtgaaaaccgactccaccgaccacgtgaagcccaaagagacagagaacaccaagcagcccagcaagagctgccacaagcccaaggccatcgtgcacaccgagaaagtgaacatgatgagcctgaccgtgctgggcttcagaatcctgctgctgaaagtggccggctttaacctgctgatgaccctgcggctgtggtccagc

SEQ ID NO: 40192 - DNA, 1944 bp, synthetic construct
  source 1..1944: mol_type = other DNA
atggccttaccagtgaccgccttgctcctgccgctggccttgctgctccacgccgccaggccggacatccagatgacacagagccctagcagcctgtctgccagcgtgggagacagagtgaccatcacatgcaagagcagccagagcctgctggactccgatggcaagacctacctgaactggtatcagcagaagcccggcaaggcccctaagctgctgatctacctggtgtccaagctggatagcggcgtgcccagcagattttctggcagcggcagcggaaccgacttcaccctgacaatatccagcctccagcctgaggacttcgccacctactactgctggcaaggcacccactttccattcaccttcggccagggcaccaaggtggaaatcaaaagactcgaggagggacagcctaaggccaatcctaccgtgacactgttccctccaagcagcgaagaactccaggccaacaaggccacacttgtgtgcctgatctccgacttctaccctggggctgtgacagtggcttggaaggccgatggatctcctgtgaaagccggcgtggaaaccaccaagccatccaagcagagcaacaacaaatacgccgccagctcctacctgagcctgacacctgagcagtggaagtcccacagatcctacagctgccaagtgacccacgaaggcagcaccgtggaaaagacagtggcccctacagagtgcagccccatcaagaccgatgtgattacaatggaccccaaggacaactgctccaaggacgccaacgataccctgctgctccagctgaccaacaccagcgcctactacatgtacgagatcctgctgggcaaggccaccctgtacgccgtgctggtgtctgccctggtgctgatggctatggtcaagcggaaggacagccggggacgcgccaagagaagcggatctggcgtgaagcagaccctgaatttcgacctgctgaagctggctggcgacgtggaatccaacccaggccctactagtatggactggatttggcgcatccttttccttgtcggcgctgctaccggcgcgcattccttcgaagaagtgcagctggttgaatcaggcggaggactggttcagcctggcggatctctgagactgtcttgtgccgccagcggctacaccttcagcagctactggatgaactgggtccgacaggcccctggcaaaggactggaatgggtcggaatgatcgaccccagcgacagcgagacacactacaaccacatcttcaaggaccgcttcaccatcagcgccgacaccagcaagaataccgcctacctccagatgaactccctgagagccgaggacaccgccgtgtactactgcgccagaaacctgtatctgtggggccagggaaccctggtcacagtgtcatctacgcgtgcctctacaaagggaccctccgtgtttcctctggctcccagcagcaagtctacaagcggaggaacagccgctctgggctgcctggtcaaggattactttcccgagcctgtgaccgtgtcctggaatagcggagcactgacaagcggcgtgcacacctttccagccgtgctgcaaagcagcggcctgtactctctgagcagcgtggtcacagtgcctagctctagcctgggcacccagacctacatctgcaatgtgaaccacaagcctagcaacaccaaggtggacaagagagtggaacccaagagctgtgaagtgaaaaccgactccaccgaccacgtgaagcccaaagagacagagaacaccaagcagcccagcaagagctgccacaagcccaaggccatcgtgcacaccgagaaagtgaacatgatgagcctgaccgtgctgggcttcagaatcctgctgctgaaagtggccggctttaacctgctgatgaccctgcggctgtggtccagc

SEQ ID NO: 40193 - DNA, 1944 bp, synthetic construct
  source 1..1944: mol_type = other DNA
atggccttaccagtgaccgccttgctcctgccgctggccttgctgctccacgccgccaggccggacatccagatgacacagagccctagcagcctgtctgccagcgtgggagacagagtgaccatcacatgcaagagcagccagagcctgctggactccgatggcaagacctacctgaactggtatcagcagaagcccggcaaggcccctaagctgctgatctacctggtgtccaagctggatagcggcgtgcccagcagattttctggcagcggcagcggaaccgacttcaccctgacaatatccagcctccagcctgaggacttcgccacctactactgcttccaaggcacccactttccatacaccttcggccagggcaccaaggtggaaatcaaaagactcgaggagggacagcctaaggccaatcctaccgtgacactgttccctccaagcagcgaagaactccaggccaacaaggccacacttgtgtgcctgatctccgacttctaccctggggctgtgacagtggcttggaaggccgatggatctcctgtgaaagccggcgtggaaaccaccaagccatccaagcagagcaacaacaaatacgccgccagctcctacctgagcctgacacctgagcagtggaagtcccacagatcctacagctgccaagtgacccacgaaggcagcaccgtggaaaagacagtggcccctacagagtgcagccccatcaagaccgatgtgattacaatggaccccaaggacaactgctccaaggacgccaacgataccctgctgctccagctgaccaacaccagcgcctactacatgtacgagatcctgctgggcaaggccaccctgtacgccgtgctggtgtctgccctggtgctgatggctatggtcaagcggaaggacagccggggacgcgccaagagaagcggatctggcgtgaagcagaccctgaatttcgacctgctgaagctggctggcgacgtggaatccaacccaggccctactagtatggactggatttggcgcatccttttccttgtcggcgctgctaccggcgcgcattccttcgaagaagtgcagctggttgaatcaggcggaggactggttcagcctggcggatctctgagactgtcttgtgccgccagcggctacaccttcaccagctactggatgaactgggtccgacaggcccctggcaaaggactggaatgggtcggaatgatcgaccccagcgacagcgagacacactacaaccacatcttcaaggaccgcttcaccatcagcgccgacaccagcaagaataccgcctacctccagatgaactccctgagagccgaggacaccgccgtgtactactgcgccagaaacctgtatctgttcggccagggaaccctggtcacagtgtcatctacgcgtgcctctacaaagggaccctccgtgtttcctctggctcccagcagcaagtctacaagcggaggaacagccgctctgggctgcctggtcaaggattactttcccgagcctgtgaccgtgtcctggaatagcggagcactgacaagcggcgtgcacacctttccagccgtgctgcaaagcagcggcctgtactctctgagcagcgtggtcacagtgcctagctctagcctgggcacccagacctacatctgcaatgtgaaccacaagcctagcaacaccaaggtggacaagagagtggaacccaagagctgtgaagtgaaaaccgactccaccgaccacgtgaagcccaaagagacagagaacaccaagcagcccagcaagagctgccacaagcccaaggccatcgtgcacaccgagaaagtgaacatgatgagcctgaccgtgctgggcttcagaatcctgctgctgaaagtggccggctttaacctgctgatgaccctgcggctgtggtccagc

SEQ ID NO: 40194 - DNA, 1944 bp, synthetic construct
  source 1..1944: mol_type = other DNA
atggccttaccagtgaccgccttgctcctgccgctggccttgctgctccacgccgccaggccggacatccagatgacacagagccctagcagcctgtctgccagcgtgggagacagagtgaccatcacatgcaagagcagccagagcctgctggactccgatggcaagacctacctgaactggtatcagcagaagcccggcaaggcccctaagctgctgatctacctggtgtccaagctggatagcggcgtgcccagcagattttctggcagcggcagcggaaccgacttcaccctgacaatatccagcctccagcctgaggacttcgccacctactactgcttccaaggcacccactttccatacaccttcggccagggcaccaaggtggaaatcaaaagactcgaggagggacagcctaaggccaatcctaccgtgacactgttccctccaagcagcgaagaactccaggccaacaaggccacacttgtgtgcctgatctccgacttctaccctggggctgtgacagtggcttggaaggccgatggatctcctgtgaaagccggcgtggaaaccaccaagccatccaagcagagcaacaacaaatacgccgccagctcctacctgagcctgacacctgagcagtggaagtcccacagatcctacagctgccaagtgacccacgaaggcagcaccgtggaaaagacagtggcccctacagagtgcagccccatcaagaccgatgtgattacaatggaccccaaggacaactgctccaaggacgccaacgataccctgctgctccagctgaccaacaccagcgcctactacatgtacgagatcctgctgggcaaggccaccctgtacgccgtgctggtgtctgccctggtgctgatggctatggtcaagcggaaggacagccggggacgcgccaagagaagcggatctggcgtgaagcagaccctgaatttcgacctgctgaagctggctggcgacgtggaatccaacccaggccctactagtatggactggatttggcgcatccttttccttgtcggcgctgctaccggcgcgcattccttcgaagaagtgcagctggttgaatcaggcggaggactggttcagcctggcggatctctgagactgtcttgtgccgccagcggctacaccttcaccaactactggatgaactgggtccgacaggcccctggcaaaggactggaatgggtcggaatgatcgaccccagcgacagcgagacacactacaaccacatcttcaaggaccgcttcaccatcagcgccgacaccagcaagaataccgcctacctccagatgaactccctgagagccgaggacaccgccgtgtactactgcgccagaaacctgtatctgtggggccagggaaccctggtcacagtgtcatctacgcgtgcctctacaaagggaccctccgtgtttcctctggctcccagcagcaagtctacaagcggaggaacagccgctctgggctgcctggtcaaggattactttcccgagcctgtgaccgtgtcctggaatagcggagcactgacaagcggcgtgcacacctttccagccgtgctgcaaagcagcggcctgtactctctgagcagcgtggtcacagtgcctagctctagcctgggcacccagacctacatctgcaatgtgaaccacaagcctagcaacaccaaggtggacaagagagtggaacccaagagctgtgaagtgaaaaccgactccaccgaccacgtgaagcccaaagagacagagaacaccaagcagcccagcaagagctgccacaagcccaaggccatcgtgcacaccgagaaagtgaacatgatgagcctgaccgtgctgggcttcagaatcctgctgctgaaagtggccggctttaacctgctgatgaccctgcggctgtggtccagc

SEQ ID NO: 40195 - DNA, 1944 bp, synthetic construct
  source 1..1944: mol_type = other DNA
atggccttaccagtgaccgccttgctcctgccgctggccttgctgctccacgccgccaggccggacatccagatgacacagagccctagcagcctgtctgccagcgtgggagacagagtgaccatcacatgcaagagcagccagagcctgctggactccgatggcaagacctacctgaactggtatcagcagaagcccggcaaggcccctaagctgctgatctacctggtgtccaagctggatagcggcgtgcccagcagattttctggcagcggcagcggaaccgacttcaccctgacaatatccagcctccagcctgaggacttcgccacctactactgcttccaaggcacccactttccattcaccttcggccagggcaccaaggtggaaatcaaaagactcgaggagggacagcctaaggccaatcctaccgtgacactgttccctccaagcagcgaagaactccaggccaacaaggccacacttgtgtgcctgatctccgacttctaccctggggctgtgacagtggcttggaaggccgatggatctcctgtgaaagccggcgtggaaaccaccaagccatccaagcagagcaacaacaaatacgccgccagctcctacctgagcctgacacctgagcagtggaagtcccacagatcctacagctgccaagtgacccacgaaggcagcaccgtggaaaagacagtggcccctacagagtgcagccccatcaagaccgatgtgattacaatggaccccaaggacaactgctccaaggacgccaacgataccctgctgctccagctgaccaacaccagcgcctactacatgtacgagatcctgctgggcaaggccaccctgtacgccgtgctggtgtctgccctggtgctgatggctatggtcaagcggaaggacagccggggacgcgccaagagaagcggatctggcgtgaagcagaccctgaatttcgacctgctgaagctggctggcgacgtggaatccaacccaggccctactagtatggactggatttggcgcatccttttccttgtcggcgctgctaccggcgcgcattccttcgaagaagtgcagctggttgaatcaggcggaggactggttcagcctggcggatctctgagactgtcttgtgccgccagcggctacaccttcaccaactactggatgaactgggtccgacaggcccctggcaaaggactggaatgggtcggaatgatcgaccccagcgacagcgagacacactacaaccacatcttcaaggaccgcttcaccatcagcgccgacaccagcaagaataccgcctacctccagatgaactccctgagagccgaggacaccgccgtgtactactgcgccagaaacctgtatctgtggggccagggaaccctggtcacagtgtcatctacgcgtgcctctacaaagggaccctccgtgtttcctctggctcccagcagcaagtctacaagcggaggaacagccgctctgggctgcctggtcaaggattactttcccgagcctgtgaccgtgtcctggaatagcggagcactgacaagcggcgtgcacacctttccagccgtgctgcaaagcagcggcctgtactctctgagcagcgtggtcacagtgcctagctctagcctgggcacccagacctacatctgcaatgtgaaccacaagcctagcaacaccaaggtggacaagagagtggaacccaagagctgtgaagtgaaaaccgactccaccgaccacgtgaagcccaaagagacagagaacaccaagcagcccagcaagagctgccacaagcccaaggccatcgtgcacaccgagaaagtgaacatgatgagcctgaccgtgctgggcttcagaatcctgctgctgaaagtggccggctttaacctgctgatgaccctgcggctgtggtccagc

SEQ ID NO: 40196 - DNA, 1953 bp, synthetic construct
  source 1..1953: mol_type = other DNA
atggccttaccagtgaccgccttgctcctgccgctggccttgctgctccacgccgccaggccggacatccagttgacccagtcccccagctcactcagcgccagtgtgggggaccgggtgaccattacctgtaaagccagtcagagtgtggactatgacggggatagcttcctgaattggtatcagcagaagcctggcaaagccccaaagctgctgatctacgctgcatctaatctggagtcaggcgtgccttccaggttctccggtagtgggtctgggaccgatttcacattgaccatttcatccctccaacccgaggatttcgctacatattactgtcagcagtccaatgaggaccctctcacctttggccagggcaccaaagttgaaattaagagactcgaggagggacagcctaaggccaatcctaccgtgacactgttccctccaagcagcgaagaactccaggccaacaaggccacacttgtgtgcctgatctccgacttctaccctggggctgtgacagtggcttggaaggccgatggatctcctgtgaaagccggcgtggaaaccaccaagccatccaagcagagcaacaacaaatacgccgccagctcctacctgagcctgacacctgagcagtggaagtcccacagatcctacagctgccaagtgacccacgaaggcagcaccgtggaaaagacagtggcccctacagagtgcagccccatcaagaccgatgtgattacaatggaccccaaggacaactgctccaaggacgccaacgataccctgctgctccagctgaccaacaccagcgcctactacatgtacgagatcctgctgggcaaggccaccctgtacgccgtgctggtgtctgccctggtgctgatggctatggtcaagcggaaggacagccggggacgcgccaagagaagcggatctggcgtgaagcagaccctgaatttcgacctgctgaagctggctggcgacgtggaatccaacccaggccctactagtatggactggatttggcgcatccttttccttgtcggcgctgctaccggcgcgcattccttcgaagaagtccaacttgtggagtctggagggggcctggtgcagcccggcggctctctcagactgtcttgtgcggcaagcggctacaccttcacctcttactggatagaatgggtgaggcaggcacctggaaagggactggagtggattggagagattctgccaggagggggagatacaaattacaatgaaatcttcaaggggcgggccaccttttcagcggataccagcaagaatacagcttacctgcagatgaatagcctccgggcagaagataccgctgtttattattgcacgagacgggtgccaataagactggactattgggggcaagggactcttgtcaccgtcagttcaacgcgtgcctctacaaagggaccctccgtgtttcctctggctcccagcagcaagtctacaagcggaggaacagccgctctgggctgcctggtcaaggattactttcccgagcctgtgaccgtgtcctggaatagcggagcactgacaagcggcgtgcacacctttccagccgtgctgcaaagcagcggcctgtactctctgagcagcgtggtcacagtgcctagctctagcctgggcacccagacctacatctgcaatgtgaaccacaagcctagcaacaccaaggtggacaagagagtggaacccaagagctgtgaagtgaaaaccgactccaccgaccacgtgaagcccaaagagacagagaacaccaagcagcccagcaagagctgccacaagcccaaggccatcgtgcacaccgagaaagtgaacatgatgagcctgaccgtgctgggcttcagaatcctgctgctgaaagtggccggctttaacctgctgatgaccctgcggctgtggtccagc

SEQ ID NO: 40197 - DNA, 1953 bp, synthetic construct
  source 1..1953: mol_type = other DNA
atggccttaccagtgaccgccttgctcctgccgctggccttgctgctccacgccgccaggccggacatccagttgacccagtcccccagctcactcagcgccagtgtgggggaccgggtgaccattacctgtaaagccagtcagagtgtggactatgagggggatagcttcctgaattggtatcagcagaagcctggcaaagccccaaagctgctgatctacgctgcatctaatctggagtcaggcgtgccttctaggttctccggtagtgggtctgggaccgatttcacattgaccatttcatccctccaacccgaggatttcgctacatattactgtcagcagtccaatgaggaccctctcacctttggccagggcaccaaagttgaaattaagagactcgaggagggacagcctaaggccaatcctaccgtgacactgttccctccaagcagcgaagaactccaggccaacaaggccacacttgtgtgcctgatctccgacttctaccctggggctgtgacagtggcttggaaggccgatggatctcctgtgaaagccggcgtggaaaccaccaagccatccaagcagagcaacaacaaatacgccgccagctcctacctgagcctgacacctgagcagtggaagtcccacagatcctacagctgccaagtgacccacgaaggcagcaccgtggaaaagacagtggcccctacagagtgcagccccatcaagaccgatgtgattacaatggaccccaaggacaactgctccaaggacgccaacgataccctgctgctccagctgaccaacaccagcgcctactacatgtacgagatcctgctgggcaaggccaccctgtacgccgtgctggtgtctgccctggtgctgatggctatggtcaagcggaaggacagccggggacgcgccaagagaagcggatctggcgtgaagcagaccctgaatttcgacctgctgaagctggctggcgacgtggaatccaacccaggccctactagtatggactggatttggcgcatccttttccttgtcggcgctgctaccggcgcgcattccttcgaagaagtccaacttgtggagtctggagggggcctggtgcagcccggcggctctctcagactgtcttgtgcggcaagcggctacaccttcacctcttactggatagaatgggtgaggcaggcacctggaaagggactggagtggattggagagattctgccaggagggggagatacaaattacaatgaaatcttcaaggggcgggccaccttttcagcggataccagcaagaatacagcttacctgcagatgaatagcctccgggcagaagataccgctgtttattattgcacgagacgggtgccaataagactggactattgggggcaagggactcttgtcaccgtcagttcaacgcgtgcctctacaaagggaccctccgtgtttcctctggctcccagcagcaagtctacaagcggaggaacagccgctctgggctgcctggtcaaggattactttcccgagcctgtgaccgtgtcctggaatagcggagcactgacaagcggcgtgcacacctttccagccgtgctgcaaagcagcggcctgtactctctgagcagcgtggtcacagtgcctagctctagcctgggcacccagacctacatctgcaatgtgaaccacaagcctagcaacaccaaggtggacaagagagtggaacccaagagctgtgaagtgaaaaccgactccaccgaccacgtgaagcccaaagagacagagaacaccaagcagcccagcaagagctgccacaagcccaaggccatcgtgcacaccgagaaagtgaacatgatgagcctgaccgtgctgggcttcagaatcctgctgctgaaagtggccggctttaacctgctgatgaccctgcggctgtggtccagc

SEQ ID NO: 40198 - DNA, 1950 bp, synthetic construct
  source 1..1950: mol_type = other DNA
atggccttaccagtgaccgccttgctcctgccgctggccttgctgctccacgccgccaggccggacatcgtgatgacacagagccctgatagcctggccgtgtctctgggagagagagccaccattaactgcaaggccagccagagcgtggactacgacggcgacagcttcctgaactggtatcagcagaagcccggccagcctcctaagctgctgatctacgccgccagcaatctggaaagcggcgtgccaagcagattttccggctctggcagcggcaccgatttcaccctgacaatatccagcctccagcctgaggacgtggccgtgtactactgccagcagagcaacgacgaccctctgacctttggacagggcaccaaggtggaaatcaaactcgaggagggacagcctaaggccaatcctaccgtgacactgttccctccaagcagcgaagaactccaggccaacaaggccacacttgtgtgcctgatctccgacttctaccctggggctgtgacagtggcttggaaggccgatggatctcctgtgaaagccggcgtggaaaccaccaagccatccaagcagagcaacaacaaatacgccgccagctcctacctgagcctgacacctgagcagtggaagtcccacagatcctacagctgccaagtgacccacgaaggcagcaccgtggaaaagacagtggcccctacagagtgcagccccatcaagaccgatgtgattacaatggaccccaaggacaactgctccaaggacgccaacgataccctgctgctccagctgaccaacaccagcgcctactacatgtacgagatcctgctgggcaaggccaccctgtacgccgtgctggtgtctgccctggtgctgatggctatggtcaagcggaaggacagccggggacgcgccaagagaagcggatctggcgtgaagcagaccctgaatttcgacctgctgaagctggctggcgacgtggaatccaacccaggccctactagtatggactggatttggcgcatccttttccttgtcggcgctgctaccggcgcgcattccttcgaacaagttcagctggttcagagcggagccgaagtgaagaaacctggggcctctgtgaaggtgtcctgcaaagccagcggctacacctttaccagctactggatcaactgggtccgacaggcccctggacaaggactggaatggatgggacagatccttccaggcggaggggacaccaactacaacggcaagttcaagggcagagtgaccatcaccgccgacaccagcacaagcaccgcctacatggaactgagcagcctgagaagcgaggacaccgccgtgtattattgcaccagacgggtgcccatccggctggattattggggacagggaaccctggtcaccgtgtctagtacgcgtgcctctacaaagggaccctccgtgtttcctctggctcccagcagcaagtctacaagcggaggaacagccgctctgggctgcctggtcaaggattactttcccgagcctgtgaccgtgtcctggaatagcggagcactgacaagcggcgtgcacacctttccagccgtgctgcaaagcagcggcctgtactctctgagcagcgtggtcacagtgcctagctctagcctgggcacccagacctacatctgcaatgtgaaccacaagcctagcaacaccaaggtggacaagagagtggaacccaagagctgtgaagtgaaaaccgactccaccgaccacgtgaagcccaaagagacagagaacaccaagcagcccagcaagagctgccacaagcccaaggccatcgtgcacaccgagaaagtgaacatgatgagcctgaccgtgctgggcttcagaatcctgctgctgaaagtggccggctttaacctgctgatgaccctgcggctgtggtccagc

SEQ ID NO: 40199 - DNA, 1950 bp, synthetic construct
  source 1..1950: mol_type = other DNA
atggccttaccagtgaccgccttgctcctgccgctggccttgctgctccacgccgccaggccggacatcgtgatgacacagagccctgatagcctggccgtgtctctgggagagagagccaccattaactgcaaggccagccagagcgtggactacgacggcgacagcttcctgaactggtatcagcagaagcccggccagcctcctaagctgctgatctacgccgccagcaatctggaaagcggcgtgccaagcagattttccggctctggcagcggcaccgatttcaccctgacaatatccagcctccagcctgaggacgtggccgtgtactactgccagcagagcaacgacgaccctctgacctttggacagggcaccaaggtggaaatcaaactcgaggagggacagcctaaggccaatcctaccgtgacactgttccctccaagcagcgaagaactccaggccaacaaggccacacttgtgtgcctgatctccgacttctaccctggggctgtgacagtggcttggaaggccgatggatctcctgtgaaagccggcgtggaaaccaccaagccatccaagcagagcaacaacaaatacgccgccagctcctacctgagcctgacacctgagcagtggaagtcccacagatcctacagctgccaagtgacccacgaaggcagcaccgtggaaaagacagtggcccctacagagtgcagccccatcaagaccgatgtgattacaatggaccccaaggacaactgctccaaggacgccaacgataccctgctgctccagctgaccaacaccagcgcctactacatgtacgagatcctgctgggcaaggccaccctgtacgccgtgctggtgtctgccctggtgctgatggctatggtcaagcggaaggacagccggggacgcgccaagagaagcggatctggcgtgaagcagaccctgaatttcgacctgctgaagctggctggcgacgtggaatccaacccaggccctactagtatggactggatttggcgcatccttttccttgtcggcgctgctaccggcgcgcattccttcgaagaagtccaacttgtggagtctggagggggcctggtgcagcccggcggctctctcagactgtcttgtgcggcaagcggctacaccttcacctcttactggatagaatgggtgaggcaggcacctggaaagggactggagtggattggagagattctgccaggagggggagatacaaattacaatgaaatcttcaaggggcgggccaccttttcagcggataccagcaagaatacagcttacctgcagatgaatagcctccgggcagaagataccgctgtttattattgcacgagacgggtgccaataagactggactattgggggcaagggactcttgtcaccgtcagttcaacgcgtgcctctacaaagggaccctccgtgtttcctctggctcccagcagcaagtctacaagcggaggaacagccgctctgggctgcctggtcaaggattactttcccgagcctgtgaccgtgtcctggaatagcggagcactgacaagcggcgtgcacacctttccagccgtgctgcaaagcagcggcctgtactctctgagcagcgtggtcacagtgcctagctctagcctgggcacccagacctacatctgcaatgtgaaccacaagcctagcaacaccaaggtggacaagagagtggaacccaagagctgtgaagtgaaaaccgactccaccgaccacgtgaagcccaaagagacagagaacaccaagcagcccagcaagagctgccacaagcccaaggccatcgtgcacaccgagaaagtgaacatgatgagcctgaccgtgctgggcttcagaatcctgctgctgaaagtggccggctttaacctgctgatgaccctgcggctgtggtccagc

SEQ ID NO: 40200 - DNA, 1950 bp, synthetic construct
  source 1..1950: mol_type = other DNA
atggccttaccagtgaccgccttgctcctgccgctggccttgctgctccacgccgccaggccggacatcgtgatgacacagagccctgatagcctggccgtgtctctgggagagagagccaccattaactgcaaggccagccagagcgtggactacgacggcgacagcttcctgaactggtatcagcagaagcccggccagcctcctaagctgctgatctacgccgccagcaatctggaaagcggcgtgccaagcagattttccggctctggcagcggcaccgatttcaccctgacaatatccagcctccagcctgaggacgtggccgtgtactactgccagcagagcaacgacgaccctctgacctttggacagggcaccaaggtggaaatcaaactcgaggagggacagcctaaggccaatcctaccgtgacactgttccctccaagcagcgaagaactccaggccaacaaggccacacttgtgtgcctgatctccgacttctaccctggggctgtgacagtggcttggaaggccgatggatctcctgtgaaagccggcgtggaaaccaccaagccatccaagcagagcaacaacaaatacgccgccagctcctacctgagcctgacacctgagcagtggaagtcccacagatcctacagctgccaagtgacccacgaaggcagcaccgtggaaaagacagtggcccctacagagtgcagccccatcaagaccgatgtgattacaatggaccccaaggacaactgctccaaggacgccaacgataccctgctgctccagctgaccaacaccagcgcctactacatgtacgagatcctgctgggcaaggccaccctgtacgccgtgctggtgtctgccctggtgctgatggctatggtcaagcggaaggacagccggggacgcgccaagagaagcggatctggcgtgaagcagaccctgaatttcgacctgctgaagctggctggcgacgtggaatccaacccaggccctactagtatggactggatttggcgcatccttttccttgtcggcgctgctaccggcgcgcattccttcgaagaagtccaacttgtggagtctggagggggcctggtgcagcccggcggctctctcagactgtcttgtgcggcaagcggctacaccttcagctcttactggatagaatgggtgaggcaggcacctggaaagggactggagtggattggagagattctgccaggagggggagatacaaattacaatgaaatcttcaaggggcgggccaccttttcagcggataccagcaagaatacagcttacctgcagatgaatagcctccgggcagaagataccgctgtttattattgcacgagacgggtgccaataagactggactattgggggcaagggactcttgtcaccgtcagttcaacgcgtgcctctacaaagggaccctccgtgtttcctctggctcccagcagcaagtctacaagcggaggaacagccgctctgggctgcctggtcaaggattactttcccgagcctgtgaccgtgtcctggaatagcggagcactgacaagcggcgtgcacacctttccagccgtgctgcaaagcagcggcctgtactctctgagcagcgtggtcacagtgcctagctctagcctgggcacccagacctacatctgcaatgtgaaccacaagcctagcaacaccaaggtggacaagagagtggaacccaagagctgtgaagtgaaaaccgactccaccgaccacgtgaagcccaaagagacagagaacaccaagcagcccagcaagagctgccacaagcccaaggccatcgtgcacaccgagaaagtgaacatgatgagcctgaccgtgctgggcttcagaatcctgctgctgaaagtggccggctttaacctgctgatgaccctgcggctgtggtccagc

SEQ ID NO: 40201 - DNA, 1941 bp, synthetic construct
  source 1..1941: mol_type = other DNA
atggccttaccagtgaccgccttgctcctgccgctggccttgctgctccacgccgccaggccggacgtggtcatgacacagagcccttctagcctgtctgccagcgtgggcgacagagtgaccatcacctgtatggcctccgaggacatctacatccggctggcctggtatcagcagaagcctggaaacgcccctaagctgctgatctacgccgccacctctctggaaacaggcgtgccaagcagattttccggcagcggctctggcaccgatttcaccctgacaatatccagcctccagcctgaggacttcgccacctactactgccagcagtattggagcagcccctggacatttggcggaggcaccaaggtggaaatcaaactcgaggagggacagcctaaggccaatcctaccgtgacactgttccctccaagcagcgaagaactccaggccaacaaggccacacttgtgtgcctgatctccgacttctaccctggggctgtgacagtggcttggaaggccgatggatctcctgtgaaagccggcgtggaaaccaccaagccatccaagcagagcaacaacaaatacgccgccagctcctacctgagcctgacacctgagcagtggaagtcccacagatcctacagctgccaagtgacccacgaaggcagcaccgtggaaaagacagtggcccctacagagtgcagccccatcaagaccgatgtgattacaatggaccccaaggacaactgctccaaggacgccaacgataccctgctgctccagctgaccaacaccagcgcctactacatgtacgagatcctgctgggcaaggccaccctgtacgccgtgctggtgtctgccctggtgctgatggctatggtcaagcggaaggacagccggggacgcgccaagagaagcggatctggcgtgaagcagaccctgaatttcgacctgctgaagctggctggcgacgtggaatccaacccaggccctactagtatggactggatttggcgcatccttttccttgtcggcgctgctaccggcgcgcattccttcgaacaggttcagctgcaagagtctggccccggactggtcaagcctagccaaacactgagcctgacctgtaccgtgtccggctacagcatcaccagcgactacacctggaactggatcagacagcctcctggcaacggactggaatggatcggctacatcacctacagcggcagcaccagctacaaccccagcctgaaaagccgggtgctgatctccgtggacaccagcaagaatcaggtgtccctgaagctgagcagcgtgacagccgctgataccgccgtgtactactgtgccagactggggagaagatacacaatggactactggggccagggcaccaccgtgacagtttcttctacgcgtgcctctacaaagggaccctccgtgtttcctctggctcccagcagcaagtctacaagcggaggaacagccgctctgggctgcctggtcaaggattactttcccgagcctgtgaccgtgtcctggaatagcggagcactgacaagcggcgtgcacacctttccagccgtgctgcaaagcagcggcctgtactctctgagcagcgtggtcacagtgcctagctctagcctgggcacccagacctacatctgcaatgtgaaccacaagcctagcaacaccaaggtggacaagagagtggaacccaagagctgtgaagtgaaaaccgactccaccgaccacgtgaagcccaaagagacagagaacaccaagcagcccagcaagagctgccacaagcccaaggccatcgtgcacaccgagaaagtgaacatgatgagcctgaccgtgctgggcttcagaatcctgctgctgaaagtggccggctttaacctgctgatgaccctgcggctgtggtccagc

SEQ ID NO: 40202 - DNA, 1938 bp, synthetic construct
  source 1..1938: mol_type = other DNA
atggccttaccagtgaccgccttgctcctgccgctggccttgctgctccacgccgccaggccggacatccagatgacacagagccctagcagcctgtctgccagcgtgggagacagagtgaccatcacatgcaaggccagcgacctgatccacaactggctggcctggtatcagcagaagcctggcaaggcccctaagctgctgatctacggcgctacctctctggaaacaggcgtgcccagcagattttctggcagcggctctggcaccgacttcaccctgacaatatccagcctccagcctgaggacttcgccacctactactgccagcagtactggaccacacctttcaccttcggccagggcaccaaggtggaaatcaaaagactcgaggagggacagcctaaggccaatcctaccgtgacactgttccctccaagcagcgaagaactccaggccaacaaggccacacttgtgtgcctgatctccgacttctaccctggggctgtgacagtggcttggaaggccgatggatctcctgtgaaagccggcgtggaaaccaccaagccatccaagcagagcaacaacaaatacgccgccagctcctacctgagcctgacacctgagcagtggaagtcccacagatcctacagctgccaagtgacccacgaaggcagcaccgtggaaaagacagtggcccctacagagtgcagccccatcaagaccgatgtgattacaatggaccccaaggacaactgctccaaggacgccaacgataccctgctgctccagctgaccaacaccagcgcctactacatgtacgagatcctgctgggcaaggccaccctgtacgccgtgctggtgtctgccctggtgctgatggctatggtcaagcggaaggacagccggggacgcgccaagagaagcggatctggcgtgaagcagaccctgaatttcgacctgctgaagctggctggcgacgtggaatccaacccaggccctactagtatggactggatttggcgcatccttttccttgtcggcgctgctaccggcgcgcattccttcgaagaagtgcagctggttgaatcaggtggcggcctggttcaacctggcggatctctgagactgagctgtgccgccagcggctacagcatcaccaatgactacgcctggaactgggtccgacaggcccctggaaaaggactggaatgggtcggatatatcagctactccggctacaccacctacaatcccagcatcaagagccggttcaccatcagcagagacaccagcaagaacaccctgtacctccagatgaactccctgagagccgaggacaccgccgtgtactattgtgccagatggaccagcggcctggactattggggacagggaacactggtcaccgtgtcctctacgcgtgcctctacaaagggaccctccgtgtttcctctggctcccagcagcaagtctacaagcggaggaacagccgctctgggctgcctggtcaaggattactttcccgagcctgtgaccgtgtcctggaatagcggagcactgacaagcggcgtgcacacctttccagccgtgctgcaaagcagcggcctgtactctctgagcagcgtggtcacagtgcctagctctagcctgggcacccagacctacatctgcaatgtgaaccacaagcctagcaacaccaaggtggacaagagagtggaacccaagagctgtgaagtgaaaaccgactccaccgaccacgtgaagcccaaagagacagagaacaccaagcagcccagcaagagctgccacaagcccaaggccatcgtgcacaccgagaaagtgaacatgatgagcctgaccgtgctgggcttcagaatcctgctgctgaaagtggccggctttaacctgctgatgaccctgcggctgtggtccagc

SEQ ID NO: 40203 - DNA, 1959 bp, synthetic construct
  source 1..1959: mol_type = other DNA
atggccttaccagtgaccgccttgctcctgccgctggccttgctgctccacgccgccaggccggacatcgtgatgacacagagccctgatagcctggccgtgtctctgggagagagagccaccatcaactgcaagagcagccagagcctgctgaacagcggcaaccagaagaactacctggcctggtatcagcagaagcccggccagcctcctaagctgctgatctactggggcagcaccagatccacaggcgtgcccgatagattttctggctctggcagcggcaccgacttcaccctgacaatttctagcctgcaagccgaggacgtggccgtgtactactgccagaacgactacacataccccttcaccttcggccagggcaccaagctggaaatcaaactcgaggagggacagcctaaggccaatcctaccgtgacactgttccctccaagcagcgaagaactccaggccaacaaggccacacttgtgtgcctgatctccgacttctaccctggggctgtgacagtggcttggaaggccgatggatctcctgtgaaagccggcgtggaaaccaccaagccatccaagcagagcaacaacaaatacgccgccagctcctacctgagcctgacacctgagcagtggaagtcccacagatcctacagctgccaagtgacccacgaaggcagcaccgtggaaaagacagtggcccctacagagtgcagccccatcaagaccgatgtgattacaatggaccccaaggacaactgctccaaggacgccaacgataccctgctgctccagctgaccaacaccagcgcctactacatgtacgagatcctgctgggcaaggccaccctgtacgccgtgctggtgtctgccctggtgctgatggctatggtcaagcggaaggacagccggggacgcgccaagagaagcggatctggcgtgaagcagaccctgaatttcgacctgctgaagctggctggcgacgtggaatccaacccaggccctactagtatggactggatttggcgcatccttttccttgtcggcgctgctaccggcgcgcattccttcgaacaagttcagctggttcagagcggagccgaagtgaagaaacctggggcctctgtgaaggtgtcctgcaaggcttccggctataccttcaccagcttttggctgaactgggtccgacaggcccctggacaaggactggaatggatgggcaacatctaccccagcaccagctacaccgtgtacaaccagaaattcaaggaccgcgtgaccatgaccagggacaccagcacaagcacagtgtacatggaactgagcagcctgcggagcgaggataccgccgtgtattattgcgccagaacctggcggggcaacagcttcgattattggggccagggaaccaccgtgaccgtgtcatctacgcgtgcctctacaaagggaccctccgtgtttcctctggctcccagcagcaagtctacaagcggaggaacagccgctctgggctgcctggtcaaggattactttcccgagcctgtgaccgtgtcctggaatagcggagcactgacaagcggcgtgcacacctttccagccgtgctgcaaagcagcggcctgtactctctgagcagcgtggtcacagtgcctagctctagcctgggcacccagacctacatctgcaatgtgaaccacaagcctagcaacaccaaggtggacaagagagtggaacccaagagctgtgaagtgaaaaccgactccaccgaccacgtgaagcccaaagagacagagaacaccaagcagcccagcaagagctgccacaagcccaaggccatcgtgcacaccgagaaagtgaacatgatgagcctgaccgtgctgggcttcagaatcctgctgctgaaagtggccggctttaacctgctgatgaccctgcggctgtggtccagc

SEQ ID NO: 40204 - DNA, 1959 bp, synthetic construct
  source 1..1959: mol_type = other DNA
atggccttaccagtgaccgccttgctcctgccgctggccttgctgctccacgccgccaggccggacatcgtgatgacacagagccctgatagcctggccgtgtctctgggagagagagccaccatcaactgcaagagcagccagagcctgctgaacagcggcaacaacaagaactacgtgacatggtatcagcagaagcccggccagcctcctaagctgctgatctactggggcagcaccagatccacaggcgtgcccgatagattttctggctctggcagcggcaccgacttcaccctgacaatttctagcctgcaagccgaggacgtggccgtgtactactgccagaacgactacacataccccttcaccttcggccagggcaccaagctggaaatcaaactcgaggagggacagcctaaggccaatcctaccgtgacactgttccctccaagcagcgaagaactccaggccaacaaggccacacttgtgtgcctgatctccgacttctaccctggggctgtgacagtggcttggaaggccgatggatctcctgtgaaagccggcgtggaaaccaccaagccatccaagcagagcaacaacaaatacgccgccagctcctacctgagcctgacacctgagcagtggaagtcccacagatcctacagctgccaagtgacccacgaaggcagcaccgtggaaaagacagtggcccctacagagtgcagccccatcaagaccgatgtgattacaatggaccccaaggacaactgctccaaggacgccaacgataccctgctgctccagctgaccaacaccagcgcctactacatgtacgagatcctgctgggcaaggccaccctgtacgccgtgctggtgtctgccctggtgctgatggctatggtcaagcggaaggacagccggggacgcgccaagagaagcggatctggcgtgaagcagaccctgaatttcgacctgctgaagctggctggcgacgtggaatccaacccaggccctactagtatggactggatttggcgcatccttttccttgtcggcgctgctaccggcgcgcattccttcgaacaagttcagctggttcagagcggagccgaagtgaagaaacctggggcctctgtgaaggtgtcctgcaaggcttccggctataccttcaccagcttttggctgaactgggtccgacaggcccctggacaaggactggaatggatgggcaacatctaccccagcgacagctacaccgtgtacaaccagaaattcaaggaccgcgtgaccatgaccagggacaccagcacaagcacagtgtacatggaactgagcagcctgcggagcgaggataccgccgtgtattattgcgccagaacctggcggggcaacagcttcgattattggggccagggaaccaccgtgaccgtgtcatctacgcgtgcctctacaaagggaccctccgtgtttcctctggctcccagcagcaagtctacaagcggaggaacagccgctctgggctgcctggtcaaggattactttcccgagcctgtgaccgtgtcctggaatagcggagcactgacaagcggcgtgcacacctttccagccgtgctgcaaagcagcggcctgtactctctgagcagcgtggtcacagtgcctagctctagcctgggcacccagacctacatctgcaatgtgaaccacaagcctagcaacaccaaggtggacaagagagtggaacccaagagctgtgaagtgaaaaccgactccaccgaccacgtgaagcccaaagagacagagaacaccaagcagcccagcaagagctgccacaagcccaaggccatcgtgcacaccgagaaagtgaacatgatgagcctgaccgtgctgggcttcagaatcctgctgctgaaagtggccggctttaacctgctgatgaccctgcggctgtggtccagc

SEQ ID NO: 40205 - DNA, 1935 bp, synthetic construct
  source 1..1935: mol_type = other DNA
atggccttaccagtgaccgccttgctcctgccgctggccttgctgctccacgccgccaggccgcagatcgtgctgacacagagccctgccatcatgtccgcttctcccggcgagaaagtgaccatgacatgtagcgccagcagcagcgtgtccttcatgcactggtatcagcagaagtccggcacaagccccaagcggtggatctacgataccagcacactggcctctggcgtgccagccagatttggcggatctggcagcggcacatcttacagcctgaccatcagcagcatggaagccgaagatgccgccacctactactgccagcagtggtccagcaatcccctgacatttggagccggcaccaagctggaactgaagagactcgaggagggacagcctaaggccaatcctaccgtgacactgttccctccaagcagcgaagaactccaggccaacaaggccacacttgtgtgcctgatctccgacttctaccctggggctgtgacagtggcttggaaggccgatggatctcctgtgaaagccggcgtggaaaccaccaagccatccaagcagagcaacaacaaatacgccgccagctcctacctgagcctgacacctgagcagtggaagtcccacagatcctacagctgccaagtgacccacgaaggcagcaccgtggaaaagacagtggcccctacagagtgcagccccatcaagaccgatgtgattacaatggaccccaaggacaactgctccaaggacgccaacgataccctgctgctccagctgaccaacaccagcgcctactacatgtacgagatcctgctgggcaaggccaccctgtacgccgtgctggtgtctgccctggtgctgatggctatggtcaagcggaaggacagccggggacgcgccaagagaagcggatctggcgtgaagcagaccctgaatttcgacctgctgaagctggctggcgacgtggaatccaacccaggccctactagtatggactggatttggcgcatccttttccttgtcggcgctgctaccggcgcgcattccttcgaacaagttcagctgcaacagagcggccctgagctggttaagcctggcgcttctgtgcggatctcttgcaaggccagcggctacaccttcaccagctactacatccactgggtcaagcagcggcctggacagggactcgaatggatcggctggatctaccccggcaacctgaacaccaagtacaacgagaagttcaagggcaaagccacactgaccgccgacaagagcagcagcacagcctacatgcagctgagcagcctgacaagcgaggacagcgccgtgtacttctgcgccagatacgactggtacttcgacgtgtggggagccggaaccaccgtgacagtttcttctacgcgtgcctctacaaagggaccctccgtgtttcctctggctcccagcagcaagtctacaagcggaggaacagccgctctgggctgcctggtcaaggattactttcccgagcctgtgaccgtgtcctggaatagcggagcactgacaagcggcgtgcacacctttccagccgtgctgcaaagcagcggcctgtactctctgagcagcgtggtcacagtgcctagctctagcctgggcacccagacctacatctgcaatgtgaaccacaagcctagcaacaccaaggtggacaagagagtggaacccaagagctgtgaagtgaaaaccgactccaccgaccacgtgaagcccaaagagacagagaacaccaagcagcccagcaagagctgccacaagcccaaggccatcgtgcacaccgagaaagtgaacatgatgagcctgaccgtgctgggcttcagaatcctgctgctgaaagtggccggctttaacctgctgatgaccctgcggctgtggtccagc

SEQ ID NO: 40206 - DNA, 1953 bp, synthetic construct
  source 1..1953: mol_type = other DNA
atggccttaccagtgaccgccttgctcctgccgctggccttgctgctccacgccgccaggccggacatccagatgacacagagccctagcagcctgtctgccagcgtgggagacagagtgaccatcacctgtagagccagccagagcatcagcagctacctgaactggtatcagcagaagcccggcaaggcccctaaactgctgatctatgccgccagctctctccagagcggagtgcctagcagattttctggcagcggctccggcaccgatttcaccctgacaatatccagcctccagcctgaggacttcgccacctactactgccagcagagctacagcacccctctgacctttggacagggcaccaaggtggaaatcaagctcgaggagggacagcctaaggccaatcctaccgtgacactgttccctccaagcagcgaagaactccaggccaacaaggccacacttgtgtgcctgatctccgacttctaccctggggctgtgacagtggcttggaaggccgatggatctcctgtgaaagccggcgtggaaaccaccaagccatccaagcagagcaacaacaaatacgccgccagctcctacctgagcctgacacctgagcagtggaagtcccacagatcctacagctgccaagtgacccacgaaggcagcaccgtggaaaagacagtggcccctacagagtgcagccccatcaagaccgatgtgattacaatggaccccaaggacaactgctccaaggacgccaacgataccctgctgctccagctgaccaacaccagcgcctactacatgtacgagatcctgctgggcaaggccaccctgtacgccgtgctggtgtctgccctggtgctgatggctatggtcaagcggaaggacagccggggacgcgccaagagaagcggatctggcgtgaagcagaccctgaatttcgacctgctgaagctggctggcgacgtggaatccaacccaggccctactagtatggactggatttggcgcatccttttccttgtcggcgctgctaccggcgcgcattccttcgaagaggtgcagctggttgaatctggcggaggactggttcagcctggcggatctctgagactgtcttgtgctgccagcggcttcaccttcagctcctacgccatgagctgggtccgacaggctcctggcaaaggactggaatgggtgtccgccatctctggctcaggcggcagcacatattacgccgactctgtgaagggcagattcaccatcagccgggacaacagcaagaacaccctgtacctccagatgaactccctgagagccgaggacaccgccgtgtactattgtgccagactgggctaccccaccaccacactgctgccctttgattattggggccagggcaccctggtcaccgtttcttctacgcgtgcctctacaaagggaccctccgtgtttcctctggctcccagcagcaagtctacaagcggaggaacagccgctctgggctgcctggtcaaggattactttcccgagcctgtgaccgtgtcctggaatagcggagcactgacaagcggcgtgcacacctttccagccgtgctgcaaagcagcggcctgtactctctgagcagcgtggtcacagtgcctagctctagcctgggcacccagacctacatctgcaatgtgaaccacaagcctagcaacaccaaggtggacaagagagtggaacccaagagctgtgaagtgaaaaccgactccaccgaccacgtgaagcccaaagagacagagaacaccaagcagcccagcaagagctgccacaagcccaaggccatcgtgcacaccgagaaagtgaacatgatgagcctgaccgtgctgggcttcagaatcctgctgctgaaagtggccggctttaacctgctgatgaccctgcggctgtggtccagc

SEQ ID NO: 40207 - DNA, 1956 bp, synthetic construct
  source 1..1956: mol_type = other DNA
atggccttaccagtgaccgccttgctcctgccgctggccttgctgctccacgccgccaggccggacatccagatgacacagagccctagcagcctgtctgccagcgtgggagacagagtgaccatcacctgtagagccagccaggacatcaacacagccgtggcttggtatcagcagaagcctggcaaggcccctaagctgctgatctacagcgcctacttcctgtacagcggcgtgcccagcagattcagcggaagcagaagcggcaccgacttcaccctgacaatatccagcctccagcctgaggacttcgccacctactactgccagcagtacagcagatacagccccgtgacctttggacagggcaccaaggtggaaatcaagagactcgaggagggacagcctaaggccaatcctaccgtgacactgttccctccaagcagcgaagaactccaggccaacaaggccacacttgtgtgcctgatctccgacttctaccctggggctgtgacagtggcttggaaggccgatggatctcctgtgaaagccggcgtggaaaccaccaagccatccaagcagagcaacaacaaatacgccgccagctcctacctgagcctgacacctgagcagtggaagtcccacagatcctacagctgccaagtgacccacgaaggcagcaccgtggaaaagacagtggcccctacagagtgcagccccatcaagaccgatgtgattacaatggaccccaaggacaactgctccaaggacgccaacgataccctgctgctccagctgaccaacaccagcgcctactacatgtacgagatcctgctgggcaaggccaccctgtacgccgtgctggtgtctgccctggtgctgatggctatggtcaagcggaaggacagccggggacgcgccaagagaagcggatctggcgtgaagcagaccctgaatttcgacctgctgaagctggctggcgacgtggaatccaacccaggccctactagtatggactggatttggcgcatccttttccttgtcggcgctgctaccggcgcgcattccttcgaagaagttcagctggttgaaagtggtggcggcctggttcaacctggcggatctctgagactgagctgtgccgccagcggcttcaatgtgtacgcctctggaatgcactgggtccgacaggcccctggcaaaggacttgagtgggtcgccaaaatctaccccgacagcgactacacctattacgccgacagcgtgaagggcagattcaccatcagcgccgacaccagcaagaacaccgcctacctccagatgaactccctgagagccgaggacaccgccgtgtactactgtagcagagacagcagcttctactacgtgtacgctatggactactggggccagggcacactggtcacagtctcttctacgcgtgcctctacaaagggaccctccgtgtttcctctggctcccagcagcaagtctacaagcggaggaacagccgctctgggctgcctggtcaaggattactttcccgagcctgtgaccgtgtcctggaatagcggagcactgacaagcggcgtgcacacctttccagccgtgctgcaaagcagcggcctgtactctctgagcagcgtggtcacagtgcctagctctagcctgggcacccagacctacatctgcaatgtgaaccacaagcctagcaacaccaaggtggacaagagagtggaacccaagagctgtgaagtgaaaaccgactccaccgaccacgtgaagcccaaagagacagagaacaccaagcagcccagcaagagctgccacaagcccaaggccatcgtgcacaccgagaaagtgaacatgatgagcctgaccgtgctgggcttcagaatcctgctgctgaaagtggccggctttaacctgctgatgaccctgcggctgtggtccagc

SEQ ID NO: 40208 - DNA, 1956 bp, synthetic construct
  source 1..1956: mol_type = other DNA
atggccttaccagtgaccgccttgctcctgccgctggccttgctgctccacgccgccaggccggacatccagatgacacagagccctagcagcctgtctgccagcgtgggagacagagtgaccatcacctgtagagccagccaggacgtgaacacagccgtggcttggtatcagcagaagcctggcaaggcccctaagctgctgatctacagcgcctacttcctgtacagcggcgtgcccagcagattcagcggaagcagaagcggcaccgacttcaccctgacaatatccagcctccagcctgaggacttcgccacctactactgccagcagtacagcagatacagccccgtgacctttggacagggcaccaaggtggaaatcaagagactcgaggagggacagcctaaggccaatcctaccgtgacactgttccctccaagcagcgaagaactccaggccaacaaggccacacttgtgtgcctgatctccgacttctaccctggggctgtgacagtggcttggaaggccgatggatctcctgtgaaagccggcgtggaaaccaccaagccatccaagcagagcaacaacaaatacgccgccagctcctacctgagcctgacacctgagcagtggaagtcccacagatcctacagctgccaagtgacccacgaaggcagcaccgtggaaaagacagtggcccctacagagtgcagccccatcaagaccgatgtgattacaatggaccccaaggacaactgctccaaggacgccaacgataccctgctgctccagctgaccaacaccagcgcctactacatgtacgagatcctgctgggcaaggccaccctgtacgccgtgctggtgtctgccctggtgctgatggctatggtcaagcggaaggacagccggggacgcgccaagagaagcggatctggcgtgaagcagaccctgaatttcgacctgctgaagctggctggcgacgtggaatccaacccaggccctactagtatggactggatttggcgcatccttttccttgtcggcgctgctaccggcgcgcattccttcgaagaagttcagctggttgaaagtggtggcggcctggttcaacctggcggatctctgagactgagctgtgccgccagcggcttcaatgtgtacgcctctggaatgcactgggtccgacaggcccctggcaaaggacttgagtgggtcgccaaaatctaccccgacagcgactacacctattacgccgacagcgtgaagggcagattcaccatcagcgccgacaccagcaagaacaccgcctacctccagatgaactccctgagagccgaggacaccgccgtgtactactgtagcagagacagcagcttctactacgtgtacgctatggactactggggccagggcacactggtcacagtctcttctacgcgtgcctctacaaagggaccctccgtgtttcctctggctcccagcagcaagtctacaagcggaggaacagccgctctgggctgcctggtcaaggattactttcccgagcctgtgaccgtgtcctggaatagcggagcactgacaagcggcgtgcacacctttccagccgtgctgcaaagcagcggcctgtactctctgagcagcgtggtcacagtgcctagctctagcctgggcacccagacctacatctgcaatgtgaaccacaagcctagcaacaccaaggtggacaagagagtggaacccaagagctgtgaagtgaaaaccgactccaccgaccacgtgaagcccaaagagacagagaacaccaagcagcccagcaagagctgccacaagcccaaggccatcgtgcacaccgagaaagtgaacatgatgagcctgaccgtgctgggcttcagaatcctgctgctgaaagtggccggctttaacctgctgatgaccctgcggctgtggtccagc

SEQ ID NO: 40209 - DNA, 1941 bp, synthetic construct
  source 1..1941: mol_type = other DNA
atggccttaccagtgaccgccttgctcctgccgctggccttgctgctccacgccgccaggccggacatccagatgacacagagccctagcagcctgtctgccagcgtgggagacagagtgaccatcacctgtagagccagccaggatgtgtctacagccgtggcctggtatcagcagaagcctggaaaggcccctaagctgctgatctacagcgccagctttctgtactccggcgtgcccagcagattcagcggaagcagaagcggcaccgacttcaccctgacaatatccagcctccagcctgaggacttcgccacctactactgccagcagtacctgtaccagccttggacattcggccagggcaccaaggtggaaatcaagagactcgaggagggacagcctaaggccaatcctaccgtgacactgttccctccaagcagcgaagaactccaggccaacaaggccacacttgtgtgcctgatctccgacttctaccctggggctgtgacagtggcttggaaggccgatggatctcctgtgaaagccggcgtggaaaccaccaagccatccaagcagagcaacaacaaatacgccgccagctcctacctgagcctgacacctgagcagtggaagtcccacagatcctacagctgccaagtgacccacgaaggcagcaccgtggaaaagacagtggcccctacagagtgcagccccatcaagaccgatgtgattacaatggaccccaaggacaactgctccaaggacgccaacgataccctgctgctccagctgaccaacaccagcgcctactacatgtacgagatcctgctgggcaaggccaccctgtacgccgtgctggtgtctgccctggtgctgatggctatggtcaagcggaaggacagccggggacgcgccaagagaagcggatctggcgtgaagcagaccctgaatttcgacctgctgaagctggctggcgacgtggaatccaacccaggccctactagtatggactggatttggcgcatccttttccttgtcggcgctgctaccggcgcgcattccttcgaagaagttcagctggttgagtctggcggaggactggttcaacctggcggaagcctgagactgtcttgtgccgccagcggcttcaacatcgactactacggaatgcactgggtccgacaggcccctggcaaaggacttgaatgggtcgcctctctgtacggcggcagcgatagcacagattacgccgactctgtgaagggcagattcaccatcagcgccgacaccagcaagaacaccgcctacctccagatgaactccctgagagccgaagataccgccgtgtactactgctccagacagtacagcgcctacttcgactattggggccagggaaccctggtcaccgttagctctacgcgtgcctctacaaagggaccctccgtgtttcctctggctcccagcagcaagtctacaagcggaggaacagccgctctgggctgcctggtcaaggattactttcccgagcctgtgaccgtgtcctggaatagcggagcactgacaagcggcgtgcacacctttccagccgtgctgcaaagcagcggcctgtactctctgagcagcgtggtcacagtgcctagctctagcctgggcacccagacctacatctgcaatgtgaaccacaagcctagcaacaccaaggtggacaagagagtggaacccaagagctgtgaagtgaaaaccgactccaccgaccacgtgaagcccaaagagacagagaacaccaagcagcccagcaagagctgccacaagcccaaggccatcgtgcacaccgagaaagtgaacatgatgagcctgaccgtgctgggcttcagaatcctgctgctgaaagtggccggctttaacctgctgatgaccctgcggctgtggtccagc

SEQ ID NO: 40210 - DNA, 1947 bp, synthetic construct
  source 1..1947: mol_type = other DNA
atggccttaccagtgaccgccttgctcctgccgctggccttgctgctccacgccgccaggccggagatcgtgctgacacagtctcccgccacactgtcactgtctccaggcgaaagagccacactgagctgtagagccagccagagcgtgtcctcttacctggcctggtatcagcagaagcctggacaggctccccggctgctgatctacgatgccagcaatagagccacaggcatccccgccagattttctggctctggcagcggcaccgatttcaccctgaccataagcagcctggaacctgaggacttcgccgtgtactactgccagcagagaagcgactggcccctgacatttggcggcggaacaaaggtggaaatcaaactcgaggagggacagcctaaggccaatcctaccgtgacactgttccctccaagcagcgaagaactccaggccaacaaggccacacttgtgtgcctgatctccgacttctaccctggggctgtgacagtggcttggaaggccgatggatctcctgtgaaagccggcgtggaaaccaccaagccatccaagcagagcaacaacaaatacgccgccagctcctacctgagcctgacacctgagcagtggaagtcccacagatcctacagctgccaagtgacccacgaaggcagcaccgtggaaaagacagtggcccctacagagtgcagccccatcaagaccgatgtgattacaatggaccccaaggacaactgctccaaggacgccaacgataccctgctgctccagctgaccaacaccagcgcctactacatgtacgagatcctgctgggcaaggccaccctgtacgccgtgctggtgtctgccctggtgctgatggctatggtcaagcggaaggacagccggggacgcgccaagagaagcggatctggcgtgaagcagaccctgaatttcgacctgctgaagctggctggcgacgtggaatccaacccaggccctactagtatggactggatttggcgcatccttttccttgtcggcgctgctaccggcgcgcattccttcgaacaagttcagctggttcagagcggagccgaagtgaagaaacctggcagcagcgtgaaggtgtcctgcaaagcaagcggcggcacctttagctcctacgccatccactgggttcgacaggcaccaggacaaggactggaatggatgggcagaatcatccccatcgagggcagagcctactacgcccagaaattccagggcagagtgaccatcaccgccgacgagtctacaagcaccgcctacatggaactgagcagcctgagaagcgaggataccgctgtgtactattgcgccagaggccggtacagctacagatattggttcgactactggggccagggcaccctggttacagtctcttctacgcgtgcctctacaaagggaccctccgtgtttcctctggctcccagcagcaagtctacaagcggaggaacagccgctctgggctgcctggtcaaggattactttcccgagcctgtgaccgtgtcctggaatagcggagcactgacaagcggcgtgcacacctttccagccgtgctgcaaagcagcggcctgtactctctgagcagcgtggtcacagtgcctagctctagcctgggcacccagacctacatctgcaatgtgaaccacaagcctagcaacaccaaggtggacaagagagtggaacccaagagctgtgaagtgaaaaccgactccaccgaccacgtgaagcccaaagagacagagaacaccaagcagcccagcaagagctgccacaagcccaaggccatcgtgcacaccgagaaagtgaacatgatgagcctgaccgtgctgggcttcagaatcctgctgctgaaagtggccggctttaacctgctgatgaccctgcggctgtggtccagc

SEQ ID NO: 40211 - DNA, 1947 bp, synthetic construct
  source 1..1947: mol_type = other DNA
atggccttaccagtgaccgccttgctcctgccgctggccttgctgctccacgccgccaggccggagatcgtgctgacacagtctcccgccacactgtcactgtctccaggcgaaagagccacactgagctgtagagccagccagagcgtgtcctcttacctggcctggtatcagcagaagcctggacaggctccccggctgctgatctacgatgccagcaatagagccacaggcatccccgccagattttctggctctggcagcggcaccgatttcaccctgaccataagcagcctggaacctgaggacttcgccgtgtactactgccagcagagaagcaactggcccctgacctttggacagggcaccaaggtggaaatcaaactcgaggagggacagcctaaggccaatcctaccgtgacactgttccctccaagcagcgaagaactccaggccaacaaggccacacttgtgtgcctgatctccgacttctaccctggggctgtgacagtggcttggaaggccgatggatctcctgtgaaagccggcgtggaaaccaccaagccatccaagcagagcaacaacaaatacgccgccagctcctacctgagcctgacacctgagcagtggaagtcccacagatcctacagctgccaagtgacccacgaaggcagcaccgtggaaaagacagtggcccctacagagtgcagccccatcaagaccgatgtgattacaatggaccccaaggacaactgctccaaggacgccaacgataccctgctgctccagctgaccaacaccagcgcctactacatgtacgagatcctgctgggcaaggccaccctgtacgccgtgctggtgtctgccctggtgctgatggctatggtcaagcggaaggacagccggggacgcgccaagagaagcggatctggcgtgaagcagaccctgaatttcgacctgctgaagctggctggcgacgtggaatccaacccaggccctactagtatggactggatttggcgcatccttttccttgtcggcgctgctaccggcgcgcattccttcgaacaagttcagctggttcagagcggagccgaagtgaagaaacctggcagcagcgtgaaggtgtcctgcaaagcaagcggcggcacctttagcacctacgccatccactgggttcgacaggcaccaggacaaggactggaatggatgggcagaatcatccccatcgagggcagagcctactacgcccagaaattccagggcagagtgaccatcaccgccgacgagtctacaagcaccgcctacatggaactgagcagcctgagaagcgaggataccgctgtgtactattgcgccagaggccggtacagctacagatattggttcgactactggggccagggcaccctggttacagtctcttctacgcgtgcctctacaaagggaccctccgtgtttcctctggctcccagcagcaagtctacaagcggaggaacagccgctctgggctgcctggtcaaggattactttcccgagcctgtgaccgtgtcctggaatagcggagcactgacaagcggcgtgcacacctttccagccgtgctgcaaagcagcggcctgtactctctgagcagcgtggtcacagtgcctagctctagcctgggcacccagacctacatctgcaatgtgaaccacaagcctagcaacaccaaggtggacaagagagtggaacccaagagctgtgaagtgaaaaccgactccaccgaccacgtgaagcccaaagagacagagaacaccaagcagcccagcaagagctgccacaagcccaaggccatcgtgcacaccgagaaagtgaacatgatgagcctgaccgtgctgggcttcagaatcctgctgctgaaagtggccggctttaacctgctgatgaccctgcggctgtggtccagc

SEQ ID NO: 40212 - DNA, 1989 bp, synthetic construct
  source 1..1989: mol_type = other DNA
atggccttaccagtgaccgccttgctcctgccgctggccttgctgctccacgccgccaggccggacatccagatgacacagagcccctctagcctgtctgccagcgtgggagacagagtgaccatcacctgtagagccagccagagcatcagaaactacctgaactggtatcagcaaaagcccggcaaggcccctgagctgctgattcatgctgcaagcagcctccagagcggcgtgccaagcagattttctggcagcggcagcggaaccgacttcaccctgacaatatctagcctccagcctgaggacttcgccagctactactgccagcagagctacagcgcccctcctatcacctttggacagggcaccagactggaaatcaagctcgaggagggacagcctaaggccaatcctaccgtgacactgttccctccaagcagcgaagaactccaggccaacaaggccacacttgtgtgcctgatctccgacttctaccctggggctgtgacagtggcttggaaggccgatggatctcctgtgaaagccggcgtggaaaccaccaagccatccaagcagagcaacaacaaatacgccgccagctcctacctgagcctgacacctgagcagtggaagtcccacagatcctacagctgccaagtgacccacgaaggcagcaccgtggaaaagacagtggcccctacagagtgcagccccatcaagaccgatgtgattacaatggaccccaaggacaactgctccaaggacgccaacgataccctgctgctccagctgaccaacaccagcgcctactacatgtacgagatcctgctgggcaaggccaccctgtacgccgtgctggtgtctgccctggtgctgatggctatggtcaagcggaaggacagccggggacgcgccaagagaagcggatctggcgtgaagcagaccctgaatttcgacctgctgaagctggctggcgacgtggaatccaacccaggccctactagtatggactggatttggcgcatccttttccttgtcggcgctgctaccggcgcgcattccttcgaacaggttcagctccagcagtctggacctggcctggtcaagcctagccagacactgtctctgacctgtgccatcagcggcgatagcgtgtcctctaatagagccgcctggaactggatcagacagagccctagcagaggactccagtggctgggcagaacctactaccgcagcaagtggtacaacgactacgccgtgtctctgcggagccggatcaccatcaatcccgtgaccagcaagaaccaggtggccctgcacatgaacagcgtgacccctgaagataccgccgtgtactactgtgccagagccggaattgtggtggtgcccggacctgagacattctactactacgaccacggcctggacgtgtggggccagggaacaacagtgactgtctcttctacgcgtgcctctacaaagggaccctccgtgtttcctctggctcccagcagcaagtctacaagcggaggaacagccgctctgggctgcctggtcaaggattactttcccgagcctgtgaccgtgtcctggaatagcggagcactgacaagcggcgtgcacacctttccagccgtgctgcaaagcagcggcctgtactctctgagcagcgtggtcacagtgcctagctctagcctgggcacccagacctacatctgcaatgtgaaccacaagcctagcaacaccaaggtggacaagagagtggaacccaagagctgtgaagtgaaaaccgactccaccgaccacgtgaagcccaaagagacagagaacaccaagcagcccagcaagagctgccacaagcccaaggccatcgtgcacaccgagaaagtgaacatgatgagcctgaccgtgctgggcttcagaatcctgctgctgaaagtggccggctttaacctgctgatgaccctgcggctgtggtccagc

SEQ ID NO: 40213 - DNA, 1920 bp, synthetic construct
  source 1..1920: mol_type = other DNA
atggccttaccagtgaccgccttgctcctgccgctggccttgctgctccacgccgccaggccggacatccagctgacacagagccctagcacactgagcgccagcatgggcgacagagtgaccatcacatgtagcgcctctagcagcgtgcggttcatccactggtatcagcagaagcctggcaaggcccctaagcggctgatctacgataccagcaaactggcctctggcgtgcccagcagattttctggctctggcagcggcaccgacttcaccctgacaatatctagcctccagcctgaggacttcgccacctactactgtcagcagtggggcagcagccctttcacctttggacagggcaccaaggtggaaatcaagctcgaggagggacagcctaaggccaatcctaccgtgacactgttccctccaagcagcgaagaactccaggccaacaaggccacacttgtgtgcctgatctccgacttctaccctggggctgtgacagtggcttggaaggccgatggatctcctgtgaaagccggcgtggaaaccaccaagccatccaagcagagcaacaacaaatacgccgccagctcctacctgagcctgacacctgagcagtggaagtcccacagatcctacagctgccaagtgacccacgaaggcagcaccgtggaaaagacagtggcccctacagagtgcagccccatcaagaccgatgtgattacaatggaccccaaggacaactgctccaaggacgccaacgataccctgctgctccagctgaccaacaccagcgcctactacatgtacgagatcctgctgggcaaggccaccctgtacgccgtgctggtgtctgccctggtgctgatggctatggtcaagcggaaggacagccggggacgcgccaagagaagcggatctggcgtgaagcagaccctgaatttcgacctgctgaagctggctggcgacgtggaatccaacccaggccctactagtatggactggatttggcgcatccttttccttgtcggcgctgctaccggcgcgcattccttcgaagtgcagctggttgagtacggtggcggactggttcaacctggcggtagcctgagactgtcttgtgccgccagcggcttcaacatcaaggactactatatccactgggtccgacaggccccaggcaaaggacttgaatgggttgcctggatcgaccccgagaacggcgataccgagttcgtgcccaagtttcagggcagagccaccatgagcgccgacacctctaagaacacagcctacctccagatgaacagcctgagagccgaggacaccgccgtgtactactgtaaaaccggcggcttttggggccagggcacactggtcacagtcagctctacgcgtgcctctacaaagggaccctccgtgtttcctctggctcccagcagcaagtctacaagcggaggaacagccgctctgggctgcctggtcaaggattactttcccgagcctgtgaccgtgtcctggaatagcggagcactgacaagcggcgtgcacacctttccagccgtgctgcaaagcagcggcctgtactctctgagcagcgtggtcacagtgcctagctctagcctgggcacccagacctacatctgcaatgtgaaccacaagcctagcaacaccaaggtggacaagagagtggaacccaagagctgtgaagtgaaaaccgactccaccgaccacgtgaagcccaaagagacagagaacaccaagcagcccagcaagagctgccacaagcccaaggccatcgtgcacaccgagaaagtgaacatgatgagcctgaccgtgctgggcttcagaatcctgctgctgaaagtggccggctttaacctgctgatgaccctgcggctgtggtccagctaa

SEQ ID NO: 40214 - DNA, 1935 bp, synthetic construct
  source 1..1935: mol_type = other DNA
atggccttaccagtgaccgccttgctcctgccgctggccttgctgctccacgccgccaggccggacatccagatgacacagagccctagcagcctgtctgccagcgtgggagacagagtgaccatcacatgcaaggccagccaggatgtgggcacagccgtggattggtatcagcagaagcctggcaaggcccctaagctgctgatctactgggccagcacaagacacacaggcgtgcccagcagattttctggcagcggctctggcaccgacttcaccctgacaatatccagcctccagcctgaggacttcgccacctactactgccagcagtacaacagctaccctctgaccttcggccagggcaccaaggtggaaatcaaaagactcgaggagggacagcctaaggccaatcctaccgtgacactgttccctccaagcagcgaagaactccaggccaacaaggccacacttgtgtgcctgatctccgacttctaccctggggctgtgacagtggcttggaaggccgatggatctcctgtgaaagccggcgtggaaaccaccaagccatccaagcagagcaacaacaaatacgccgccagctcctacctgagcctgacacctgagcagtggaagtcccacagatcctacagctgccaagtgacccacgaaggcagcaccgtggaaaagacagtggcccctacagagtgcagccccatcaagaccgatgtgattacaatggaccccaaggacaactgctccaaggacgccaacgataccctgctgctccagctgaccaacaccagcgcctactacatgtacgagatcctgctgggcaaggccaccctgtacgccgtgctggtgtctgccctggtgctgatggctatggtcaagcggaaggacagccggggacgcgccaagagaagcggatctggcgtgaagcagaccctgaatttcgacctgctgaagctggctggcgacgtggaatccaacccaggccctactagtatggactggatttggcgcatccttttccttgtcggcgctgctaccggcgcgcattccttcgaagtgcagctggttgaatcaggtggcggcctggttcaacctggcggatctctgagactgagctgtgccgccagcggctacacctttaccgagtacacaatccactgggtccgacaggcccctggcaaaggacttgagtgggtcgccaacatcaaccccaacaatggcggcaccacctacaaccagaagttcgaggacagattcaccatcagccgggacaacagcaagaacaccctgtacctccagatgaactccctgagagccgaggacaccgccgtgtactattgtgccagaggctggaacttcgactactggggccagggaacactggtcaccgttagctctacgcgtgcctctacaaagggaccctccgtgtttcctctggctcccagcagcaagtctacaagcggaggaacagccgctctgggctgcctggtcaaggattactttcccgagcctgtgaccgtgtcctggaatagcggagcactgacaagcggcgtgcacacctttccagccgtgctgcaaagcagcggcctgtactctctgagcagcgtggtcacagtgcctagctctagcctgggcacccagacctacatctgcaatgtgaaccacaagcctagcaacaccaaggtggacaagagagtggaacccaagagctgtgaagtgaaaaccgactccaccgaccacgtgaagcccaaagagacagagaacaccaagcagcccagcaagagctgccacaagcccaaggccatcgtgcacaccgagaaagtgaacatgatgagcctgaccgtgctgggcttcagaatcctgctgctgaaagtggccggctttaacctgctgatgaccctgcggctgtggtccagctaa

SEQ ID NO: 40215 - DNA, 1956 bp, synthetic construct
  source 1..1956: mol_type = other DNA
atggccttaccagtgaccgccttgctcctgccgctggccttgctgctccacgccgccaggccgagctacgtgctgacacagcctccatccgtgtctgtggctccaggacagaccgccagaatcacatgcggcggcaacaacatcggcggcaagagcgtgcactggtatcagcagccacctggacaggctccagtggtggtggtgtacgacgacagcgatagacctagcggcatccccgagagattcagcggcagcaattccggcaataccgccacactgaccatcagcagagtggaagctggcgacgaggccgtgtactactgccaagtgtgggacagcagcagcgatcacgtggtgtttggcggcggaacaaagctgacagtgcttctcgaggagggacagcctaaggccaatcctaccgtgacactgttccctccaagcagcgaagaactccaggccaacaaggccacacttgtgtgcctgatctccgacttctaccctggggctgtgacagtggcttggaaggccgatggatctcctgtgaaagccggcgtggaaaccaccaagccatccaagcagagcaacaacaaatacgccgccagctcctacctgagcctgacacctgagcagtggaagtcccacagatcctacagctgccaagtgacccacgaaggcagcaccgtggaaaagacagtggcccctacagagtgcagccccatcaagaccgatgtgattacaatggaccccaaggacaactgctccaaggacgccaacgataccctgctgctccagctgaccaacaccagcgcctactacatgtacgagatcctgctgggcaaggccaccctgtacgccgtgctggtgtctgccctggtgctgatggctatggtcaagcggaaggacagccggggacgcgccaagagaagcggatctggcgtgaagcagaccctgaatttcgacctgctgaagctggctggcgacgtggaatccaacccaggccctactagtatggactggatttggcgcatccttttccttgtcggcgctgctaccggcgcgcattccttcgaacaactccagctgcaagagtctggccctggcctggtcaagcctagcgaaacactgagcctgacctgtaccgtgtctggcggctctatcagctccagcagctatttctggggctggatcagacaacctcctggcaaaggactggaatggatcggctccatctactacagcggcatcacctactacaaccccagcctgaagtccagagtgaccatctccgtggacaccagcaagaaccagttctccctgaagctgagcagcgtgacagccgccgataccgccgtgtattattgtgccagacatgacggcgctgtggccggcctgtttgattattggggacagggcaccctggtcaccgtgtcatctgctacgcgtgcctctacaaagggaccctccgtgtttcctctggctcccagcagcaagtctacaagcggaggaacagccgctctgggctgcctggtcaaggattactttcccgagcctgtgaccgtgtcctggaatagcggagcactgacaagcggcgtgcacacctttccagccgtgctgcaaagcagcggcctgtactctctgagcagcgtggtcacagtgcctagctctagcctgggcacccagacctacatctgcaatgtgaaccacaagcctagcaacaccaaggtggacaagagagtggaacccaagagctgtgaagtgaaaaccgactccaccgaccacgtgaagcccaaagagacagagaacaccaagcagcccagcaagagctgccacaagcccaaggccatcgtgcacaccgagaaagtgaacatgatgagcctgaccgtgatcggcttcagaatcctgctgctgaaagtggccggctttaacctgctgatgaccctgcggctgtggtccagc

SEQ ID NO: 40216 - DNA, 1953 bp, synthetic construct
  source 1..1953: mol_type = other DNA
atggccttaccagtgaccgccttgctcctgccgctggccttgctgctccacgccgccaggccggacatccagatgacacagagccctagcagcctgtctgccagcgtgggagacagagtgaccatcacatgcaaggccagcgaccacatcaacaactggctggcctggtatcagcagaagcctggacaggcccctaagctgctgatctacggcgctaccacactggaaacaggcgtgcccagcagattttctggcagcggctctggcaccgactacaccctgacaatatccagcctccagcctgaggacttcgccacctactactgtcagcagagctggaacaccccttggacattcggccagggcaccaagctggaaatcaagagactcgaggagggacagcctaaggccaatcctaccgtgacactgttccctccaagcagcgaagaactccaggccaacaaggccacacttgtgtgcctgatctccgacttctaccctggggctgtgacagtggcttggaaggccgatggatctcctgtgaaagccggcgtggaaaccaccaagccatccaagcagagcaacaacaaatacgccgccagctcctacctgagcctgacacctgagcagtggaagtcccacagatcctacagctgccaagtgacccacgaaggcagcaccgtggaaaagacagtggcccctacagagtgcagccccatcaagaccgatgtgattacaatggaccccaaggacaactgctccaaggacgccaacgataccctgctgctccagctgaccaacaccagcgcctactacatgtacgagatcctgctgggcaaggccaccctgtacgccgtgctggtgtctgccctggtgctgatggctatggtcaagcggaaggacagccggggacgcgccaagagaagcggatctggcgtgaagcagaccctgaatttcgacctgctgaagctggctggcgacgtggaatccaacccaggccctactagtatggactggatttggcgcatccttttccttgtcggcgctgctaccggcgcgcattccttcgaacaagttcagcttcaacagcctggcgctgagctggtcaaacctggcgcttctgtgaagatgagctgcaaagccagcggctacaccttcagcagctactggatcaactggatgaagcagaaacccggccagggactcgaatggatcggccaaatctatcccggcgacggcgacaccaactacaacggcaagttcaagggcagagccacactgaccgccgatacctctagcagcacagcctacatgcagctgagcagcctgaccagcgaagatagcgccgtgtacttctgtgcccggtccatcacaacagtcgtgggctgcgctatggactattggggccagggaacaagcgtgaccgtgtctagtacgcgtgcctctacaaagggaccctccgtgtttcctctggctcccagcagcaagtctacaagcggaggaacagccgctctgggctgcctggtcaaggattactttcccgagcctgtgaccgtgtcctggaatagcggagcactgacaagcggcgtgcacacctttccagccgtgctgcaaagcagcggcctgtactctctgagcagcgtggtcacagtgcctagctctagcctgggcacccagacctacatctgcaatgtgaaccacaagcctagcaacaccaaggtggacaagagagtggaacccaagagctgtgaagtgaaaaccgactccaccgaccacgtgaagcccaaagagacagagaacaccaagcagcccagcaagagctgccacaagcccaaggccatcgtgcacaccgagaaagtgaacatgatgagcctgaccgtgatcggcttcagaatcctgctgctgaaagtggccggctttaacctgctgatgaccctgcggctgtggtccagc

SEQ ID NO: 40217 - DNA, 1953 bp, synthetic construct
  source 1..1953: mol_type = other DNA
atggccttaccagtgaccgccttgctcctgccgctggccttgctgctccacgccgccaggccggacatccagatgacacagagccctagcagcctgtctgccagcgtgggagacagagtgaccatcacatgcaaggccagcgaccacatcaacaactggctggcctggtatcagcagaagcctggacaggcccctaagctgctgatctacggcgctaccacactggaaacaggcgtgcccagcagattttctggcagcggctctggcaccgactacaccctgacaatatccagcctccagcctgaggacttcgccacctactactgtcagcagagctggaacaccccttggacattcggccagggcaccaagctggaaatcaagagactcgaggagggacagcctaaggccaatcctaccgtgacactgttccctccaagcagcgaagaactccaggccaacaaggccacacttgtgtgcctgatctccgacttctaccctggggctgtgacagtggcttggaaggccgatggatctcctgtgaaagccggcgtggaaaccaccaagccatccaagcagagcaacaacaaatacgccgccagctcctacctgagcctgacacctgagcagtggaagtcccacagatcctacagctgccaagtgacccacgaaggcagcaccgtggaaaagacagtggcccctacagagtgcagccccatcaagaccgatgtgattacaatggaccccaaggacaactgctccaaggacgccaacgataccctgctgctccagctgaccaacaccagcgcctactacatgtacgagatcctgctgggcaaggccaccctgtacgccgtgctggtgtctgccctggtgctgatggctatggtcaagcggaaggacagccggggacgcgccaagagaagcggatctggcgtgaagcagaccctgaatttcgacctgctgaagctggctggcgacgtggaatccaacccaggccctactagtatggactggatttggcgcatccttttccttgtcggcgctgctaccggcgcgcattccttcgaacaagttcagcttcaacagcctggcgctgagctggtcaaacctggcgcttctgtgaagatgagctgcaaagccagcggctacgccttcagcagctcttggatcaactggatgaagcagaaacccggccagggactcgaatggatcggccaaatctatcccggcgacggcgacaccaactacaacggcaagttcaagggcagagccacactgaccgccgatacctctagcagcacagcctacatgcagctgagcagcctgaccagcgaagatagcgccgtgtacttctgtgcccggtccatcacaacagtcgtgggctgcgctatggactattggggccagggaacaagcgtgaccgtgtctagtacgcgtgcctctacaaagggaccctccgtgtttcctctggctcccagcagcaagtctacaagcggaggaacagccgctctgggctgcctggtcaaggattactttcccgagcctgtgaccgtgtcctggaatagcggagcactgacaagcggcgtgcacacctttccagccgtgctgcaaagcagcggcctgtactctctgagcagcgtggtcacagtgcctagctctagcctgggcacccagacctacatctgcaatgtgaaccacaagcctagcaacaccaaggtggacaagagagtggaacccaagagctgtgaagtgaaaaccgactccaccgaccacgtgaagcccaaagagacagagaacaccaagcagcccagcaagagctgccacaagcccaaggccatcgtgcacaccgagaaagtgaacatgatgagcctgaccgtgatcggcttcagaatcctgctgctgaaagtggccggctttaacctgctgatgaccctgcggctgtggtccagc

SEQ ID NO: 40218 - DNA, 1953 bp, synthetic construct
  source 1..1953: mol_type = other DNA
atggccttaccagtgaccgccttgctcctgccgctggccttgctgctccacgccgccaggccggagatcgtgctgacacagagccctgccaccctgtctctgagccctggcgaaagagccaccctgagctgtagagccagccagagcgtgtccagctacctggcctggtatcagcagaagcccggccaggctccccggctgctgatctacgatgccagcaatagagccaccggcatccccgccagattttccggctctggcagcggcaccgacttcaccctgaccatcagctccctggaacccgaggacttcgccgtgtactactgccagcagcggagcaactggcccatcacattcggccagggcacccggctggaaatcaaactcgaggagggacagcctaaggccaatcctaccgtgacactgttccctccaagcagcgaagaactccaggccaacaaggccacacttgtgtgcctgatctccgacttctaccctggggctgtgacagtggcttggaaggccgatggatctcctgtgaaagccggcgtggaaaccaccaagccatccaagcagagcaacaacaaatacgccgccagctcctacctgagcctgacacctgagcagtggaagtcccacagatcctacagctgccaagtgacccacgaaggcagcaccgtggaaaagacagtggcccctacagagtgcagccccatcaagaccgatgtgattacaatggaccccaaggacaactgctccaaggacgccaacgataccctgctgctccagctgaccaacaccagcgcctactacatgtacgagatcctgctgggcaaggccaccctgtacgccgtgctggtgtctgccctggtgctgatggctatggtcaagcggaaggacagccggggacgcgccaagagaagcggatctggcgtgaagcagaccctgaatttcgacctgctgaagctggctggcgacgtggaatccaacccaggccctactagtatggactggatttggcgcatccttttccttgtcggcgctgctaccggcgcgcattccttcgaagaagtgcagctggtggaatcaggcggcggactggtgcagcctggcagaagcctgagactgagctgtgccgccagcggcttcaccttcaacgactacgccatgcactgggtgcgccaggcccctggaaaaggactggaatgggtgtccacaatcagctggaacagcggcagcatcggctacgccgatagcgtgaagggccggttcaccatcagccgggacaacgccaagaagtccctgtacctccagatgaacagcctgcgggccgaggacacagccctgtactattgcgccaaggacatccagtacggcaactactactacggcatggacgtgtggggccagggaaccaccgtgaccgtgtcatctacgcgtgcctctacaaagggaccctccgtgtttcctctggctcccagcagcaagtctacaagcggaggaacagccgctctgggctgcctggtcaaggattactttcccgagcctgtgaccgtgtcctggaatagcggagcactgacaagcggcgtgcacacctttccagccgtgctgcaaagcagcggcctgtactctctgagcagcgtggtcacagtgcctagctctagcctgggcacccagacctacatctgcaatgtgaaccacaagcctagcaacaccaaggtggacaagagagtggaacccaagagctgtgaagtgaaaaccgactccaccgaccacgtgaagcccaaagagacagagaacaccaagcagcccagcaagagctgccacaagcccaaggccatcgtgcacaccgagaaagtgaacatgatgagcctgaccgtgatcggcttcagaatcctgctgctgaaagtggccggctttaacctgctgatgaccctgcggctgtggtccagc

SEQ ID NO: 40219 - DNA, 1962 bp, synthetic construct
  source 1..1962: mol_type = other DNA
atggccttaccagtgaccgccttgctcctgccgctggccttgctgctccacgccgccaggccgatccagatgacccagagccccagcagcctgtctgccagcgtgggcgacagagtgaccatcacctgtcggagcagccagagcatcgtgcactccgtgggcaacaccttcctggaatggtatcagcagaagcccggcaaggcccccaagctgctgatctacaaggtgtccaacagattcagcggcgtgcccagcaggtttagcggctctggcagcggcaccgacttcaccctgaccatctctagcctccagcccgaggacttcgccacctactactgttttcaaggcagccagttcccctacaccttcggccagggaacaaaggtggaaatcaagcggctcgaggagggacagcctaaggccaatcctaccgtgacactgttccctccaagcagcgaagaactccaggccaacaaggccacacttgtgtgcctgatctccgacttctaccctggggctgtgacagtggcttggaaggccgatggatctcctgtgaaagccggcgtggaaaccaccaagccatccaagcagagcaacaacaaatacgccgccagctcctacctgagcctgacacctgagcagtggaagtcccacagatcctacagctgccaagtgacccacgaaggcagcaccgtggaaaagacagtggcccctacagagtgcagccccatcaagaccgatgtgattacaatggaccccaaggacaactgctccaaggacgccaacgataccctgctgctccagctgaccaacaccagcgcctactacatgtacgagatcctgctgggcaaggccaccctgtacgccgtgctggtgtctgccctggtgctgatggctatggtcaagcggaaggacagccggggacgcgccaagagaagcggatctggcgtgaagcagaccctgaatttcgacctgctgaagctggctggcgacgtggaatccaacccaggccctactagtatggactggatttggcgcatccttttccttgtcggcgctgctaccggcgcgcattccttcgaagaagtgcaactggtggaaagcggaggcggcctggtgcagcctggcggatctctgagactgagctgtgccgccagcggctacgagttcagccggtcctggatgaactgggtgcgccaggcccctggcaagggactggaatgggtgggaagaatctaccccggcgacggcgacaccaactacagcggcaagttcaagggccggttcaccatcagcgccgacaccagcaagaacaccgcctacctccagatgaacagcctgcgggccgaggataccgccgtgtactactgtgccagagatggcagctcctgggactggtacttcgacgtgtggggacagggaacccttgtgaccgtgtccagcacgcgtgcctctacaaagggaccctccgtgtttcctctggctcccagcagcaagtctacaagcggaggaacagccgctctgggctgcctggtcaaggattactttcccgagcctgtgaccgtgtcctggaatagcggagcactgacaagcggcgtgcacacctttccagccgtgctgcaaagcagcggcctgtactctctgagcagcgtggtcacagtgcctagctctagcctgggcacccagacctacatctgcaatgtgaaccacaagcctagcaacaccaaggtggacaagagagtggaacccaagagctgtgaagtgaaaaccgactccaccgaccacgtgaagcccaaagagacagagaacaccaagcagcccagcaagagctgccacaagcccaaggccatcgtgcacaccgagaaagtgaacatgatgagcctgaccgtgatcggcttcagaatcctgctgctgaaagtggccggctttaacctgctgatgaccctgcggctgtggtccagc

SEQ ID NO: 40220 - DNA, 1974 bp, synthetic construct
  source 1..1974: mol_type = other DNA
atggccttaccagtgaccgccttgctcctgccgctggccttgctgctccacgccgccaggccggaactgcaaagcgtgctgacacagcctcctagcgcctctggaacacctggacagagagtgacaatcagctgctccggcagctccagcaacatcggcagcaactacgtgaactggtatcagcagctgcctggcacagcccctaaactgctgatctacggcgactaccagaggccaagcggcgtgccagatagattcagcggcagcaagtctggcacaagcgccagcctggctatctctggactgagaagcgaggacgaggccgactactactgtgccaccagagatgatagcctgagcggcagcgtggtgtttggcacaggcacaaagctgacagtgctgggcctcgaggagggacagcctaaggccaatcctaccgtgacactgttccctccaagcagcgaagaactccaggccaacaaggccacacttgtgtgcctgatctccgacttctaccctggggctgtgacagtggcttggaaggccgatggatctcctgtgaaagccggcgtggaaaccaccaagccatccaagcagagcaacaacaaatacgccgccagctcctacctgagcctgacacctgagcagtggaagtcccacagatcctacagctgccaagtgacccacgaaggcagcaccgtggaaaagacagtggcccctacagagtgcagccccatcaagaccgatgtgattacaatggaccccaaggacaactgctccaaggacgccaacgataccctgctgctccagctgaccaacaccagcgcctactacatgtacgagatcctgctgggcaaggccaccctgtacgccgtgctggtgtctgccctggtgctgatggctatggtcaagcggaaggacagccggggacgcgccaagagaagcggatctggcgtgaagcagaccctgaatttcgacctgctgaagctggctggcgacgtggaatccaacccaggccctactagtatggactggatttggcgcatccttttccttgtcggcgctgctaccggcgcgcattccttcgaagaagttcagctggttcagagcggagccgaagtgaagaagcctggcgagagcctgaagattagctgcaaaggcagcggctacggcttcaccagctattggatcggctgggtccgacagatgcctggcaaaggactggaatggatgggcatcattcaccccgacgacagcgacaccaagtacagccctagcttccagggccaagtgaccatcagcgccgacaagagcatcagcacagcctacctccagtggtcctctctgaaggccagcgataccgccatgtactactgcgccagcagctacctgagaggactgtggggcggctacttcgatttttggggccagggcacactggtcaccgttagttctacgcgtgcctctacaaagggaccctccgtgtttcctctggctcccagcagcaagtctacaagcggaggaacagccgctctgggctgcctggtcaaggattactttcccgagcctgtgaccgtgtcctggaatagcggagcactgacaagcggcgtgcacacctttccagccgtgctgcaaagcagcggcctgtactctctgagcagcgtggtcacagtgcctagctctagcctgggcacccagacctacatctgcaatgtgaaccacaagcctagcaacaccaaggtggacaagagagtggaacccaagagctgtgaagtgaaaaccgactccaccgaccacgtgaagcccaaagagacagagaacaccaagcagcccagcaagagctgccacaagcccaaggccatcgtgcacaccgagaaagtgaacatgatgagcctgaccgtgatcggcttcagaatcctgctgctgaaagtggccggctttaacctgctgatgaccctgcggctgtggtccagc

SEQ ID NO: 40221 - DNA, 1965 bp, synthetic construct
  source 1..1965: mol_type = other DNA
atggccttaccagtgaccgccttgctcctgccgctggccttgctgctccacgccgccaggccggacttcgtgatgacacagagccctgatagcctggccgtgtctctcggcgagcgagtgaccatgagctgcaagtctagccagagcctgctgaacagcggcaaccagaagaactacctgacctggtatcagcagaagcccggccagcctcctaagctgctgatctactgggccagcaccagagaaagcggcgtgcccgatagattttctggctctggcagcggcaccgacttcaccctgacaatttctagcctgcaagccgaggacgtggccgtgtactactgccagaacgactacagctacccctacaccttcggccagggcaccaagctggaaatcaaactcgaggagggacagcctaaggccaatcctaccgtgacactgttccctccaagcagcgaagaactccaggccaacaaggccacacttgtgtgcctgatctccgacttctaccctggggctgtgacagtggcttggaaggccgatggatctcctgtgaaagccggcgtggaaaccaccaagccatccaagcagagcaacaacaaatacgccgccagctcctacctgagcctgacacctgagcagtggaagtcccacagatcctacagctgccaagtgacccacgaaggcagcaccgtggaaaagacagtggcccctacagagtgcagccccatcaagaccgatgtgattacaatggaccccaaggacaactgctccaaggacgccaacgataccctgctgctccagctgaccaacaccagcgcctactacatgtacgagatcctgctgggcaaggccaccctgtacgccgtgctggtgtctgccctggtgctgatggctatggtcaagcggaaggacagccggggacgcgccaagagaagcggatctggcgtgaagcagaccctgaatttcgacctgctgaagctggctggcgacgtggaatccaacccaggccctactagtatggactggatttggcgcatccttttccttgtcggcgctgctaccggcgcgcattccttcgaagaagtgcaactggttcagagcggagccgagctgaagaaacctggggccagcgtgaaggtgtcctgtaaagccagcggctacacctttaccgactactacatgaaatgggtccgacaggccccaggccagggactcgaatggatcggcgatattatccccagcaacggggccaccttctacaaccagaaattcaagggccgcgtgaccatcaccgtggacaagagcacaagcaccgcctacatggaactgagcagcctgagaagcgaggacaccgccgtgtattattgcgccagaagccatctgctgcgggccagttggttcgcctattggggacagggaaccctggtcaccgttagctctacgcgtgcctctacaaagggaccctccgtgtttcctctggctcccagcagcaagtctacaagcggaggaacagccgctctgggctgcctggtcaaggattactttcccgagcctgtgaccgtgtcctggaatagcggagcactgacaagcggcgtgcacacctttccagccgtgctgcaaagcagcggcctgtactctctgagcagcgtggtcacagtgcctagctctagcctgggcacccagacctacatctgcaatgtgaaccacaagcctagcaacaccaaggtggacaagagagtggaacccaagagctgtgaagtgaaaaccgactccaccgaccacgtgaagcccaaagagacagagaacaccaagcagcccagcaagagctgccacaagcccaaggccatcgtgcacaccgagaaagtgaacatgatgagcctgaccgtgatcggcttcagaatcctgctgctgaaagtggccggctttaacctgctgatgaccctgcggctgtggtccagc

SEQ ID NO: 40222 - DNA, 1971 bp, synthetic construct
  source 1..1971: mol_type = other DNA
atggccttaccagtgaccgccttgctcctgccgctggccttgctgctccacgccgccaggccggagatcgtgctgacacagtctcccgccacactgtcactgtctccaggcgaaagagccacactgagctgtagcgtgtccagcagcatcagcagcagcaacctgcactggtatcagcagaagcctggacaggcccctcggctgctgatctacgccacatctaatctggcctctggcatccccgccagattttctggctctggaagcggcaccgacttcaccctgaccataagcagcctggaacctgaggacttcgccgtgtactactgccagcagtggtccagctatccccacacatttggcggaggcaccaaggtggaaatcaagagactcgaggagggacagcctaaggccaatcctaccgtgacactgttccctccaagcagcgaagaactccaggccaacaaggccacacttgtgtgcctgatctccgacttctaccctggggctgtgacagtggcttggaaggccgatggatctcctgtgaaagccggcgtggaaaccaccaagccatccaagcagagcaacaacaaatacgccgccagctcctacctgagcctgacacctgagcagtggaagtcccacagatcctacagctgccaagtgacccacgaaggcagcaccgtggaaaagacagtggcccctacagagtgcagccccatcaagaccgatgtgattacaatggaccccaaggacaactgctccaaggacgccaacgataccctgctgctccagctgaccaacaccagcgcctactacatgtacgagatcctgctgggcaaggccaccctgtacgccgtgctggtgtctgccctggtgctgatggctatggtcaagcggaaggacagccggggacgcgccaagagaagcggatctggcgtgaagcagaccctgaatttcgacctgctgaagctggctggcgacgtggaatccaacccaggccctactagtatggactggatttggcgcatccttttccttgtcggcgctgctaccggcgcgcattccttcgaacaggttcagctggttcagagcggagccgaagtgaagaaacctggggcctctgtgaaggtgtcctgcaaggcttccggctacacctttaccaactacctgatcgagtgggtccgacaggctccaggacaaggactggaatggatgggcctgattaaccctggcagcggcggcaccaactacaacgagaagttcaagggcagagtgaccatgaccaccgacaccagcacaagcaccgcctacatggaactgcggagcctgagaagcgacgacaccgccgtgtattattgcgccagaagaagccctctcggctcttggatctactacgcctatgacggcgtggcctattggggccagggaacactggttacagtgtcctctacgcgtgcctctacaaagggaccctccgtgtttcctctggctcccagcagcaagtctacaagcggaggaacagccgctctgggctgcctggtcaaggattactttcccgagcctgtgaccgtgtcctggaatagcggagcactgacaagcggcgtgcacacctttccagccgtgctgcaaagcagcggcctgtactctctgagcagcgtggtcacagtgcctagctctagcctgggcacccagacctacatctgcaatgtgaaccacaagcctagcaacaccaaggtggacaagagagtggaacccaagagctgtgaagtgaaaaccgactccaccgaccacgtgaagcccaaagagacagagaacaccaagcagcccagcaagagctgccacaagcccaaggccatcgtgcacaccgagaaagtgaacatgatgagcctgaccgtgatcggcttcagaatcctgctgctgaaagtggccggctttaacctgctgatgaccctgcggctgtggtccagc

SEQ ID NO: 40223 - DNA, 1938 bp, synthetic construct
  source 1..1938: mol_type = other DNA
atggccttaccagtgaccgccttgctcctgccgctggccttgctgctccacgccgccaggccgcagatcgtgctgacacagagccccgccatcatgtctgttagccctggcgagaaagtgaccatgacctgtagcgccagcagcagcgtgaactacatgcactggttccagcagaagcccggcacaagccctaagctgtgggtgtacagcaccagcaatctggcctctggcgtgccagccagattttctggctctggcagcggcaccagctacagcctgacaatcagcagcatggaagccgaggatgccgccacctactattgtcagcagcggagcatctacccaccttggacatttggcggaggcaccaagctggaaatcaaactcgaggagggacagcctaaggccaatcctaccgtgacactgttccctccaagcagcgaagaactccaggccaacaaggccacacttgtgtgcctgatctccgacttctaccctggggctgtgacagtggcttggaaggccgatggatctcctgtgaaagccggcgtggaaaccaccaagccatccaagcagagcaacaacaaatacgccgccagctcctacctgagcctgacacctgagcagtggaagtcccacagatcctacagctgccaagtgacccacgaaggcagcaccgtggaaaagacagtggcccctacagagtgcagccccatcaagaccgatgtgattacaatggaccccaaggacaactgctccaaggacgccaacgataccctgctgctccagctgaccaacaccagcgcctactacatgtacgagatcctgctgggcaaggccaccctgtacgccgtgctggtgtctgccctggtgctgatggctatggtcaagcggaaggacagccggggacgcgccaagagaagcggatctggcgtgaagcagaccctgaatttcgacctgctgaagctggctggcgacgtggaatccaacccaggccctactagtatggactggatttggcgcatccttttccttgtcggcgctgctaccggcgcgcattccttcgaagaagttcagctccagcagagcggccctgagcttgtgaaacctggcgcttccgtgaagatcagctgcaaggccagcggctacagcttcaccggctacaccatgaactgggtcaagcagtcccacggcaagaacctggaatggatcggcctgattaacccctacaacggcggcacctcctacaaccagaagttcaaggccaaggccacactgaccgtggacaagagcagcagcacagcctacatgcagctgaagtccctgaccagcgaggacagcgccgtgtactactgcgccagagattacggctacgtgctggactattggggccagggcacaagcgtgacagtgtctagtacgcgtgcctctacaaagggaccctccgtgtttcctctggctcccagcagcaagtctacaagcggaggaacagccgctctgggctgcctggtcaaggattactttcccgagcctgtgaccgtgtcctggaatagcggagcactgacaagcggcgtgcacacctttccagccgtgctgcaaagcagcggcctgtactctctgagcagcgtggtcacagtgcctagctctagcctgggcacccagacctacatctgcaatgtgaaccacaagcctagcaacaccaaggtggacaagagagtggaacccaagagctgtgaagtgaaaaccgactccaccgaccacgtgaagcccaaagagacagagaacaccaagcagcccagcaagagctgccacaagcccaaggccatcgtgcacaccgagaaagtgaacatgatgagcctgaccgtgatcggcttcagaatcctgctgctgaaagtggccggctttaacctgctgatgaccctgcggctgtggtccagc

SEQ ID NO: 40224 - DNA, 1944 bp, synthetic construct
  source 1..1944: mol_type = other DNA
atggccttaccagtgaccgccttgctcctgccgctggccttgctgctccacgccgccaggccggacatcgtgatgacccagagccctgccaccctgtccgtgtctccaggcgaaagagccaccctgagctgcagagcttcccagagcgtgtccaacgacgtcgtgtggtatcagcagaagcccggccaggcccccagactgctgatctactacgccagcaacagatacaccggcatccccgccagattcagcggctctggcagcggcaccgagttcaccctgacaatcagcagcctccagagcgaggacttcgccgtgtactactgtcagcaggactacaccagcccctggaccttcggccagggcaccaagctggaaatcaagagactcgaggagggacagcctaaggccaatcctaccgtgacactgttccctccaagcagcgaagaactccaggccaacaaggccacacttgtgtgcctgatctccgacttctaccctggggctgtgacagtggcttggaaggccgatggatctcctgtgaaagccggcgtggaaaccaccaagccatccaagcagagcaacaacaaatacgccgccagctcctacctgagcctgacacctgagcagtggaagtcccacagatcctacagctgccaagtgacccacgaaggcagcaccgtggaaaagacagtggcccctacagagtgcagccccatcaagaccgatgtgattacaatggaccccaaggacaactgctccaaggacgccaacgataccctgctgctccagctgaccaacaccagcgcctactacatgtacgagatcctgctgggcaaggccaccctgtacgccgtgctggtgtctgccctggtgctgatggctatggtcaagcggaaggacagccggggacgcgccaagagaagcggatctggcgtgaagcagaccctgaatttcgacctgctgaagctggctggcgacgtggaatccaacccaggccctactagtatggactggatttggcgcatccttttccttgtcggcgctgctaccggcgcgcattccttcgaagaggtgcaactggtgcagagcggagccgaagtgaagaaacctggggccagcgtgcgggtgtcctgcaaggccagcggctacacctttaccaactacggcatgaactgggtgcgccaggctcctggacagggcctggaatggatgggctggatcaacacctacaccggcgagcccacctacgccgacgacttcaagggcagagtgaccatgaccaccgacaccagcacctccaccgcctacatggaactgcggagcctgagaagcgacgacaccgccgtgtattattgcgcccggatcggcgacagcagccccagcgattattggggccagggaaccctcgtgaccgtgtcctctacgcgtgcctctacaaagggaccctccgtgtttcctctggctcccagcagcaagtctacaagcggaggaacagccgctctgggctgcctggtcaaggattactttcccgagcctgtgaccgtgtcctggaatagcggagcactgacaagcggcgtgcacacctttccagccgtgctgcaaagcagcggcctgtactctctgagcagcgtggtcacagtgcctagctctagcctgggcacccagacctacatctgcaatgtgaaccacaagcctagcaacaccaaggtggacaagagagtggaacccaagagctgtgaagtgaaaaccgactccaccgaccacgtgaagcccaaagagacagagaacaccaagcagcccagcaagagctgccacaagcccaaggccatcgtgcacaccgagaaagtgaacatgatgagcctgaccgtgatcggcttcagaatcctgctgctgaaagtggccggctttaacctgctgatgaccctgcggctgtggtccagc

SEQ ID NO: 40225 - DNA, 1950 bp, synthetic construct
  source 1..1950: mol_type = other DNA
atggccttaccagtgaccgccttgctcctgccgctggccttgctgctccacgccgccaggccggacatccagatgacacagagccctagcagcctgtctgccagcgtgggagacagagtgaccatcacctgtagagccagccaggacgtgcggaacatcgtcgtgtggttccagcagaagcctggcaaggcccctaagctgctgatctacagcggcagctacagatacagcggcgtgcccagcagattttccggctctggctctggcaccgacttcaccctgacaatatccagcctccagcctgaggacttcgccacctactactgccagcagcactacagccctccatacacattcggccagggcaccaaggtggaaatcaagagactcgaggagggacagcctaaggccaatcctaccgtgacactgttccctccaagcagcgaagaactccaggccaacaaggccacacttgtgtgcctgatctccgacttctaccctggggctgtgacagtggcttggaaggccgatggatctcctgtgaaagccggcgtggaaaccaccaagccatccaagcagagcaacaacaaatacgccgccagctcctacctgagcctgacacctgagcagtggaagtcccacagatcctacagctgccaagtgacccacgaaggcagcaccgtggaaaagacagtggcccctacagagtgcagccccatcaagaccgatgtgattacaatggaccccaaggacaactgctccaaggacgccaacgataccctgctgctccagctgaccaacaccagcgcctactacatgtacgagatcctgctgggcaaggccaccctgtacgccgtgctggtgtctgccctggtgctgatggctatggtcaagcggaaggacagccggggacgcgccaagagaagcggatctggcgtgaagcagaccctgaatttcgacctgctgaagctggctggcgacgtggaatccaacccaggccctactagtatggactggatttggcgcatccttttccttgtcggcgctgctaccggcgcgcattccttcgaagaagttcagctggtggaatctggccctggcctggtcaagcctagcgagacactgagcctgacctgtaccgtgtccggcttcagcctgaccagatttggcgtgcactgggtccgacagccacctggcaaaggactggaatggctgggagtgatttggagaggcggcagcaccgattacaacgccgccttcatgagccggctgaccatcagcaaggacaacagcaagaaccaggtgtccctgaagctgagcagcgtgacagccgctgataccgccgtgtactactgctccaaccactactacggcagctccgactacgccctggataattggggccagggaaccctggtcaccgtgtcatctacgcgtgcctctacaaagggaccctccgtgtttcctctggctcccagcagcaagtctacaagcggaggaacagccgctctgggctgcctggtcaaggattactttcccgagcctgtgaccgtgtcctggaatagcggagcactgacaagcggcgtgcacacctttccagccgtgctgcaaagcagcggcctgtactctctgagcagcgtggtcacagtgcctagctctagcctgggcacccagacctacatctgcaatgtgaaccacaagcctagcaacaccaaggtggacaagagagtggaacccaagagctgtgaagtgaaaaccgactccaccgaccacgtgaagcccaaagagacagagaacaccaagcagcccagcaagagctgccacaagcccaaggccatcgtgcacaccgagaaagtgaacatgatgagcctgaccgtgatcggcttcagaatcctgctgctgaaagtggccggctttaacctgctgatgaccctgcggctgtggtccagc

SEQ ID NO: 40226 - DNA, 1956 bp, synthetic construct
  source 1..1956: mol_type = other DNA
atggccttaccagtgaccgccttgctcctgccgctggccttgctgctccacgccgccaggccggacatcgtgctgacccagagccctctgagcctggccgtgtctctgggacagcctgccatcatcagctgtagggccagccagagcgtgtcctttgccggcacctctctgatgcactggtatcaccagaagcccggccagcagcccagactgctgatctacagagccagcaacctggaagccggcgtgcccgatagattttccggcagcggcagcaagaccgacttcaccctgaccatcagccccgtggaagccgaagatgccgccacctactactgccagcagagcagagagtacccctacaccttcggcggaggcaccaagctggaaatcaagaggctcgaggagggacagcctaaggccaatcctaccgtgacactgttccctccaagcagcgaagaactccaggccaacaaggccacacttgtgtgcctgatctccgacttctaccctggggctgtgacagtggcttggaaggccgatggatctcctgtgaaagccggcgtggaaaccaccaagccatccaagcagagcaacaacaaatacgccgccagctcctacctgagcctgacacctgagcagtggaagtcccacagatcctacagctgccaagtgacccacgaaggcagcaccgtggaaaagacagtggcccctacagagtgcagccccatcaagaccgatgtgattacaatggaccccaaggacaactgctccaaggacgccaacgataccctgctgctccagctgaccaacaccagcgcctactacatgtacgagatcctgctgggcaaggccaccctgtacgccgtgctggtgtctgccctggtgctgatggctatggtcaagcggaaggacagccggggacgcgccaagagaagcggatctggcgtgaagcagaccctgaatttcgacctgctgaagctggctggcgacgtggaatccaacccaggccctactagtatggactggatttggcgcatccttttccttgtcggcgctgctaccggcgcgcattccttcgaacaggtccaactggtgcagagcggagccgaggtcgtgaagcctggcgcttccgtgaagattagctgcaaagccagcggctacacctttaccggctactttatgcactgggtcaagcagagccctggccagagcctggaatggatcggcagaatccacccctacgacggcgacaccttctacaaccagaagttccagggcaaggccaccctgacagtggacaagagcagcaacaccgcccacatggaactgctgagcctgaccagcgaggacttcgccgtgtactactgcaccagatacgacggcagccgggctatggactattggggccagggcaccaccgtgaccgtgtctagtacgcgtgcctctacaaagggaccctccgtgtttcctctggctcccagcagcaagtctacaagcggaggaacagccgctctgggctgcctggtcaaggattactttcccgagcctgtgaccgtgtcctggaatagcggagcactgacaagcggcgtgcacacctttccagccgtgctgcaaagcagcggcctgtactctctgagcagcgtggtcacagtgcctagctctagcctgggcacccagacctacatctgcaatgtgaaccacaagcctagcaacaccaaggtggacaagagagtggaacccaagagctgtgaagtgaaaaccgactccaccgaccacgtgaagcccaaagagacagagaacaccaagcagcccagcaagagctgccacaagcccaaggccatcgtgcacaccgagaaagtgaacatgatgagcctgaccgtgatcggcttcagaatcctgctgctgaaagtggccggctttaacctgctgatgaccctgcggctgtggtccagc

SEQ ID NO: 40227 - DNA, 1938 bp, synthetic construct
  source 1..1938: mol_type = other DNA
atggccttaccagtgaccgccttgctcctgccgctggccttgctgctccacgccgccaggccggacatccagatgacacagagccctagcagcctgtctgccagcgtgggagacagagtgaccatcacatgcaaggccagccagagcgtgtccaacgacgtgacctggtatcagcagaagcctggacaggcccctaagctgctgatctacagcgccagcaacagatacagcggagtgcccgccagattttccggctctggctacggcaccgagttcacctttaccatcagcagcgtgcagagcgaggacttcgccgtgtacttctgccagcaagactacagcagcttcggccagggcaccaagctggaaatcaagagactcgaggagggacagcctaaggccaatcctaccgtgacactgttccctccaagcagcgaagaactccaggccaacaaggccacacttgtgtgcctgatctccgacttctaccctggggctgtgacagtggcttggaaggccgatggatctcctgtgaaagccggcgtggaaaccaccaagccatccaagcagagcaacaacaaatacgccgccagctcctacctgagcctgacacctgagcagtggaagtcccacagatcctacagctgccaagtgacccacgaaggcagcaccgtggaaaagacagtggcccctacagagtgcagccccatcaagaccgatgtgattacaatggaccccaaggacaactgctccaaggacgccaacgataccctgctgctccagctgaccaacaccagcgcctactacatgtacgagatcctgctgggcaaggccaccctgtacgccgtgctggtgtctgccctggtgctgatggctatggtcaagcggaaggacagccggggacgcgccaagagaagcggatctggcgtgaagcagaccctgaatttcgacctgctgaagctggctggcgacgtggaatccaacccaggccctactagtatggactggatttggcgcatccttttccttgtcggcgctgctaccggcgcgcattccttcgaacaggtgcagctggtggaatctggacctggcgtggtgcagcctggcagaagcctgagaatcagctgtgccgtgtccggcttcagcgtgaccaactacggcgtgcactgggtgcgccagccacctggaaaaggactggaatggctgggcgtgatctgggctggcggcatcaccaactacaacagcgccttcatgtcccggctgaccatctccaaggacaacagcaagaacaccgtgtacctccagatgaacagcctgcgggccgaggacaccgccatgtactactgtgcttccagaggcggccactacggctacgccctggattattggggccagggaaccctcgtgaccgtgtcctctacgcgtgcctctacaaagggaccctccgtgtttcctctggctcccagcagcaagtctacaagcggaggaacagccgctctgggctgcctggtcaaggattactttcccgagcctgtgaccgtgtcctggaatagcggagcactgacaagcggcgtgcacacctttccagccgtgctgcaaagcagcggcctgtactctctgagcagcgtggtcacagtgcctagctctagcctgggcacccagacctacatctgcaatgtgaaccacaagcctagcaacaccaaggtggacaagagagtggaacccaagagctgtgaagtgaaaaccgactccaccgaccacgtgaagcccaaagagacagagaacaccaagcagcccagcaagagctgccacaagcccaaggccatcgtgcacaccgagaaagtgaacatgatgagcctgaccgtgatcggcttcagaatcctgctgctgaaagtggccggctttaacctgctgatgaccctgcggctgtggtccagc

SEQ ID NO: 40228 - DNA, 1950 bp, synthetic construct
  source 1..1950: mol_type = other DNA
atggccttaccagtgaccgccttgctcctgccgctggccttgctgctccacgccgccaggccggagaacgtgctgacacagagccctgccatcatgagtgcctctccaggcgagaaagtgaccatgacctgtagagccagcagcagcgtgtccagcagctacctgcactggtatcagcagaagtccggcgcaagccccaaagtgtggatctacagcaccagcaatctggcctctggcgtgccaggcagattttctggctctggcagcggcacaagctacagcctgacaatcagctccgtggaagccgaagatgccgccacctactactgccagcagtacagcggctaccccatcacatttggagccggcaccaaggtggaagtgaagagactcgaggagggacagcctaaggccaatcctaccgtgacactgttccctccaagcagcgaagaactccaggccaacaaggccacacttgtgtgcctgatctccgacttctaccctggggctgtgacagtggcttggaaggccgatggatctcctgtgaaagccggcgtggaaaccaccaagccatccaagcagagcaacaacaaatacgccgccagctcctacctgagcctgacacctgagcagtggaagtcccacagatcctacagctgccaagtgacccacgaaggcagcaccgtggaaaagacagtggcccctacagagtgcagccccatcaagaccgatgtgattacaatggaccccaaggacaactgctccaaggacgccaacgataccctgctgctccagctgaccaacaccagcgcctactacatgtacgagatcctgctgggcaaggccaccctgtacgccgtgctggtgtctgccctggtgctgatggctatggtcaagcggaaggacagccggggacgcgccaagagaagcggatctggcgtgaagcagaccctgaatttcgacctgctgaagctggctggcgacgtggaatccaacccaggccctactagtatggactggatttggcgcatccttttccttgtcggcgctgctaccggcgcgcattccttcgaacaggttcagctcaaagaatctggccccgtgctggtggccccaagccagacactgtctatcacctgtaccgtgtccggcttcagcctggcctcctacaacatccactgggtccgacagcctccaggcaaaggactggaatggctgggagtgatttgggctggcggcagcaccaactacaacagcgcactgatgagccggctgagcatcagcaaggacaacagcaagagccaggtgttcctccagatgaactccctccagaccgacgacaccgccatgtactactgcgccaagagaagcgacgactacagttggttcgcctactggggccagggcacactggttactgtgtctgcttctacgcgtgcctctacaaagggaccctccgtgtttcctctggctcccagcagcaagtctacaagcggaggaacagccgctctgggctgcctggtcaaggattactttcccgagcctgtgaccgtgtcctggaatagcggagcactgacaagcggcgtgcacacctttccagccgtgctgcaaagcagcggcctgtactctctgagcagcgtggtcacagtgcctagctctagcctgggcacccagacctacatctgcaatgtgaaccacaagcctagcaacaccaaggtggacaagagagtggaacccaagagctgtgaagtgaaaaccgactccaccgaccacgtgaagcccaaagagacagagaacaccaagcagcccagcaagagctgccacaagcccaaggccatcgtgcacaccgagaaagtgaacatgatgagcctgaccgtgatcggcttcagaatcctgctgctgaaagtggccggctttaacctgctgatgaccctgcggctgtggtccagc

SEQ ID NO: 40229 - DNA, 1962 bp, synthetic construct
  source 1..1962: mol_type = other DNA
atggccttaccagtgaccgccttgctcctgccgctggccttgctgctccacgccgccaggccggagatcgtgctgacacagtctcccgccacactgtcactgtctccaggcgaaagagccacactgagctgtagagccagccagagcgtgtcctcttacctggcctggtatcagcagaagcctggacaggctccccggctgctgatctacgatgccagcaatagagccacaggcatccccgccagattttctggctctggcagcggcaccgatttcaccctgaccataagcagcctggaacctgaggacttcgccgtgtactactgccagcagagaagcaactggcctcctacattcggccagggcaccaaggtggaaatcaaactcgaggagggacagcctaaggccaatcctaccgtgacactgttccctccaagcagcgaagaactccaggccaacaaggccacacttgtgtgcctgatctccgacttctaccctggggctgtgacagtggcttggaaggccgatggatctcctgtgaaagccggcgtggaaaccaccaagccatccaagcagagcaacaacaaatacgccgccagctcctacctgagcctgacacctgagcagtggaagtcccacagatcctacagctgccaagtgacccacgaaggcagcaccgtggaaaagacagtggcccctacagagtgcagccccatcaagaccgatgtgattacaatggaccccaaggacaactgctccaaggacgccaacgataccctgctgctccagctgaccaacaccagcgcctactacatgtacgagatcctgctgggcaaggccaccctgtacgccgtgctggtgtctgccctggtgctgatggctatggtcaagcggaaggacagccggggacgcgccaagagaagcggatctggcgtgaagcagaccctgaatttcgacctgctgaagctggctggcgacgtggaatccaacccaggccctactagtatggactggatttggcgcatccttttccttgtcggcgctgctaccggcgcgcattccttcgaacaactccagctgcaagagtctggccccggactggtcaagcctagcgaaacactgagcctgacctgtaccgtgtctggcggcagcatcagcagcagctcttattggtggggctggaccagacagcctcctggcagaggactggaatggatcggcaccatgtactacagcggcaacatctactacaaccccagcctccagagccgggccaccatctctgtggacaccagcaagaaccagttcagcctgaagctgagcagcgtgacagccgccgataccgccgtgtattattgcgccagacatgtgggctacagctacggcagacggttctggtacttcgacctgtggggcagaggcaccctggtcacagtttcttctacgcgtgcctctacaaagggaccctccgtgtttcctctggctcccagcagcaagtctacaagcggaggaacagccgctctgggctgcctggtcaaggattactttcccgagcctgtgaccgtgtcctggaatagcggagcactgacaagcggcgtgcacacctttccagccgtgctgcaaagcagcggcctgtactctctgagcagcgtggtcacagtgcctagctctagcctgggcacccagacctacatctgcaatgtgaaccacaagcctagcaacaccaaggtggacaagagagtggaacccaagagctgtgaagtgaaaaccgactccaccgaccacgtgaagcccaaagagacagagaacaccaagcagcccagcaagagctgccacaagcccaaggccatcgtgcacaccgagaaagtgaacatgatgagcctgaccgtgatcggcttcagaatcctgctgctgaaagtggccggctttaacctgctgatgaccctgcggctgtggtccagc

SEQ ID NO: 40230 - DNA, 1953 bp, synthetic construct
  source 1..1953: mol_type = other DNA
atggccttaccagtgaccgccttgctcctgccgctggccttgctgctccacgccgccaggccggacatccagatgacacagagccctagcagcctgtctgccagcgtgggagacagagtgaccatcacatgcaaggccagcgaccacatcaacaactggctggcctggtatcagcagaagcctggcaaggcccctaagctgctgatctacggcgctaccacactggaaacaggcgtgcccagcagattttctggcagcggctctggcaccgacttcaccctgacaatatccagcctccagcctgaggacttcgccacctactactgtcagcagagctggaacaccccttggacattcggccagggcaccaaggtggaaatcaagagactcgaggagggacagcctaaggccaatcctaccgtgacactgttccctccaagcagcgaagaactccaggccaacaaggccacacttgtgtgcctgatctccgacttctaccctggggctgtgacagtggcttggaaggccgatggatctcctgtgaaagccggcgtggaaaccaccaagccatccaagcagagcaacaacaaatacgccgccagctcctacctgagcctgacacctgagcagtggaagtcccacagatcctacagctgccaagtgacccacgaaggcagcaccgtggaaaagacagtggcccctacagagtgcagccccatcaagaccgatgtgattacaatggaccccaaggacaactgctccaaggacgccaacgataccctgctgctccagctgaccaacaccagcgcctactacatgtacgagatcctgctgggcaaggccaccctgtacgccgtgctggtgtctgccctggtgctgatggctatggtcaagcggaaggacagccggggacgcgccaagagaagcggatctggcgtgaagcagaccctgaatttcgacctgctgaagctggctggcgacgtggaatccaacccaggccctactagtatggactggatttggcgcatccttttccttgtcggcgctgctaccggcgcgcattccttcgaagaagttcagctggttgaatctggcggcggactggttcaacctggcggatctctgagactgagctgtgccgcctctggctacacctttagcagctactgggtcaactgggttcgacaggcccctggcaaaggactggaatgggtcgcccaaatctatcccggcgacggcgacaccaactacaacggcaagttcaagggcagattcaccatcagccgggacaacagcaagaacaccctgtacctccagatgaactccctgagagccgaggacaccgccgtgtactattgtgccagatccatcaccaccgtcgtgggctgcgctatggattattggggccagggaaccctggtcaccgtgtcctctacgcgtgcctctacaaagggaccctccgtgtttcctctggctcccagcagcaagtctacaagcggaggaacagccgctctgggctgcctggtcaaggattactttcccgagcctgtgaccgtgtcctggaatagcggagcactgacaagcggcgtgcacacctttccagccgtgctgcaaagcagcggcctgtactctctgagcagcgtggtcacagtgcctagctctagcctgggcacccagacctacatctgcaatgtgaaccacaagcctagcaacaccaaggtggacaagagagtggaacccaagagctgtgaagtgaaaaccgactccaccgaccacgtgaagcccaaagagacagagaacaccaagcagcccagcaagagctgccacaagcccaaggccatcgtgcacaccgagaaagtgaacatgatgagcctgaccgtgatcggcttcagaatcctgctgctgaaagtggccggctttaacctgctgatgaccctgcggctgtggtccagc

SEQ ID NO: 40231 - DNA, 1953 bp, synthetic construct
  source 1..1953: mol_type = other DNA
atggccttaccagtgaccgccttgctcctgccgctggccttgctgctccacgccgccaggccggacatccagatgacacagagccctagcagcctgtctgccagcgtgggagacagagtgaccatcacatgcaaggccagcgaccacatcaacaactggctggcctggtatcagcagaagcctggcaaggcccctaagctgctgatctacggcgctaccacactggaaacaggcgtgcccagcagattttctggcagcggctctggcaccgacttcaccctgacaatatccagcctccagcctgaggacttcgccacctactactgtcagcagagctggaacaccccttggacattcggccagggcaccaaggtggaaatcaagagactcgaggagggacagcctaaggccaatcctaccgtgacactgttccctccaagcagcgaagaactccaggccaacaaggccacacttgtgtgcctgatctccgacttctaccctggggctgtgacagtggcttggaaggccgatggatctcctgtgaaagccggcgtggaaaccaccaagccatccaagcagagcaacaacaaatacgccgccagctcctacctgagcctgacacctgagcagtggaagtcccacagatcctacagctgccaagtgacccacgaaggcagcaccgtggaaaagacagtggcccctacagagtgcagccccatcaagaccgatgtgattacaatggaccccaaggacaactgctccaaggacgccaacgataccctgctgctccagctgaccaacaccagcgcctactacatgtacgagatcctgctgggcaaggccaccctgtacgccgtgctggtgtctgccctggtgctgatggctatggtcaagcggaaggacagccggggacgcgccaagagaagcggatctggcgtgaagcagaccctgaatttcgacctgctgaagctggctggcgacgtggaatccaacccaggccctactagtatggactggatttggcgcatccttttccttgtcggcgctgctaccggcgcgcattccttcgaagaagttcagctggttgaatctggcggcggactggttcaacctggcggatctctgagactgagctgtgccgcctctggctacgcctttagcaactactgggtcaactgggttcgacaggcccctggcaaaggactggaatgggtcgcccaaatctatcccggcgacggcgacaccaactacaacggcaagttcaagggcagattcaccatcagccgggacaacagcaagaacaccctgtacctccagatgaactccctgagagccgaggacaccgccgtgtactattgtgccagatccatcaccaccgtcgtgggctgcgctatggattattggggccagggaaccctggtcaccgtgtcctctacgcgtgcctctacaaagggaccctccgtgtttcctctggctcccagcagcaagtctacaagcggaggaacagccgctctgggctgcctggtcaaggattactttcccgagcctgtgaccgtgtcctggaatagcggagcactgacaagcggcgtgcacacctttccagccgtgctgcaaagcagcggcctgtactctctgagcagcgtggtcacagtgcctagctctagcctgggcacccagacctacatctgcaatgtgaaccacaagcctagcaacaccaaggtggacaagagagtggaacccaagagctgtgaagtgaaaaccgactccaccgaccacgtgaagcccaaagagacagagaacaccaagcagcccagcaagagctgccacaagcccaaggccatcgtgcacaccgagaaagtgaacatgatgagcctgaccgtgatcggcttcagaatcctgctgctgaaagtggccggctttaacctgctgatgaccctgcggctgtggtccagc

SEQ ID NO: 40232 - DNA, 1944 bp, synthetic construct
  source 1..1944: mol_type = other DNA
atggccttaccagtgaccgccttgctcctgccgctggccttgctgctccacgccgccaggccggacatccagatgacacagagccctagcagcctgtctgccagcgtgggagacagagtgaccatcacatgcaagagcagccagagcctgctggactccgatggcaagacctacctgaactggtatcagcagaagcccggcaaggcccctaagctgctgatctacctggtgtccaagctggatagcggcgtgcccagcagattttctggcagcggcagcggaaccgacttcaccctgacaatatccagcctccagcctgaggacttcgccacctactactgcttccaaggcacccactttccattcaccttcggccagggcaccaaggtggaaatcaaaagactcgaggagggacagcctaaggccaatcctaccgtgacactgttccctccaagcagcgaagaactccaggccaacaaggccacacttgtgtgcctgatctccgacttctaccctggggctgtgacagtggcttggaaggccgatggatctcctgtgaaagccggcgtggaaaccaccaagccatccaagcagagcaacaacaaatacgccgccagctcctacctgagcctgacacctgagcagtggaagtcccacagatcctacagctgccaagtgacccacgaaggcagcaccgtggaaaagacagtggcccctacagagtgcagccccatcaagaccgatgtgattacaatggaccccaaggacaactgctccaaggacgccaacgataccctgctgctccagctgaccaacaccagcgcctactacatgtacgagatcctgctgggcaaggccaccctgtacgccgtgctggtgtctgccctggtgctgatggctatggtcaagcggaaggacagccggggacgcgccaagagaagcggatctggcgtgaagcagaccctgaatttcgacctgctgaagctggctggcgacgtggaatccaacccaggccctactagtatggactggatttggcgcatccttttccttgtcggcgctgctaccggcgcgcattccttcgaagaagtgcagctggttgaatcaggcggaggactggttcagcctggcggatctctgagactgtcttgtgccgccagcggctacaccttcaccagctactggatgaactgggtccgacaggcccctggcaaaggactggaatgggtcggaatgatcgaccccagcgacagcgagacacactacaaccacatcttcaaggaccgcttcaccatcagcgccgacaccagcaagaataccgcctacctccagatgaactccctgagagccgaggacaccgccgtgtactactgcgccagaaacctgtatctgttcggccagggaaccctggtcacagtgtcatctacgcgtgcctctacaaagggaccctccgtgtttcctctggctcccagcagcaagtctacaagcggaggaacagccgctctgggctgcctggtcaaggattactttcccgagcctgtgaccgtgtcctggaatagcggagcactgacaagcggcgtgcacacctttccagccgtgctgcaaagcagcggcctgtactctctgagcagcgtggtcacagtgcctagctctagcctgggcacccagacctacatctgcaatgtgaaccacaagcctagcaacaccaaggtggacaagagagtggaacccaagagctgtgaagtgaaaaccgactccaccgaccacgtgaagcccaaagagacagagaacaccaagcagcccagcaagagctgccacaagcccaaggccatcgtgcacaccgagaaagtgaacatgatgagcctgaccgtgatcggcttcagaatcctgctgctgaaagtggccggctttaacctgctgatgaccctgcggctgtggtccagc

SEQ ID NO: 40233 - DNA, 1944 bp, synthetic construct
  source 1..1944: mol_type = other DNA
atggccttaccagtgaccgccttgctcctgccgctggccttgctgctccacgccgccaggccggacatccagatgacacagagccctagcagcctgtctgccagcgtgggagacagagtgaccatcacatgcaagagcagccagagcctgctggactccgatggcaagacctacctgaactggtatcagcagaagcccggcaaggcccctaagctgctgatctacctggtgtccaagctggatagcggcgtgcccagcagattttctggcagcggcagcggaaccgacttcaccctgacaatatccagcctccagcctgaggacttcgccacctactactgcttccaaggcacccactttccattcaccttcggccagggcaccaaggtggaaatcaaaagactcgaggagggacagcctaaggccaatcctaccgtgacactgttccctccaagcagcgaagaactccaggccaacaaggccacacttgtgtgcctgatctccgacttctaccctggggctgtgacagtggcttggaaggccgatggatctcctgtgaaagccggcgtggaaaccaccaagccatccaagcagagcaacaacaaatacgccgccagctcctacctgagcctgacacctgagcagtggaagtcccacagatcctacagctgccaagtgacccacgaaggcagcaccgtggaaaagacagtggcccctacagagtgcagccccatcaagaccgatgtgattacaatggaccccaaggacaactgctccaaggacgccaacgataccctgctgctccagctgaccaacaccagcgcctactacatgtacgagatcctgctgggcaaggccaccctgtacgccgtgctggtgtctgccctggtgctgatggctatggtcaagcggaaggacagccggggacgcgccaagagaagcggatctggcgtgaagcagaccctgaatttcgacctgctgaagctggctggcgacgtggaatccaacccaggccctactagtatggactggatttggcgcatccttttccttgtcggcgctgctaccggcgcgcattccttcgaagaagtgcagctggttgaatcaggcggaggactggttcagcctggcggatctctgagactgtcttgtgccgccagcggctacaccttcagcagctactggatgaactgggtccgacaggcccctggcaaaggactggaatgggtcggaatgatcgaccccagcgacagcgagacacactacaaccacatcttcaaggaccgcttcaccatcagcgccgacaccagcaagaataccgcctacctccagatgaactccctgagagccgaggacaccgccgtgtactactgcgccagaaacctgtatctgtggggccagggaaccctggtcacagtgtcatctacgcgtgcctctacaaagggaccctccgtgtttcctctggctcccagcagcaagtctacaagcggaggaacagccgctctgggctgcctggtcaaggattactttcccgagcctgtgaccgtgtcctggaatagcggagcactgacaagcggcgtgcacacctttccagccgtgctgcaaagcagcggcctgtactctctgagcagcgtggtcacagtgcctagctctagcctgggcacccagacctacatctgcaatgtgaaccacaagcctagcaacaccaaggtggacaagagagtggaacccaagagctgtgaagtgaaaaccgactccaccgaccacgtgaagcccaaagagacagagaacaccaagcagcccagcaagagctgccacaagcccaaggccatcgtgcacaccgagaaagtgaacatgatgagcctgaccgtgatcggcttcagaatcctgctgctgaaagtggccggctttaacctgctgatgaccctgcggctgtggtccagc

SEQ ID NO: 40234 - DNA, 1944 bp, synthetic construct
  source 1..1944: mol_type = other DNA
atggccttaccagtgaccgccttgctcctgccgctggccttgctgctccacgccgccaggccggacatccagatgacacagagccctagcagcctgtctgccagcgtgggagacagagtgaccatcacatgcaagagcagccagagcctgctggactccgatggcaagacctacctgaactggtatcagcagaagcccggcaaggcccctaagctgctgatctacctggtgtccaagctggatagcggcgtgcccagcagattttctggcagcggcagcggaaccgacttcaccctgacaatatccagcctccagcctgaggacttcgccacctactactgctggcaaggcacccactttccattcaccttcggccagggcaccaaggtggaaatcaaaagactcgaggagggacagcctaaggccaatcctaccgtgacactgttccctccaagcagcgaagaactccaggccaacaaggccacacttgtgtgcctgatctccgacttctaccctggggctgtgacagtggcttggaaggccgatggatctcctgtgaaagccggcgtggaaaccaccaagccatccaagcagagcaacaacaaatacgccgccagctcctacctgagcctgacacctgagcagtggaagtcccacagatcctacagctgccaagtgacccacgaaggcagcaccgtggaaaagacagtggcccctacagagtgcagccccatcaagaccgatgtgattacaatggaccccaaggacaactgctccaaggacgccaacgataccctgctgctccagctgaccaacaccagcgcctactacatgtacgagatcctgctgggcaaggccaccctgtacgccgtgctggtgtctgccctggtgctgatggctatggtcaagcggaaggacagccggggacgcgccaagagaagcggatctggcgtgaagcagaccctgaatttcgacctgctgaagctggctggcgacgtggaatccaacccaggccctactagtatggactggatttggcgcatccttttccttgtcggcgctgctaccggcgcgcattccttcgaagaagtgcagctggttgaatcaggcggaggactggttcagcctggcggatctctgagactgtcttgtgccgccagcggctacaccttcaccagctactggatgaactgggtccgacaggcccctggcaaaggactggaatgggtcggaatgatcgaccccagcgacagcgagacacactacaaccacatcttcaaggaccgcttcaccatcagcgccgacaccagcaagaataccgcctacctccagatgaactccctgagagccgaggacaccgccgtgtactactgcgccagaaacctgtatctgttcggccagggaaccctggtcacagtgtcatctacgcgtgcctctacaaagggaccctccgtgtttcctctggctcccagcagcaagtctacaagcggaggaacagccgctctgggctgcctggtcaaggattactttcccgagcctgtgaccgtgtcctggaatagcggagcactgacaagcggcgtgcacacctttccagccgtgctgcaaagcagcggcctgtactctctgagcagcgtggtcacagtgcctagctctagcctgggcacccagacctacatctgcaatgtgaaccacaagcctagcaacaccaaggtggacaagagagtggaacccaagagctgtgaagtgaaaaccgactccaccgaccacgtgaagcccaaagagacagagaacaccaagcagcccagcaagagctgccacaagcccaaggccatcgtgcacaccgagaaagtgaacatgatgagcctgaccgtgatcggcttcagaatcctgctgctgaaagtggccggctttaacctgctgatgaccctgcggctgtggtccagc

SEQ ID NO: 40235 - DNA, 1944 bp, synthetic construct
  source 1..1944: mol_type = other DNA
atggccttaccagtgaccgccttgctcctgccgctggccttgctgctccacgccgccaggccggacatccagatgacacagagccctagcagcctgtctgccagcgtgggagacagagtgaccatcacatgcaagagcagccagagcctgctggactccgatggcaagacctacctgaactggtatcagcagaagcccggcaaggcccctaagctgctgatctacctggtgtccaagctggatagcggcgtgcccagcagattttctggcagcggcagcggaaccgacttcaccctgacaatatccagcctccagcctgaggacttcgccacctactactgctggcaaggcacccactttccattcaccttcggccagggcaccaaggtggaaatcaaaagactcgaggagggacagcctaaggccaatcctaccgtgacactgttccctccaagcagcgaagaactccaggccaacaaggccacacttgtgtgcctgatctccgacttctaccctggggctgtgacagtggcttggaaggccgatggatctcctgtgaaagccggcgtggaaaccaccaagccatccaagcagagcaacaacaaatacgccgccagctcctacctgagcctgacacctgagcagtggaagtcccacagatcctacagctgccaagtgacccacgaaggcagcaccgtggaaaagacagtggcccctacagagtgcagccccatcaagaccgatgtgattacaatggaccccaaggacaactgctccaaggacgccaacgataccctgctgctccagctgaccaacaccagcgcctactacatgtacgagatcctgctgggcaaggccaccctgtacgccgtgctggtgtctgccctggtgctgatggctatggtcaagcggaaggacagccggggacgcgccaagagaagcggatctggcgtgaagcagaccctgaatttcgacctgctgaagctggctggcgacgtggaatccaacccaggccctactagtatggactggatttggcgcatccttttccttgtcggcgctgctaccggcgcgcattccttcgaagaagtgcagctggttgaatcaggcggaggactggttcagcctggcggatctctgagactgtcttgtgccgccagcggctacaccttcagcagctactggatgaactgggtccgacaggcccctggcaaaggactggaatgggtcggaatgatcgaccccagcgacagcgagacacactacaaccacatcttcaaggaccgcttcaccatcagcgccgacaccagcaagaataccgcctacctccagatgaactccctgagagccgaggacaccgccgtgtactactgcgccagaaacctgtatctgtggggccagggaaccctggtcacagtgtcatctacgcgtgcctctacaaagggaccctccgtgtttcctctggctcccagcagcaagtctacaagcggaggaacagccgctctgggctgcctggtcaaggattactttcccgagcctgtgaccgtgtcctggaatagcggagcactgacaagcggcgtgcacacctttccagccgtgctgcaaagcagcggcctgtactctctgagcagcgtggtcacagtgcctagctctagcctgggcacccagacctacatctgcaatgtgaaccacaagcctagcaacaccaaggtggacaagagagtggaacccaagagctgtgaagtgaaaaccgactccaccgaccacgtgaagcccaaagagacagagaacaccaagcagcccagcaagagctgccacaagcccaaggccatcgtgcacaccgagaaagtgaacatgatgagcctgaccgtgatcggcttcagaatcctgctgctgaaagtggccggctttaacctgctgatgaccctgcggctgtggtccagc

SEQ ID NO: 40236 - DNA, 1944 bp, synthetic construct
  source 1..1944: mol_type = other DNA
atggccttaccagtgaccgccttgctcctgccgctggccttgctgctccacgccgccaggccggacatccagatgacacagagccctagcagcctgtctgccagcgtgggagacagagtgaccatcacatgcaagagcagccagagcctgctggactccgatggcaagacctacctgaactggtatcagcagaagcccggcaaggcccctaagctgctgatctacctggtgtccaagctggatagcggcgtgcccagcagattttctggcagcggcagcggaaccgacttcaccctgacaatatccagcctccagcctgaggacttcgccacctactactgcttccaaggcacccactttccatacaccttcggccagggcaccaaggtggaaatcaaaagactcgaggagggacagcctaaggccaatcctaccgtgacactgttccctccaagcagcgaagaactccaggccaacaaggccacacttgtgtgcctgatctccgacttctaccctggggctgtgacagtggcttggaaggccgatggatctcctgtgaaagccggcgtggaaaccaccaagccatccaagcagagcaacaacaaatacgccgccagctcctacctgagcctgacacctgagcagtggaagtcccacagatcctacagctgccaagtgacccacgaaggcagcaccgtggaaaagacagtggcccctacagagtgcagccccatcaagaccgatgtgattacaatggaccccaaggacaactgctccaaggacgccaacgataccctgctgctccagctgaccaacaccagcgcctactacatgtacgagatcctgctgggcaaggccaccctgtacgccgtgctggtgtctgccctggtgctgatggctatggtcaagcggaaggacagccggggacgcgccaagagaagcggatctggcgtgaagcagaccctgaatttcgacctgctgaagctggctggcgacgtggaatccaacccaggccctactagtatggactggatttggcgcatccttttccttgtcggcgctgctaccggcgcgcattccttcgaagaagtgcagctggttgaatcaggcggaggactggttcagcctggcggatctctgagactgtcttgtgccgccagcggctacaccttcaccagctactggatgaactgggtccgacaggcccctggcaaaggactggaatgggtcggaatgatcgaccccagcgacagcgagacacactacaaccacatcttcaaggaccgcttcaccatcagcgccgacaccagcaagaataccgcctacctccagatgaactccctgagagccgaggacaccgccgtgtactactgcgccagaaacctgtatctgttcggccagggaaccctggtcacagtgtcatctacgcgtgcctctacaaagggaccctccgtgtttcctctggctcccagcagcaagtctacaagcggaggaacagccgctctgggctgcctggtcaaggattactttcccgagcctgtgaccgtgtcctggaatagcggagcactgacaagcggcgtgcacacctttccagccgtgctgcaaagcagcggcctgtactctctgagcagcgtggtcacagtgcctagctctagcctgggcacccagacctacatctgcaatgtgaaccacaagcctagcaacaccaaggtggacaagagagtggaacccaagagctgtgaagtgaaaaccgactccaccgaccacgtgaagcccaaagagacagagaacaccaagcagcccagcaagagctgccacaagcccaaggccatcgtgcacaccgagaaagtgaacatgatgagcctgaccgtgatcggcttcagaatcctgctgctgaaagtggccggctttaacctgctgatgaccctgcggctgtggtccagc

SEQ ID NO: 40237 - DNA, 1944 bp, synthetic construct
  source 1..1944: mol_type = other DNA
atggccttaccagtgaccgccttgctcctgccgctggccttgctgctccacgccgccaggccggacatccagatgacacagagccctagcagcctgtctgccagcgtgggagacagagtgaccatcacatgcaagagcagccagagcctgctggactccgatggcaagacctacctgaactggtatcagcagaagcccggcaaggcccctaagctgctgatctacctggtgtccaagctggatagcggcgtgcccagcagattttctggcagcggcagcggaaccgacttcaccctgacaatatccagcctccagcctgaggacttcgccacctactactgcttccaaggcacccactttccatacaccttcggccagggcaccaaggtggaaatcaaaagactcgaggagggacagcctaaggccaatcctaccgtgacactgttccctccaagcagcgaagaactccaggccaacaaggccacacttgtgtgcctgatctccgacttctaccctggggctgtgacagtggcttggaaggccgatggatctcctgtgaaagccggcgtggaaaccaccaagccatccaagcagagcaacaacaaatacgccgccagctcctacctgagcctgacacctgagcagtggaagtcccacagatcctacagctgccaagtgacccacgaaggcagcaccgtggaaaagacagtggcccctacagagtgcagccccatcaagaccgatgtgattacaatggaccccaaggacaactgctccaaggacgccaacgataccctgctgctccagctgaccaacaccagcgcctactacatgtacgagatcctgctgggcaaggccaccctgtacgccgtgctggtgtctgccctggtgctgatggctatggtcaagcggaaggacagccggggacgcgccaagagaagcggatctggcgtgaagcagaccctgaatttcgacctgctgaagctggctggcgacgtggaatccaacccaggccctactagtatggactggatttggcgcatccttttccttgtcggcgctgctaccggcgcgcattccttcgaagaagtgcagctggttgaatcaggcggaggactggttcagcctggcggatctctgagactgtcttgtgccgccagcggctacaccttcaccaactactggatgaactgggtccgacaggcccctggcaaaggactggaatgggtcggaatgatcgaccccagcgacagcgagacacactacaaccacatcttcaaggaccgcttcaccatcagcgccgacaccagcaagaataccgcctacctccagatgaactccctgagagccgaggacaccgccgtgtactactgcgccagaaacctgtatctgtggggccagggaaccctggtcacagtgtcatctacgcgtgcctctacaaagggaccctccgtgtttcctctggctcccagcagcaagtctacaagcggaggaacagccgctctgggctgcctggtcaaggattactttcccgagcctgtgaccgtgtcctggaatagcggagcactgacaagcggcgtgcacacctttccagccgtgctgcaaagcagcggcctgtactctctgagcagcgtggtcacagtgcctagctctagcctgggcacccagacctacatctgcaatgtgaaccacaagcctagcaacaccaaggtggacaagagagtggaacccaagagctgtgaagtgaaaaccgactccaccgaccacgtgaagcccaaagagacagagaacaccaagcagcccagcaagagctgccacaagcccaaggccatcgtgcacaccgagaaagtgaacatgatgagcctgaccgtgatcggcttcagaatcctgctgctgaaagtggccggctttaacctgctgatgaccctgcggctgtggtccagc

SEQ ID NO: 40238 - DNA, 1944 bp, synthetic construct
  source 1..1944: mol_type = other DNA
atggccttaccagtgaccgccttgctcctgccgctggccttgctgctccacgccgccaggccggacatccagatgacacagagccctagcagcctgtctgccagcgtgggagacagagtgaccatcacatgcaagagcagccagagcctgctggactccgatggcaagacctacctgaactggtatcagcagaagcccggcaaggcccctaagctgctgatctacctggtgtccaagctggatagcggcgtgcccagcagattttctggcagcggcagcggaaccgacttcaccctgacaatatccagcctccagcctgaggacttcgccacctactactgcttccaaggcacccactttccattcaccttcggccagggcaccaaggtggaaatcaaaagactcgaggagggacagcctaaggccaatcctaccgtgacactgttccctccaagcagcgaagaactccaggccaacaaggccacacttgtgtgcctgatctccgacttctaccctggggctgtgacagtggcttggaaggccgatggatctcctgtgaaagccggcgtggaaaccaccaagccatccaagcagagcaacaacaaatacgccgccagctcctacctgagcctgacacctgagcagtggaagtcccacagatcctacagctgccaagtgacccacgaaggcagcaccgtggaaaagacagtggcccctacagagtgcagccccatcaagaccgatgtgattacaatggaccccaaggacaactgctccaaggacgccaacgataccctgctgctccagctgaccaacaccagcgcctactacatgtacgagatcctgctgggcaaggccaccctgtacgccgtgctggtgtctgccctggtgctgatggctatggtcaagcggaaggacagccggggacgcgccaagagaagcggatctggcgtgaagcagaccctgaatttcgacctgctgaagctggctggcgacgtggaatccaacccaggccctactagtatggactggatttggcgcatccttttccttgtcggcgctgctaccggcgcgcattccttcgaagaagtgcagctggttgaatcaggcggaggactggttcagcctggcggatctctgagactgtcttgtgccgccagcggctacaccttcaccaactactggatgaactgggtccgacaggcccctggcaaaggactggaatgggtcggaatgatcgaccccagcgacagcgagacacactacaaccacatcttcaaggaccgcttcaccatcagcgccgacaccagcaagaataccgcctacctccagatgaactccctgagagccgaggacaccgccgtgtactactgcgccagaaacctgtatctgtggggccagggaaccctggtcacagtgtcatctacgcgtgcctctacaaagggaccctccgtgtttcctctggctcccagcagcaagtctacaagcggaggaacagccgctctgggctgcctggtcaaggattactttcccgagcctgtgaccgtgtcctggaatagcggagcactgacaagcggcgtgcacacctttccagccgtgctgcaaagcagcggcctgtactctctgagcagcgtggtcacagtgcctagctctagcctgggcacccagacctacatctgcaatgtgaaccacaagcctagcaacaccaaggtggacaagagagtggaacccaagagctgtgaagtgaaaaccgactccaccgaccacgtgaagcccaaagagacagagaacaccaagcagcccagcaagagctgccacaagcccaaggccatcgtgcacaccgagaaagtgaacatgatgagcctgaccgtgatcggcttcagaatcctgctgctgaaagtggccggctttaacctgctgatgaccctgcggctgtggtccagc

SEQ ID NO: 40239 - DNA, 1953 bp, synthetic construct
  source 1..1953: mol_type = other DNA
atggccttaccagtgaccgccttgctcctgccgctggccttgctgctccacgccgccaggccggacatccagttgacccagtcccccagctcactcagcgccagtgtgggggaccgggtgaccattacctgtaaagccagtcagagtgtggactatgacggggatagcttcctgaattggtatcagcagaagcctggcaaagccccaaagctgctgatctacgctgcatctaatctggagtcaggcgtgccttccaggttctccggtagtgggtctgggaccgatttcacattgaccatttcatccctccaacccgaggatttcgctacatattactgtcagcagtccaatgaggaccctctcacctttggccagggcaccaaagttgaaattaagagactcgaggagggacagcctaaggccaatcctaccgtgacactgttccctccaagcagcgaagaactccaggccaacaaggccacacttgtgtgcctgatctccgacttctaccctggggctgtgacagtggcttggaaggccgatggatctcctgtgaaagccggcgtggaaaccaccaagccatccaagcagagcaacaacaaatacgccgccagctcctacctgagcctgacacctgagcagtggaagtcccacagatcctacagctgccaagtgacccacgaaggcagcaccgtggaaaagacagtggcccctacagagtgcagccccatcaagaccgatgtgattacaatggaccccaaggacaactgctccaaggacgccaacgataccctgctgctccagctgaccaacaccagcgcctactacatgtacgagatcctgctgggcaaggccaccctgtacgccgtgctggtgtctgccctggtgctgatggctatggtcaagcggaaggacagccggggacgcgccaagagaagcggatctggcgtgaagcagaccctgaatttcgacctgctgaagctggctggcgacgtggaatccaacccaggccctactagtatggactggatttggcgcatccttttccttgtcggcgctgctaccggcgcgcattccttcgaagaagtccaacttgtggagtctggagggggcctggtgcagcccggcggctctctcagactgtcttgtgcggcaagcggctacaccttcacctcttactggatagaatgggtgaggcaggcacctggaaagggactggagtggattggagagattctgccaggagggggagatacaaattacaatgaaatcttcaaggggcgggccaccttttcagcggataccagcaagaatacagcttacctgcagatgaatagcctccgggcagaagataccgctgtttattattgcacgagacgggtgccaataagactggactattgggggcaagggactcttgtcaccgtcagttcaacgcgtgcctctacaaagggaccctccgtgtttcctctggctcccagcagcaagtctacaagcggaggaacagccgctctgggctgcctggtcaaggattactttcccgagcctgtgaccgtgtcctggaatagcggagcactgacaagcggcgtgcacacctttccagccgtgctgcaaagcagcggcctgtactctctgagcagcgtggtcacagtgcctagctctagcctgggcacccagacctacatctgcaatgtgaaccacaagcctagcaacaccaaggtggacaagagagtggaacccaagagctgtgaagtgaaaaccgactccaccgaccacgtgaagcccaaagagacagagaacaccaagcagcccagcaagagctgccacaagcccaaggccatcgtgcacaccgagaaagtgaacatgatgagcctgaccgtgatcggcttcagaatcctgctgctgaaagtggccggctttaacctgctgatgaccctgcggctgtggtccagc

SEQ ID NO: 40240 - DNA, 1953 bp, synthetic construct
  source 1..1953: mol_type = other DNA
atggccttaccagtgaccgccttgctcctgccgctggccttgctgctccacgccgccaggccggacatccagttgacccagtcccccagctcactcagcgccagtgtgggggaccgggtgaccattacctgtaaagccagtcagagtgtggactatgagggggatagcttcctgaattggtatcagcagaagcctggcaaagccccaaagctgctgatctacgctgcatctaatctggagtcaggcgtgccttctaggttctccggtagtgggtctgggaccgatttcacattgaccatttcatccctccaacccgaggatttcgctacatattactgtcagcagtccaatgaggaccctctcacctttggccagggcaccaaagttgaaattaagagactcgaggagggacagcctaaggccaatcctaccgtgacactgttccctccaagcagcgaagaactccaggccaacaaggccacacttgtgtgcctgatctccgacttctaccctggggctgtgacagtggcttggaaggccgatggatctcctgtgaaagccggcgtggaaaccaccaagccatccaagcagagcaacaacaaatacgccgccagctcctacctgagcctgacacctgagcagtggaagtcccacagatcctacagctgccaagtgacccacgaaggcagcaccgtggaaaagacagtggcccctacagagtgcagccccatcaagaccgatgtgattacaatggaccccaaggacaactgctccaaggacgccaacgataccctgctgctccagctgaccaacaccagcgcctactacatgtacgagatcctgctgggcaaggccaccctgtacgccgtgctggtgtctgccctggtgctgatggctatggtcaagcggaaggacagccggggacgcgccaagagaagcggatctggcgtgaagcagaccctgaatttcgacctgctgaagctggctggcgacgtggaatccaacccaggccctactagtatggactggatttggcgcatccttttccttgtcggcgctgctaccggcgcgcattccttcgaagaagtccaacttgtggagtctggagggggcctggtgcagcccggcggctctctcagactgtcttgtgcggcaagcggctacaccttcacctcttactggatagaatgggtgaggcaggcacctggaaagggactggagtggattggagagattctgccaggagggggagatacaaattacaatgaaatcttcaaggggcgggccaccttttcagcggataccagcaagaatacagcttacctgcagatgaatagcctccgggcagaagataccgctgtttattattgcacgagacgggtgccaataagactggactattgggggcaagggactcttgtcaccgtcagttcaacgcgtgcctctacaaagggaccctccgtgtttcctctggctcccagcagcaagtctacaagcggaggaacagccgctctgggctgcctggtcaaggattactttcccgagcctgtgaccgtgtcctggaatagcggagcactgacaagcggcgtgcacacctttccagccgtgctgcaaagcagcggcctgtactctctgagcagcgtggtcacagtgcctagctctagcctgggcacccagacctacatctgcaatgtgaaccacaagcctagcaacaccaaggtggacaagagagtggaacccaagagctgtgaagtgaaaaccgactccaccgaccacgtgaagcccaaagagacagagaacaccaagcagcccagcaagagctgccacaagcccaaggccatcgtgcacaccgagaaagtgaacatgatgagcctgaccgtgatcggcttcagaatcctgctgctgaaagtggccggctttaacctgctgatgaccctgcggctgtggtccagc

SEQ ID NO: 40241 - DNA, 1950 bp, synthetic construct
  source 1..1950: mol_type = other DNA
atggccttaccagtgaccgccttgctcctgccgctggccttgctgctccacgccgccaggccggacatcgtgatgacacagagccctgatagcctggccgtgtctctgggagagagagccaccattaactgcaaggccagccagagcgtggactacgacggcgacagcttcctgaactggtatcagcagaagcccggccagcctcctaagctgctgatctacgccgccagcaatctggaaagcggcgtgccaagcagattttccggctctggcagcggcaccgatttcaccctgacaatatccagcctccagcctgaggacgtggccgtgtactactgccagcagagcaacgacgaccctctgacctttggacagggcaccaaggtggaaatcaaactcgaggagggacagcctaaggccaatcctaccgtgacactgttccctccaagcagcgaagaactccaggccaacaaggccacacttgtgtgcctgatctccgacttctaccctggggctgtgacagtggcttggaaggccgatggatctcctgtgaaagccggcgtggaaaccaccaagccatccaagcagagcaacaacaaatacgccgccagctcctacctgagcctgacacctgagcagtggaagtcccacagatcctacagctgccaagtgacccacgaaggcagcaccgtggaaaagacagtggcccctacagagtgcagccccatcaagaccgatgtgattacaatggaccccaaggacaactgctccaaggacgccaacgataccctgctgctccagctgaccaacaccagcgcctactacatgtacgagatcctgctgggcaaggccaccctgtacgccgtgctggtgtctgccctggtgctgatggctatggtcaagcggaaggacagccggggacgcgccaagagaagcggatctggcgtgaagcagaccctgaatttcgacctgctgaagctggctggcgacgtggaatccaacccaggccctactagtatggactggatttggcgcatccttttccttgtcggcgctgctaccggcgcgcattccttcgaacaagttcagctggttcagagcggagccgaagtgaagaaacctggggcctctgtgaaggtgtcctgcaaagccagcggctacacctttaccagctactggatcaactgggtccgacaggcccctggacaaggactggaatggatgggacagatccttccaggcggaggggacaccaactacaacggcaagttcaagggcagagtgaccatcaccgccgacaccagcacaagcaccgcctacatggaactgagcagcctgagaagcgaggacaccgccgtgtattattgcaccagacgggtgcccatccggctggattattggggacagggaaccctggtcaccgtgtctagtacgcgtgcctctacaaagggaccctccgtgtttcctctggctcccagcagcaagtctacaagcggaggaacagccgctctgggctgcctggtcaaggattactttcccgagcctgtgaccgtgtcctggaatagcggagcactgacaagcggcgtgcacacctttccagccgtgctgcaaagcagcggcctgtactctctgagcagcgtggtcacagtgcctagctctagcctgggcacccagacctacatctgcaatgtgaaccacaagcctagcaacaccaaggtggacaagagagtggaacccaagagctgtgaagtgaaaaccgactccaccgaccacgtgaagcccaaagagacagagaacaccaagcagcccagcaagagctgccacaagcccaaggccatcgtgcacaccgagaaagtgaacatgatgagcctgaccgtgatcggcttcagaatcctgctgctgaaagtggccggctttaacctgctgatgaccctgcggctgtggtccagc

SEQ ID NO: 40242 - DNA, 1950 bp, synthetic construct
  source 1..1950: mol_type = other DNA
atggccttaccagtgaccgccttgctcctgccgctggccttgctgctccacgccgccaggccggacatcgtgatgacacagagccctgatagcctggccgtgtctctgggagagagagccaccattaactgcaaggccagccagagcgtggactacgacggcgacagcttcctgaactggtatcagcagaagcccggccagcctcctaagctgctgatctacgccgccagcaatctggaaagcggcgtgccaagcagattttccggctctggcagcggcaccgatttcaccctgacaatatccagcctccagcctgaggacgtggccgtgtactactgccagcagagcaacgacgaccctctgacctttggacagggcaccaaggtggaaatcaaactcgaggagggacagcctaaggccaatcctaccgtgacactgttccctccaagcagcgaagaactccaggccaacaaggccacacttgtgtgcctgatctccgacttctaccctggggctgtgacagtggcttggaaggccgatggatctcctgtgaaagccggcgtggaaaccaccaagccatccaagcagagcaacaacaaatacgccgccagctcctacctgagcctgacacctgagcagtggaagtcccacagatcctacagctgccaagtgacccacgaaggcagcaccgtggaaaagacagtggcccctacagagtgcagccccatcaagaccgatgtgattacaatggaccccaaggacaactgctccaaggacgccaacgataccctgctgctccagctgaccaacaccagcgcctactacatgtacgagatcctgctgggcaaggccaccctgtacgccgtgctggtgtctgccctggtgctgatggctatggtcaagcggaaggacagccggggacgcgccaagagaagcggatctggcgtgaagcagaccctgaatttcgacctgctgaagctggctggcgacgtggaatccaacccaggccctactagtatggactggatttggcgcatccttttccttgtcggcgctgctaccggcgcgcattccttcgaagaagtccaacttgtggagtctggagggggcctggtgcagcccggcggctctctcagactgtcttgtgcggcaagcggctacaccttcacctcttactggatagaatgggtgaggcaggcacctggaaagggactggagtggattggagagattctgccaggagggggagatacaaattacaatgaaatcttcaaggggcgggccaccttttcagcggataccagcaagaatacagcttacctgcagatgaatagcctccgggcagaagataccgctgtttattattgcacgagacgggtgccaataagactggactattgggggcaagggactcttgtcaccgtcagttcaacgcgtgcctctacaaagggaccctccgtgtttcctctggctcccagcagcaagtctacaagcggaggaacagccgctctgggctgcctggtcaaggattactttcccgagcctgtgaccgtgtcctggaatagcggagcactgacaagcggcgtgcacacctttccagccgtgctgcaaagcagcggcctgtactctctgagcagcgtggtcacagtgcctagctctagcctgggcacccagacctacatctgcaatgtgaaccacaagcctagcaacaccaaggtggacaagagagtggaacccaagagctgtgaagtgaaaaccgactccaccgaccacgtgaagcccaaagagacagagaacaccaagcagcccagcaagagctgccacaagcccaaggccatcgtgcacaccgagaaagtgaacatgatgagcctgaccgtgatcggcttcagaatcctgctgctgaaagtggccggctttaacctgctgatgaccctgcggctgtggtccagc

SEQ ID NO: 40243 - DNA, 1950 bp, synthetic construct
  source 1..1950: mol_type = other DNA
atggccttaccagtgaccgccttgctcctgccgctggccttgctgctccacgccgccaggccggacatcgtgatgacacagagccctgatagcctggccgtgtctctgggagagagagccaccattaactgcaaggccagccagagcgtggactacgacggcgacagcttcctgaactggtatcagcagaagcccggccagcctcctaagctgctgatctacgccgccagcaatctggaaagcggcgtgccaagcagattttccggctctggcagcggcaccgatttcaccctgacaatatccagcctccagcctgaggacgtggccgtgtactactgccagcagagcaacgacgaccctctgacctttggacagggcaccaaggtggaaatcaaactcgaggagggacagcctaaggccaatcctaccgtgacactgttccctccaagcagcgaagaactccaggccaacaaggccacacttgtgtgcctgatctccgacttctaccctggggctgtgacagtggcttggaaggccgatggatctcctgtgaaagccggcgtggaaaccaccaagccatccaagcagagcaacaacaaatacgccgccagctcctacctgagcctgacacctgagcagtggaagtcccacagatcctacagctgccaagtgacccacgaaggcagcaccgtggaaaagacagtggcccctacagagtgcagccccatcaagaccgatgtgattacaatggaccccaaggacaactgctccaaggacgccaacgataccctgctgctccagctgaccaacaccagcgcctactacatgtacgagatcctgctgggcaaggccaccctgtacgccgtgctggtgtctgccctggtgctgatggctatggtcaagcggaaggacagccggggacgcgccaagagaagcggatctggcgtgaagcagaccctgaatttcgacctgctgaagctggctggcgacgtggaatccaacccaggccctactagtatggactggatttggcgcatccttttccttgtcggcgctgctaccggcgcgcattccttcgaagaagtccaacttgtggagtctggagggggcctggtgcagcccggcggctctctcagactgtcttgtgcggcaagcggctacaccttcagctcttactggatagaatgggtgaggcaggcacctggaaagggactggagtggattggagagattctgccaggagggggagatacaaattacaatgaaatcttcaaggggcgggccaccttttcagcggataccagcaagaatacagcttacctgcagatgaatagcctccgggcagaagataccgctgtttattattgcacgagacgggtgccaataagactggactattgggggcaagggactcttgtcaccgtcagttcaacgcgtgcctctacaaagggaccctccgtgtttcctctggctcccagcagcaagtctacaagcggaggaacagccgctctgggctgcctggtcaaggattactttcccgagcctgtgaccgtgtcctggaatagcggagcactgacaagcggcgtgcacacctttccagccgtgctgcaaagcagcggcctgtactctctgagcagcgtggtcacagtgcctagctctagcctgggcacccagacctacatctgcaatgtgaaccacaagcctagcaacaccaaggtggacaagagagtggaacccaagagctgtgaagtgaaaaccgactccaccgaccacgtgaagcccaaagagacagagaacaccaagcagcccagcaagagctgccacaagcccaaggccatcgtgcacaccgagaaagtgaacatgatgagcctgaccgtgatcggcttcagaatcctgctgctgaaagtggccggctttaacctgctgatgaccctgcggctgtggtccagc

SEQ ID NO: 40244 - DNA, 1941 bp, synthetic construct
  source 1..1941: mol_type = other DNA
atggccttaccagtgaccgccttgctcctgccgctggccttgctgctccacgccgccaggccggacgtggtcatgacacagagcccttctagcctgtctgccagcgtgggcgacagagtgaccatcacctgtatggcctccgaggacatctacatccggctggcctggtatcagcagaagcctggaaacgcccctaagctgctgatctacgccgccacctctctggaaacaggcgtgccaagcagattttccggcagcggctctggcaccgatttcaccctgacaatatccagcctccagcctgaggacttcgccacctactactgccagcagtattggagcagcccctggacatttggcggaggcaccaaggtggaaatcaaactcgaggagggacagcctaaggccaatcctaccgtgacactgttccctccaagcagcgaagaactccaggccaacaaggccacacttgtgtgcctgatctccgacttctaccctggggctgtgacagtggcttggaaggccgatggatctcctgtgaaagccggcgtggaaaccaccaagccatccaagcagagcaacaacaaatacgccgccagctcctacctgagcctgacacctgagcagtggaagtcccacagatcctacagctgccaagtgacccacgaaggcagcaccgtggaaaagacagtggcccctacagagtgcagccccatcaagaccgatgtgattacaatggaccccaaggacaactgctccaaggacgccaacgataccctgctgctccagctgaccaacaccagcgcctactacatgtacgagatcctgctgggcaaggccaccctgtacgccgtgctggtgtctgccctggtgctgatggctatggtcaagcggaaggacagccggggacgcgccaagagaagcggatctggcgtgaagcagaccctgaatttcgacctgctgaagctggctggcgacgtggaatccaacccaggccctactagtatggactggatttggcgcatccttttccttgtcggcgctgctaccggcgcgcattccttcgaacaggttcagctgcaagagtctggccccggactggtcaagcctagccaaacactgagcctgacctgtaccgtgtccggctacagcatcaccagcgactacacctggaactggatcagacagcctcctggcaacggactggaatggatcggctacatcacctacagcggcagcaccagctacaaccccagcctgaaaagccgggtgctgatctccgtggacaccagcaagaatcaggtgtccctgaagctgagcagcgtgacagccgctgataccgccgtgtactactgtgccagactggggagaagatacacaatggactactggggccagggcaccaccgtgacagtttcttctacgcgtgcctctacaaagggaccctccgtgtttcctctggctcccagcagcaagtctacaagcggaggaacagccgctctgggctgcctggtcaaggattactttcccgagcctgtgaccgtgtcctggaatagcggagcactgacaagcggcgtgcacacctttccagccgtgctgcaaagcagcggcctgtactctctgagcagcgtggtcacagtgcctagctctagcctgggcacccagacctacatctgcaatgtgaaccacaagcctagcaacaccaaggtggacaagagagtggaacccaagagctgtgaagtgaaaaccgactccaccgaccacgtgaagcccaaagagacagagaacaccaagcagcccagcaagagctgccacaagcccaaggccatcgtgcacaccgagaaagtgaacatgatgagcctgaccgtgatcggcttcagaatcctgctgctgaaagtggccggctttaacctgctgatgaccctgcggctgtggtccagc

SEQ ID NO: 40245 - DNA, 1938 bp, synthetic construct
  source 1..1938: mol_type = other DNA
atggccttaccagtgaccgccttgctcctgccgctggccttgctgctccacgccgccaggccggacatccagatgacacagagccctagcagcctgtctgccagcgtgggagacagagtgaccatcacatgcaaggccagcgacctgatccacaactggctggcctggtatcagcagaagcctggcaaggcccctaagctgctgatctacggcgctacctctctggaaacaggcgtgcccagcagattttctggcagcggctctggcaccgacttcaccctgacaatatccagcctccagcctgaggacttcgccacctactactgccagcagtactggaccacacctttcaccttcggccagggcaccaaggtggaaatcaaaagactcgaggagggacagcctaaggccaatcctaccgtgacactgttccctccaagcagcgaagaactccaggccaacaaggccacacttgtgtgcctgatctccgacttctaccctggggctgtgacagtggcttggaaggccgatggatctcctgtgaaagccggcgtggaaaccaccaagccatccaagcagagcaacaacaaatacgccgccagctcctacctgagcctgacacctgagcagtggaagtcccacagatcctacagctgccaagtgacccacgaaggcagcaccgtggaaaagacagtggcccctacagagtgcagccccatcaagaccgatgtgattacaatggaccccaaggacaactgctccaaggacgccaacgataccctgctgctccagctgaccaacaccagcgcctactacatgtacgagatcctgctgggcaaggccaccctgtacgccgtgctggtgtctgccctggtgctgatggctatggtcaagcggaaggacagccggggacgcgccaagagaagcggatctggcgtgaagcagaccctgaatttcgacctgctgaagctggctggcgacgtggaatccaacccaggccctactagtatggactggatttggcgcatccttttccttgtcggcgctgctaccggcgcgcattccttcgaagaagtgcagctggttgaatcaggtggcggcctggttcaacctggcggatctctgagactgagctgtgccgccagcggctacagcatcaccaatgactacgcctggaactgggtccgacaggcccctggaaaaggactggaatgggtcggatatatcagctactccggctacaccacctacaatcccagcatcaagagccggttcaccatcagcagagacaccagcaagaacaccctgtacctccagatgaactccctgagagccgaggacaccgccgtgtactattgtgccagatggaccagcggcctggactattggggacagggaacactggtcaccgtgtcctctacgcgtgcctctacaaagggaccctccgtgtttcctctggctcccagcagcaagtctacaagcggaggaacagccgctctgggctgcctggtcaaggattactttcccgagcctgtgaccgtgtcctggaatagcggagcactgacaagcggcgtgcacacctttccagccgtgctgcaaagcagcggcctgtactctctgagcagcgtggtcacagtgcctagctctagcctgggcacccagacctacatctgcaatgtgaaccacaagcctagcaacaccaaggtggacaagagagtggaacccaagagctgtgaagtgaaaaccgactccaccgaccacgtgaagcccaaagagacagagaacaccaagcagcccagcaagagctgccacaagcccaaggccatcgtgcacaccgagaaagtgaacatgatgagcctgaccgtgatcggcttcagaatcctgctgctgaaagtggccggctttaacctgctgatgaccctgcggctgtggtccagc

SEQ ID NO: 40246 - DNA, 1959 bp, synthetic construct
  source 1..1959: mol_type = other DNA
atggccttaccagtgaccgccttgctcctgccgctggccttgctgctccacgccgccaggccggacatcgtgatgacacagagccctgatagcctggccgtgtctctgggagagagagccaccatcaactgcaagagcagccagagcctgctgaacagcggcaaccagaagaactacctggcctggtatcagcagaagcccggccagcctcctaagctgctgatctactggggcagcaccagatccacaggcgtgcccgatagattttctggctctggcagcggcaccgacttcaccctgacaatttctagcctgcaagccgaggacgtggccgtgtactactgccagaacgactacacataccccttcaccttcggccagggcaccaagctggaaatcaaactcgaggagggacagcctaaggccaatcctaccgtgacactgttccctccaagcagcgaagaactccaggccaacaaggccacacttgtgtgcctgatctccgacttctaccctggggctgtgacagtggcttggaaggccgatggatctcctgtgaaagccggcgtggaaaccaccaagccatccaagcagagcaacaacaaatacgccgccagctcctacctgagcctgacacctgagcagtggaagtcccacagatcctacagctgccaagtgacccacgaaggcagcaccgtggaaaagacagtggcccctacagagtgcagccccatcaagaccgatgtgattacaatggaccccaaggacaactgctccaaggacgccaacgataccctgctgctccagctgaccaacaccagcgcctactacatgtacgagatcctgctgggcaaggccaccctgtacgccgtgctggtgtctgccctggtgctgatggctatggtcaagcggaaggacagccggggacgcgccaagagaagcggatctggcgtgaagcagaccctgaatttcgacctgctgaagctggctggcgacgtggaatccaacccaggccctactagtatggactggatttggcgcatccttttccttgtcggcgctgctaccggcgcgcattccttcgaacaagttcagctggttcagagcggagccgaagtgaagaaacctggggcctctgtgaaggtgtcctgcaaggcttccggctataccttcaccagcttttggctgaactgggtccgacaggcccctggacaaggactggaatggatgggcaacatctaccccagcaccagctacaccgtgtacaaccagaaattcaaggaccgcgtgaccatgaccagggacaccagcacaagcacagtgtacatggaactgagcagcctgcggagcgaggataccgccgtgtattattgcgccagaacctggcggggcaacagcttcgattattggggccagggaaccaccgtgaccgtgtcatctacgcgtgcctctacaaagggaccctccgtgtttcctctggctcccagcagcaagtctacaagcggaggaacagccgctctgggctgcctggtcaaggattactttcccgagcctgtgaccgtgtcctggaatagcggagcactgacaagcggcgtgcacacctttccagccgtgctgcaaagcagcggcctgtactctctgagcagcgtggtcacagtgcctagctctagcctgggcacccagacctacatctgcaatgtgaaccacaagcctagcaacaccaaggtggacaagagagtggaacccaagagctgtgaagtgaaaaccgactccaccgaccacgtgaagcccaaagagacagagaacaccaagcagcccagcaagagctgccacaagcccaaggccatcgtgcacaccgagaaagtgaacatgatgagcctgaccgtgatcggcttcagaatcctgctgctgaaagtggccggctttaacctgctgatgaccctgcggctgtggtccagc

SEQ ID NO: 40247 - DNA, 1959 bp, synthetic construct
  source 1..1959: mol_type = other DNA
atggccttaccagtgaccgccttgctcctgccgctggccttgctgctccacgccgccaggccggacatcgtgatgacacagagccctgatagcctggccgtgtctctgggagagagagccaccatcaactgcaagagcagccagagcctgctgaacagcggcaacaacaagaactacgtgacatggtatcagcagaagcccggccagcctcctaagctgctgatctactggggcagcaccagatccacaggcgtgcccgatagattttctggctctggcagcggcaccgacttcaccctgacaatttctagcctgcaagccgaggacgtggccgtgtactactgccagaacgactacacataccccttcaccttcggccagggcaccaagctggaaatcaaactcgaggagggacagcctaaggccaatcctaccgtgacactgttccctccaagcagcgaagaactccaggccaacaaggccacacttgtgtgcctgatctccgacttctaccctggggctgtgacagtggcttggaaggccgatggatctcctgtgaaagccggcgtggaaaccaccaagccatccaagcagagcaacaacaaatacgccgccagctcctacctgagcctgacacctgagcagtggaagtcccacagatcctacagctgccaagtgacccacgaaggcagcaccgtggaaaagacagtggcccctacagagtgcagccccatcaagaccgatgtgattacaatggaccccaaggacaactgctccaaggacgccaacgataccctgctgctccagctgaccaacaccagcgcctactacatgtacgagatcctgctgggcaaggccaccctgtacgccgtgctggtgtctgccctggtgctgatggctatggtcaagcggaaggacagccggggacgcgccaagagaagcggatctggcgtgaagcagaccctgaatttcgacctgctgaagctggctggcgacgtggaatccaacccaggccctactagtatggactggatttggcgcatccttttccttgtcggcgctgctaccggcgcgcattccttcgaacaagttcagctggttcagagcggagccgaagtgaagaaacctggggcctctgtgaaggtgtcctgcaaggcttccggctataccttcaccagcttttggctgaactgggtccgacaggcccctggacaaggactggaatggatgggcaacatctaccccagcgacagctacaccgtgtacaaccagaaattcaaggaccgcgtgaccatgaccagggacaccagcacaagcacagtgtacatggaactgagcagcctgcggagcgaggataccgccgtgtattattgcgccagaacctggcggggcaacagcttcgattattggggccagggaaccaccgtgaccgtgtcatctacgcgtgcctctacaaagggaccctccgtgtttcctctggctcccagcagcaagtctacaagcggaggaacagccgctctgggctgcctggtcaaggattactttcccgagcctgtgaccgtgtcctggaatagcggagcactgacaagcggcgtgcacacctttccagccgtgctgcaaagcagcggcctgtactctctgagcagcgtggtcacagtgcctagctctagcctgggcacccagacctacatctgcaatgtgaaccacaagcctagcaacaccaaggtggacaagagagtggaacccaagagctgtgaagtgaaaaccgactccaccgaccacgtgaagcccaaagagacagagaacaccaagcagcccagcaagagctgccacaagcccaaggccatcgtgcacaccgagaaagtgaacatgatgagcctgaccgtgatcggcttcagaatcctgctgctgaaagtggccggctttaacctgctgatgaccctgcggctgtggtccagc

SEQ ID NO: 40248 - DNA, 1935 bp, synthetic construct
  source 1..1935: mol_type = other DNA
atggccttaccagtgaccgccttgctcctgccgctggccttgctgctccacgccgccaggccgcagatcgtgctgacacagagccctgccatcatgtccgcttctcccggcgagaaagtgaccatgacatgtagcgccagcagcagcgtgtccttcatgcactggtatcagcagaagtccggcacaagccccaagcggtggatctacgataccagcacactggcctctggcgtgccagccagatttggcggatctggcagcggcacatcttacagcctgaccatcagcagcatggaagccgaagatgccgccacctactactgccagcagtggtccagcaatcccctgacatttggagccggcaccaagctggaactgaagagactcgaggagggacagcctaaggccaatcctaccgtgacactgttccctccaagcagcgaagaactccaggccaacaaggccacacttgtgtgcctgatctccgacttctaccctggggctgtgacagtggcttggaaggccgatggatctcctgtgaaagccggcgtggaaaccaccaagccatccaagcagagcaacaacaaatacgccgccagctcctacctgagcctgacacctgagcagtggaagtcccacagatcctacagctgccaagtgacccacgaaggcagcaccgtggaaaagacagtggcccctacagagtgcagccccatcaagaccgatgtgattacaatggaccccaaggacaactgctccaaggacgccaacgataccctgctgctccagctgaccaacaccagcgcctactacatgtacgagatcctgctgggcaaggccaccctgtacgccgtgctggtgtctgccctggtgctgatggctatggtcaagcggaaggacagccggggacgcgccaagagaagcggatctggcgtgaagcagaccctgaatttcgacctgctgaagctggctggcgacgtggaatccaacccaggccctactagtatggactggatttggcgcatccttttccttgtcggcgctgctaccggcgcgcattccttcgaacaagttcagctgcaacagagcggccctgagctggttaagcctggcgcttctgtgcggatctcttgcaaggccagcggctacaccttcaccagctactacatccactgggtcaagcagcggcctggacagggactcgaatggatcggctggatctaccccggcaacctgaacaccaagtacaacgagaagttcaagggcaaagccacactgaccgccgacaagagcagcagcacagcctacatgcagctgagcagcctgacaagcgaggacagcgccgtgtacttctgcgccagatacgactggtacttcgacgtgtggggagccggaaccaccgtgacagtttcttctacgcgtgcctctacaaagggaccctccgtgtttcctctggctcccagcagcaagtctacaagcggaggaacagccgctctgggctgcctggtcaaggattactttcccgagcctgtgaccgtgtcctggaatagcggagcactgacaagcggcgtgcacacctttccagccgtgctgcaaagcagcggcctgtactctctgagcagcgtggtcacagtgcctagctctagcctgggcacccagacctacatctgcaatgtgaaccacaagcctagcaacaccaaggtggacaagagagtggaacccaagagctgtgaagtgaaaaccgactccaccgaccacgtgaagcccaaagagacagagaacaccaagcagcccagcaagagctgccacaagcccaaggccatcgtgcacaccgagaaagtgaacatgatgagcctgaccgtgatcggcttcagaatcctgctgctgaaagtggccggctttaacctgctgatgaccctgcggctgtggtccagc

SEQ ID NO: 40249 - DNA, 1953 bp, synthetic construct
  source 1..1953: mol_type = other DNA
atggccttaccagtgaccgccttgctcctgccgctggccttgctgctccacgccgccaggccggacatccagatgacacagagccctagcagcctgtctgccagcgtgggagacagagtgaccatcacctgtagagccagccagagcatcagcagctacctgaactggtatcagcagaagcccggcaaggcccctaaactgctgatctatgccgccagctctctccagagcggagtgcctagcagattttctggcagcggctccggcaccgatttcaccctgacaatatccagcctccagcctgaggacttcgccacctactactgccagcagagctacagcacccctctgacctttggacagggcaccaaggtggaaatcaagctcgaggagggacagcctaaggccaatcctaccgtgacactgttccctccaagcagcgaagaactccaggccaacaaggccacacttgtgtgcctgatctccgacttctaccctggggctgtgacagtggcttggaaggccgatggatctcctgtgaaagccggcgtggaaaccaccaagccatccaagcagagcaacaacaaatacgccgccagctcctacctgagcctgacacctgagcagtggaagtcccacagatcctacagctgccaagtgacccacgaaggcagcaccgtggaaaagacagtggcccctacagagtgcagccccatcaagaccgatgtgattacaatggaccccaaggacaactgctccaaggacgccaacgataccctgctgctccagctgaccaacaccagcgcctactacatgtacgagatcctgctgggcaaggccaccctgtacgccgtgctggtgtctgccctggtgctgatggctatggtcaagcggaaggacagccggggacgcgccaagagaagcggatctggcgtgaagcagaccctgaatttcgacctgctgaagctggctggcgacgtggaatccaacccaggccctactagtatggactggatttggcgcatccttttccttgtcggcgctgctaccggcgcgcattccttcgaagaggtgcagctggttgaatctggcggaggactggttcagcctggcggatctctgagactgtcttgtgctgccagcggcttcaccttcagctcctacgccatgagctgggtccgacaggctcctggcaaaggactggaatgggtgtccgccatctctggctcaggcggcagcacatattacgccgactctgtgaagggcagattcaccatcagccgggacaacagcaagaacaccctgtacctccagatgaactccctgagagccgaggacaccgccgtgtactattgtgccagactgggctaccccaccaccacactgctgccctttgattattggggccagggcaccctggtcaccgtttcttctacgcgtgcctctacaaagggaccctccgtgtttcctctggctcccagcagcaagtctacaagcggaggaacagccgctctgggctgcctggtcaaggattactttcccgagcctgtgaccgtgtcctggaatagcggagcactgacaagcggcgtgcacacctttccagccgtgctgcaaagcagcggcctgtactctctgagcagcgtggtcacagtgcctagctctagcctgggcacccagacctacatctgcaatgtgaaccacaagcctagcaacaccaaggtggacaagagagtggaacccaagagctgtgaagtgaaaaccgactccaccgaccacgtgaagcccaaagagacagagaacaccaagcagcccagcaagagctgccacaagcccaaggccatcgtgcacaccgagaaagtgaacatgatgagcctgaccgtgatcggcttcagaatcctgctgctgaaagtggccggctttaacctgctgatgaccctgcggctgtggtccagc

SEQ ID NO: 40250 - DNA, 1956 bp, synthetic construct
  source 1..1956: mol_type = other DNA
atggccttaccagtgaccgccttgctcctgccgctggccttgctgctccacgccgccaggccggacatccagatgacacagagccctagcagcctgtctgccagcgtgggagacagagtgaccatcacctgtagagccagccaggacatcaacacagccgtggcttggtatcagcagaagcctggcaaggcccctaagctgctgatctacagcgcctacttcctgtacagcggcgtgcccagcagattcagcggaagcagaagcggcaccgacttcaccctgacaatatccagcctccagcctgaggacttcgccacctactactgccagcagtacagcagatacagccccgtgacctttggacagggcaccaaggtggaaatcaagagactcgaggagggacagcctaaggccaatcctaccgtgacactgttccctccaagcagcgaagaactccaggccaacaaggccacacttgtgtgcctgatctccgacttctaccctggggctgtgacagtggcttggaaggccgatggatctcctgtgaaagccggcgtggaaaccaccaagccatccaagcagagcaacaacaaatacgccgccagctcctacctgagcctgacacctgagcagtggaagtcccacagatcctacagctgccaagtgacccacgaaggcagcaccgtggaaaagacagtggcccctacagagtgcagccccatcaagaccgatgtgattacaatggaccccaaggacaactgctccaaggacgccaacgataccctgctgctccagctgaccaacaccagcgcctactacatgtacgagatcctgctgggcaaggccaccctgtacgccgtgctggtgtctgccctggtgctgatggctatggtcaagcggaaggacagccggggacgcgccaagagaagcggatctggcgtgaagcagaccctgaatttcgacctgctgaagctggctggcgacgtggaatccaacccaggccctactagtatggactggatttggcgcatccttttccttgtcggcgctgctaccggcgcgcattccttcgaagaagttcagctggttgaaagtggtggcggcctggttcaacctggcggatctctgagactgagctgtgccgccagcggcttcaatgtgtacgcctctggaatgcactgggtccgacaggcccctggcaaaggacttgagtgggtcgccaaaatctaccccgacagcgactacacctattacgccgacagcgtgaagggcagattcaccatcagcgccgacaccagcaagaacaccgcctacctccagatgaactccctgagagccgaggacaccgccgtgtactactgtagcagagacagcagcttctactacgtgtacgctatggactactggggccagggcacactggtcacagtctcttctacgcgtgcctctacaaagggaccctccgtgtttcctctggctcccagcagcaagtctacaagcggaggaacagccgctctgggctgcctggtcaaggattactttcccgagcctgtgaccgtgtcctggaatagcggagcactgacaagcggcgtgcacacctttccagccgtgctgcaaagcagcggcctgtactctctgagcagcgtggtcacagtgcctagctctagcctgggcacccagacctacatctgcaatgtgaaccacaagcctagcaacaccaaggtggacaagagagtggaacccaagagctgtgaagtgaaaaccgactccaccgaccacgtgaagcccaaagagacagagaacaccaagcagcccagcaagagctgccacaagcccaaggccatcgtgcacaccgagaaagtgaacatgatgagcctgaccgtgatcggcttcagaatcctgctgctgaaagtggccggctttaacctgctgatgaccctgcggctgtggtccagc

SEQ ID NO: 40251 - DNA, 1956 bp, synthetic construct
  source 1..1956: mol_type = other DNA
atggccttaccagtgaccgccttgctcctgccgctggccttgctgctccacgccgccaggccggacatccagatgacacagagccctagcagcctgtctgccagcgtgggagacagagtgaccatcacctgtagagccagccaggacgtgaacacagccgtggcttggtatcagcagaagcctggcaaggcccctaagctgctgatctacagcgcctacttcctgtacagcggcgtgcccagcagattcagcggaagcagaagcggcaccgacttcaccctgacaatatccagcctccagcctgaggacttcgccacctactactgccagcagtacagcagatacagccccgtgacctttggacagggcaccaaggtggaaatcaagagactcgaggagggacagcctaaggccaatcctaccgtgacactgttccctccaagcagcgaagaactccaggccaacaaggccacacttgtgtgcctgatctccgacttctaccctggggctgtgacagtggcttggaaggccgatggatctcctgtgaaagccggcgtggaaaccaccaagccatccaagcagagcaacaacaaatacgccgccagctcctacctgagcctgacacctgagcagtggaagtcccacagatcctacagctgccaagtgacccacgaaggcagcaccgtggaaaagacagtggcccctacagagtgcagccccatcaagaccgatgtgattacaatggaccccaaggacaactgctccaaggacgccaacgataccctgctgctccagctgaccaacaccagcgcctactacatgtacgagatcctgctgggcaaggccaccctgtacgccgtgctggtgtctgccctggtgctgatggctatggtcaagcggaaggacagccggggacgcgccaagagaagcggatctggcgtgaagcagaccctgaatttcgacctgctgaagctggctggcgacgtggaatccaacccaggccctactagtatggactggatttggcgcatccttttccttgtcggcgctgctaccggcgcgcattccttcgaagaagttcagctggttgaaagtggtggcggcctggttcaacctggcggatctctgagactgagctgtgccgccagcggcttcaatgtgtacgcctctggaatgcactgggtccgacaggcccctggcaaaggacttgagtgggtcgccaaaatctaccccgacagcgactacacctattacgccgacagcgtgaagggcagattcaccatcagcgccgacaccagcaagaacaccgcctacctccagatgaactccctgagagccgaggacaccgccgtgtactactgtagcagagacagcagcttctactacgtgtacgctatggactactggggccagggcacactggtcacagtctcttctacgcgtgcctctacaaagggaccctccgtgtttcctctggctcccagcagcaagtctacaagcggaggaacagccgctctgggctgcctggtcaaggattactttcccgagcctgtgaccgtgtcctggaatagcggagcactgacaagcggcgtgcacacctttccagccgtgctgcaaagcagcggcctgtactctctgagcagcgtggtcacagtgcctagctctagcctgggcacccagacctacatctgcaatgtgaaccacaagcctagcaacaccaaggtggacaagagagtggaacccaagagctgtgaagtgaaaaccgactccaccgaccacgtgaagcccaaagagacagagaacaccaagcagcccagcaagagctgccacaagcccaaggccatcgtgcacaccgagaaagtgaacatgatgagcctgaccgtgatcggcttcagaatcctgctgctgaaagtggccggctttaacctgctgatgaccctgcggctgtggtccagc

SEQ ID NO: 40252 - DNA, 1941 bp, synthetic construct
  source 1..1941: mol_type = other DNA
atggccttaccagtgaccgccttgctcctgccgctggccttgctgctccacgccgccaggccggacatccagatgacacagagccctagcagcctgtctgccagcgtgggagacagagtgaccatcacctgtagagccagccaggatgtgtctacagccgtggcctggtatcagcagaagcctggaaaggcccctaagctgctgatctacagcgccagctttctgtactccggcgtgcccagcagattcagcggaagcagaagcggcaccgacttcaccctgacaatatccagcctccagcctgaggacttcgccacctactactgccagcagtacctgtaccagccttggacattcggccagggcaccaaggtggaaatcaagagactcgaggagggacagcctaaggccaatcctaccgtgacactgttccctccaagcagcgaagaactccaggccaacaaggccacacttgtgtgcctgatctccgacttctaccctggggctgtgacagtggcttggaaggccgatggatctcctgtgaaagccggcgtggaaaccaccaagccatccaagcagagcaacaacaaatacgccgccagctcctacctgagcctgacacctgagcagtggaagtcccacagatcctacagctgccaagtgacccacgaaggcagcaccgtggaaaagacagtggcccctacagagtgcagccccatcaagaccgatgtgattacaatggaccccaaggacaactgctccaaggacgccaacgataccctgctgctccagctgaccaacaccagcgcctactacatgtacgagatcctgctgggcaaggccaccctgtacgccgtgctggtgtctgccctggtgctgatggctatggtcaagcggaaggacagccggggacgcgccaagagaagcggatctggcgtgaagcagaccctgaatttcgacctgctgaagctggctggcgacgtggaatccaacccaggccctactagtatggactggatttggcgcatccttttccttgtcggcgctgctaccggcgcgcattccttcgaagaagttcagctggttgagtctggcggaggactggttcaacctggcggaagcctgagactgtcttgtgccgccagcggcttcaacatcgactactacggaatgcactgggtccgacaggcccctggcaaaggacttgaatgggtcgcctctctgtacggcggcagcgatagcacagattacgccgactctgtgaagggcagattcaccatcagcgccgacaccagcaagaacaccgcctacctccagatgaactccctgagagccgaagataccgccgtgtactactgctccagacagtacagcgcctacttcgactattggggccagggaaccctggtcaccgttagctctacgcgtgcctctacaaagggaccctccgtgtttcctctggctcccagcagcaagtctacaagcggaggaacagccgctctgggctgcctggtcaaggattactttcccgagcctgtgaccgtgtcctggaatagcggagcactgacaagcggcgtgcacacctttccagccgtgctgcaaagcagcggcctgtactctctgagcagcgtggtcacagtgcctagctctagcctgggcacccagacctacatctgcaatgtgaaccacaagcctagcaacaccaaggtggacaagagagtggaacccaagagctgtgaagtgaaaaccgactccaccgaccacgtgaagcccaaagagacagagaacaccaagcagcccagcaagagctgccacaagcccaaggccatcgtgcacaccgagaaagtgaacatgatgagcctgaccgtgatcggcttcagaatcctgctgctgaaagtggccggctttaacctgctgatgaccctgcggctgtggtccagc

SEQ ID NO: 40253 - DNA, 1947 bp, synthetic construct
  source 1..1947: mol_type = other DNA
atggccttaccagtgaccgccttgctcctgccgctggccttgctgctccacgccgccaggccggagatcgtgctgacacagtctcccgccacactgtcactgtctccaggcgaaagagccacactgagctgtagagccagccagagcgtgtcctcttacctggcctggtatcagcagaagcctggacaggctccccggctgctgatctacgatgccagcaatagagccacaggcatccccgccagattttctggctctggcagcggcaccgatttcaccctgaccataagcagcctggaacctgaggacttcgccgtgtactactgccagcagagaagcgactggcccctgacatttggcggcggaacaaaggtggaaatcaaactcgaggagggacagcctaaggccaatcctaccgtgacactgttccctccaagcagcgaagaactccaggccaacaaggccacacttgtgtgcctgatctccgacttctaccctggggctgtgacagtggcttggaaggccgatggatctcctgtgaaagccggcgtggaaaccaccaagccatccaagcagagcaacaacaaatacgccgccagctcctacctgagcctgacacctgagcagtggaagtcccacagatcctacagctgccaagtgacccacgaaggcagcaccgtggaaaagacagtggcccctacagagtgcagccccatcaagaccgatgtgattacaatggaccccaaggacaactgctccaaggacgccaacgataccctgctgctccagctgaccaacaccagcgcctactacatgtacgagatcctgctgggcaaggccaccctgtacgccgtgctggtgtctgccctggtgctgatggctatggtcaagcggaaggacagccggggacgcgccaagagaagcggatctggcgtgaagcagaccctgaatttcgacctgctgaagctggctggcgacgtggaatccaacccaggccctactagtatggactggatttggcgcatccttttccttgtcggcgctgctaccggcgcgcattccttcgaacaagttcagctggttcagagcggagccgaagtgaagaaacctggcagcagcgtgaaggtgtcctgcaaagcaagcggcggcacctttagctcctacgccatccactgggttcgacaggcaccaggacaaggactggaatggatgggcagaatcatccccatcgagggcagagcctactacgcccagaaattccagggcagagtgaccatcaccgccgacgagtctacaagcaccgcctacatggaactgagcagcctgagaagcgaggataccgctgtgtactattgcgccagaggccggtacagctacagatattggttcgactactggggccagggcaccctggttacagtctcttctacgcgtgcctctacaaagggaccctccgtgtttcctctggctcccagcagcaagtctacaagcggaggaacagccgctctgggctgcctggtcaaggattactttcccgagcctgtgaccgtgtcctggaatagcggagcactgacaagcggcgtgcacacctttccagccgtgctgcaaagcagcggcctgtactctctgagcagcgtggtcacagtgcctagctctagcctgggcacccagacctacatctgcaatgtgaaccacaagcctagcaacaccaaggtggacaagagagtggaacccaagagctgtgaagtgaaaaccgactccaccgaccacgtgaagcccaaagagacagagaacaccaagcagcccagcaagagctgccacaagcccaaggccatcgtgcacaccgagaaagtgaacatgatgagcctgaccgtgatcggcttcagaatcctgctgctgaaagtggccggctttaacctgctgatgaccctgcggctgtggtccagc

SEQ ID NO: 40254 - DNA, 1947 bp, synthetic construct
  source 1..1947: mol_type = other DNA
atggccttaccagtgaccgccttgctcctgccgctggccttgctgctccacgccgccaggccggagatcgtgctgacacagtctcccgccacactgtcactgtctccaggcgaaagagccacactgagctgtagagccagccagagcgtgtcctcttacctggcctggtatcagcagaagcctggacaggctccccggctgctgatctacgatgccagcaatagagccacaggcatccccgccagattttctggctctggcagcggcaccgatttcaccctgaccataagcagcctggaacctgaggacttcgccgtgtactactgccagcagagaagcaactggcccctgacctttggacagggcaccaaggtggaaatcaaactcgaggagggacagcctaaggccaatcctaccgtgacactgttccctccaagcagcgaagaactccaggccaacaaggccacacttgtgtgcctgatctccgacttctaccctggggctgtgacagtggcttggaaggccgatggatctcctgtgaaagccggcgtggaaaccaccaagccatccaagcagagcaacaacaaatacgccgccagctcctacctgagcctgacacctgagcagtggaagtcccacagatcctacagctgccaagtgacccacgaaggcagcaccgtggaaaagacagtggcccctacagagtgcagccccatcaagaccgatgtgattacaatggaccccaaggacaactgctccaaggacgccaacgataccctgctgctccagctgaccaacaccagcgcctactacatgtacgagatcctgctgggcaaggccaccctgtacgccgtgctggtgtctgccctggtgctgatggctatggtcaagcggaaggacagccggggacgcgccaagagaagcggatctggcgtgaagcagaccctgaatttcgacctgctgaagctggctggcgacgtggaatccaacccaggccctactagtatggactggatttggcgcatccttttccttgtcggcgctgctaccggcgcgcattccttcgaacaagttcagctggttcagagcggagccgaagtgaagaaacctggcagcagcgtgaaggtgtcctgcaaagcaagcggcggcacctttagcacctacgccatccactgggttcgacaggcaccaggacaaggactggaatggatgggcagaatcatccccatcgagggcagagcctactacgcccagaaattccagggcagagtgaccatcaccgccgacgagtctacaagcaccgcctacatggaactgagcagcctgagaagcgaggataccgctgtgtactattgcgccagaggccggtacagctacagatattggttcgactactggggccagggcaccctggttacagtctcttctacgcgtgcctctacaaagggaccctccgtgtttcctctggctcccagcagcaagtctacaagcggaggaacagccgctctgggctgcctggtcaaggattactttcccgagcctgtgaccgtgtcctggaatagcggagcactgacaagcggcgtgcacacctttccagccgtgctgcaaagcagcggcctgtactctctgagcagcgtggtcacagtgcctagctctagcctgggcacccagacctacatctgcaatgtgaaccacaagcctagcaacaccaaggtggacaagagagtggaacccaagagctgtgaagtgaaaaccgactccaccgaccacgtgaagcccaaagagacagagaacaccaagcagcccagcaagagctgccacaagcccaaggccatcgtgcacaccgagaaagtgaacatgatgagcctgaccgtgatcggcttcagaatcctgctgctgaaagtggccggctttaacctgctgatgaccctgcggctgtggtccagc

SEQ ID NO: 40255 - DNA, 1989 bp, synthetic construct
  source 1..1989: mol_type = other DNA
atggccttaccagtgaccgccttgctcctgccgctggccttgctgctccacgccgccaggccggacatccagatgacacagagcccctctagcctgtctgccagcgtgggagacagagtgaccatcacctgtagagccagccagagcatcagaaactacctgaactggtatcagcaaaagcccggcaaggcccctgagctgctgattcatgctgcaagcagcctccagagcggcgtgccaagcagattttctggcagcggcagcggaaccgacttcaccctgacaatatctagcctccagcctgaggacttcgccagctactactgccagcagagctacagcgcccctcctatcacctttggacagggcaccagactggaaatcaagctcgaggagggacagcctaaggccaatcctaccgtgacactgttccctccaagcagcgaagaactccaggccaacaaggccacacttgtgtgcctgatctccgacttctaccctggggctgtgacagtggcttggaaggccgatggatctcctgtgaaagccggcgtggaaaccaccaagccatccaagcagagcaacaacaaatacgccgccagctcctacctgagcctgacacctgagcagtggaagtcccacagatcctacagctgccaagtgacccacgaaggcagcaccgtggaaaagacagtggcccctacagagtgcagccccatcaagaccgatgtgattacaatggaccccaaggacaactgctccaaggacgccaacgataccctgctgctccagctgaccaacaccagcgcctactacatgtacgagatcctgctgggcaaggccaccctgtacgccgtgctggtgtctgccctggtgctgatggctatggtcaagcggaaggacagccggggacgcgccaagagaagcggatctggcgtgaagcagaccctgaatttcgacctgctgaagctggctggcgacgtggaatccaacccaggccctactagtatggactggatttggcgcatccttttccttgtcggcgctgctaccggcgcgcattccttcgaacaggttcagctccagcagtctggacctggcctggtcaagcctagccagacactgtctctgacctgtgccatcagcggcgatagcgtgtcctctaatagagccgcctggaactggatcagacagagccctagcagaggactccagtggctgggcagaacctactaccgcagcaagtggtacaacgactacgccgtgtctctgcggagccggatcaccatcaatcccgtgaccagcaagaaccaggtggccctgcacatgaacagcgtgacccctgaagataccgccgtgtactactgtgccagagccggaattgtggtggtgcccggacctgagacattctactactacgaccacggcctggacgtgtggggccagggaacaacagtgactgtctcttctacgcgtgcctctacaaagggaccctccgtgtttcctctggctcccagcagcaagtctacaagcggaggaacagccgctctgggctgcctggtcaaggattactttcccgagcctgtgaccgtgtcctggaatagcggagcactgacaagcggcgtgcacacctttccagccgtgctgcaaagcagcggcctgtactctctgagcagcgtggtcacagtgcctagctctagcctgggcacccagacctacatctgcaatgtgaaccacaagcctagcaacaccaaggtggacaagagagtggaacccaagagctgtgaagtgaaaaccgactccaccgaccacgtgaagcccaaagagacagagaacaccaagcagcccagcaagagctgccacaagcccaaggccatcgtgcacaccgagaaagtgaacatgatgagcctgaccgtgatcggcttcagaatcctgctgctgaaagtggccggctttaacctgctgatgaccctgcggctgtggtccagc

SEQ ID NO: 40256 - DNA, 1920 bp, synthetic construct
  source 1..1920: mol_type = other DNA
atggccttaccagtgaccgccttgctcctgccgctggccttgctgctccacgccgccaggccggacatccagctgacacagagccctagcacactgagcgccagcatgggcgacagagtgaccatcacatgtagcgcctctagcagcgtgcggttcatccactggtatcagcagaagcctggcaaggcccctaagcggctgatctacgataccagcaaactggcctctggcgtgcccagcagattttctggctctggcagcggcaccgacttcaccctgacaatatctagcctccagcctgaggacttcgccacctactactgtcagcagtggggcagcagccctttcacctttggacagggcaccaaggtggaaatcaagctcgaggagggacagcctaaggccaatcctaccgtgacactgttccctccaagcagcgaagaactccaggccaacaaggccacacttgtgtgcctgatctccgacttctaccctggggctgtgacagtggcttggaaggccgatggatctcctgtgaaagccggcgtggaaaccaccaagccatccaagcagagcaacaacaaatacgccgccagctcctacctgagcctgacacctgagcagtggaagtcccacagatcctacagctgccaagtgacccacgaaggcagcaccgtggaaaagacagtggcccctacagagtgcagccccatcaagaccgatgtgattacaatggaccccaaggacaactgctccaaggacgccaacgataccctgctgctccagctgaccaacaccagcgcctactacatgtacgagatcctgctgggcaaggccaccctgtacgccgtgctggtgtctgccctggtgctgatggctatggtcaagcggaaggacagccggggacgcgccaagagaagcggatctggcgtgaagcagaccctgaatttcgacctgctgaagctggctggcgacgtggaatccaacccaggccctactagtatggactggatttggcgcatccttttccttgtcggcgctgctaccggcgcgcattccttcgaagtgcagctggttgagtacggtggcggactggttcaacctggcggtagcctgagactgtcttgtgccgccagcggcttcaacatcaaggactactatatccactgggtccgacaggccccaggcaaaggacttgaatgggttgcctggatcgaccccgagaacggcgataccgagttcgtgcccaagtttcagggcagagccaccatgagcgccgacacctctaagaacacagcctacctccagatgaacagcctgagagccgaggacaccgccgtgtactactgtaaaaccggcggcttttggggccagggcacactggtcacagtcagctctacgcgtgcctctacaaagggaccctccgtgtttcctctggctcccagcagcaagtctacaagcggaggaacagccgctctgggctgcctggtcaaggattactttcccgagcctgtgaccgtgtcctggaatagcggagcactgacaagcggcgtgcacacctttccagccgtgctgcaaagcagcggcctgtactctctgagcagcgtggtcacagtgcctagctctagcctgggcacccagacctacatctgcaatgtgaaccacaagcctagcaacaccaaggtggacaagagagtggaacccaagagctgtgaagtgaaaaccgactccaccgaccacgtgaagcccaaagagacagagaacaccaagcagcccagcaagagctgccacaagcccaaggccatcgtgcacaccgagaaagtgaacatgatgagcctgaccgtgatcggcttcagaatcctgctgctgaaagtggccggctttaacctgctgatgaccctgcggctgtggtccagctaa

SEQ ID NO: 40257 - DNA, 1935 bp, synthetic construct
  source 1..1935: mol_type = other DNA
atggccttaccagtgaccgccttgctcctgccgctggccttgctgctccacgccgccaggccggacatccagatgacacagagccctagcagcctgtctgccagcgtgggagacagagtgaccatcacatgcaaggccagccaggatgtgggcacagccgtggattggtatcagcagaagcctggcaaggcccctaagctgctgatctactgggccagcacaagacacacaggcgtgcccagcagattttctggcagcggctctggcaccgacttcaccctgacaatatccagcctccagcctgaggacttcgccacctactactgccagcagtacaacagctaccctctgaccttcggccagggcaccaaggtggaaatcaaaagactcgaggagggacagcctaaggccaatcctaccgtgacactgttccctccaagcagcgaagaactccaggccaacaaggccacacttgtgtgcctgatctccgacttctaccctggggctgtgacagtggcttggaaggccgatggatctcctgtgaaagccggcgtggaaaccaccaagccatccaagcagagcaacaacaaatacgccgccagctcctacctgagcctgacacctgagcagtggaagtcccacagatcctacagctgccaagtgacccacgaaggcagcaccgtggaaaagacagtggcccctacagagtgcagccccatcaagaccgatgtgattacaatggaccccaaggacaactgctccaaggacgccaacgataccctgctgctccagctgaccaacaccagcgcctactacatgtacgagatcctgctgggcaaggccaccctgtacgccgtgctggtgtctgccctggtgctgatggctatggtcaagcggaaggacagccggggacgcgccaagagaagcggatctggcgtgaagcagaccctgaatttcgacctgctgaagctggctggcgacgtggaatccaacccaggccctactagtatggactggatttggcgcatccttttccttgtcggcgctgctaccggcgcgcattccttcgaagtgcagctggttgaatcaggtggcggcctggttcaacctggcggatctctgagactgagctgtgccgccagcggctacacctttaccgagtacacaatccactgggtccgacaggcccctggcaaaggacttgagtgggtcgccaacatcaaccccaacaatggcggcaccacctacaaccagaagttcgaggacagattcaccatcagccgggacaacagcaagaacaccctgtacctccagatgaactccctgagagccgaggacaccgccgtgtactattgtgccagaggctggaacttcgactactggggccagggaacactggtcaccgttagctctacgcgtgcctctacaaagggaccctccgtgtttcctctggctcccagcagcaagtctacaagcggaggaacagccgctctgggctgcctggtcaaggattactttcccgagcctgtgaccgtgtcctggaatagcggagcactgacaagcggcgtgcacacctttccagccgtgctgcaaagcagcggcctgtactctctgagcagcgtggtcacagtgcctagctctagcctgggcacccagacctacatctgcaatgtgaaccacaagcctagcaacaccaaggtggacaagagagtggaacccaagagctgtgaagtgaaaaccgactccaccgaccacgtgaagcccaaagagacagagaacaccaagcagcccagcaagagctgccacaagcccaaggccatcgtgcacaccgagaaagtgaacatgatgagcctgaccgtgatcggcttcagaatcctgctgctgaaagtggccggctttaacctgctgatgaccctgcggctgtggtccagctaa

SEQ ID NO: 40258 - DNA, 1931 bp, synthetic construct
  source 1..1931: mol_type = other DNA
atggccttaccagtgaccgccttgctcctgccgctggccttgctgctccacgccgccaggccgagctacgtgctgacacagcctccatccgtgtctgtggctccaggacagaccgccagaatcacatgcggcggcaacaacatcggcggcaagagcgtgcactggtatcagcagccacctggacaggctccagtggtggtggtgtacgacgacagcgatagacctagcggcatccccgagagattcagcggcagcaattccggcaataccgccacactgaccatcagcagagtggaagctggcgacgaggccgtgtactactgccaagtgtgggacagcagcagcgatcacgtggtgtttggcggcggaacaaagctgacagtgcttctcgaggagggacagcctaaggccaatcctaccgtgacactgttccctccaagcagcgaagaactccaggccaacaaggccacacttgtgtgcctgatctccgacttctaccctggggctgtgacagtggcttggaaggccgatggatctcctgtgaaagccggcgtggaaaccaccaagccatccaagcagagcaacaacaaatacgccgccagctcctacctgagcctgacacctgagcagtggaagtcccacagatcctacagctgccaagtgacccacgaaggcagcaccgtggaaaagacagtggcccctacagagtgcagccccatcaagaccgatgtgattacaatggaccccaaggacaactgctccaaggacgccaacgataccctgctgctccagctgaccaacaccagcgcctactacatgtacgagatcctgctgggcaaggccaccctgtacgccgtgctggtgtctgccctggtgctgatggctatggtcaagcggaaggacagccggggacgcgccaagagaagcggatctggcgtgaagcagaccctgaatttcgacctgctgaagctggctggcgacgtggaatccaacccaggccctactagtatggactggatttggcgcatccttttccttgtcggcgctgctaccggcgcgcattccttcgaacaactccagctgcaagagtctggccctggcctggtcaagcctagcgaaacactgagcctgacctgtaccgtgtctggcggctctatcagctccagcagctatttctggggctggatcagacaacctcctggcaaaggactggaatggatcggctccatctactacagcggcatcacctactacaaccccagcctgaagtccagagtgaccatctccgtggacaccagcaagaaccagttctccctgaagctgagcagcgtgacagccgccgataccgccgtgtattattgtgccagacatgacggcgctgtggccggcctgtttgattattggggacagggcaccctggtcaccgtgtcatctgctacgcgtgcctctacaaagggaccctccgtgtttcctctggctcccagcagcaagtctacaagcggaggaacagccgctctgggctgcctggtcaaggattactttcccgagcctgtgaccgtgtcctggaatagcggagcactgacaagcggcgtgcacacctttccagccgtgctgcaaagcagcggcctgtactctctgagcagcgtggtcacagtgcctagctctagcctgggcacccagacctacatctgcaatgtgaaccacaagcctagcaacaccaaggtggacaagagagtggaacccaagagctgtatccccgaggacacattcttcccaagccccgagagcagctgcgacgtgaagctggtggaaaagagcttcgagacagacaccaacctgaacttccagaacctgagcgtgatcggcctgcggatgctgttcgccaaaaccgtggccgtgaacttcctgctgaccgccaagctgttcttcct

SEQ ID NO: 40259 - DNA, 1928 bp, synthetic construct
  source 1..1928: mol_type = other DNA
atggccttaccagtgaccgccttgctcctgccgctggccttgctgctccacgccgccaggccggacatccagatgacacagagccctagcagcctgtctgccagcgtgggagacagagtgaccatcacatgcaaggccagcgaccacatcaacaactggctggcctggtatcagcagaagcctggacaggcccctaagctgctgatctacggcgctaccacactggaaacaggcgtgcccagcagattttctggcagcggctctggcaccgactacaccctgacaatatccagcctccagcctgaggacttcgccacctactactgtcagcagagctggaacaccccttggacattcggccagggcaccaagctggaaatcaagagactcgaggagggacagcctaaggccaatcctaccgtgacactgttccctccaagcagcgaagaactccaggccaacaaggccacacttgtgtgcctgatctccgacttctaccctggggctgtgacagtggcttggaaggccgatggatctcctgtgaaagccggcgtggaaaccaccaagccatccaagcagagcaacaacaaatacgccgccagctcctacctgagcctgacacctgagcagtggaagtcccacagatcctacagctgccaagtgacccacgaaggcagcaccgtggaaaagacagtggcccctacagagtgcagccccatcaagaccgatgtgattacaatggaccccaaggacaactgctccaaggacgccaacgataccctgctgctccagctgaccaacaccagcgcctactacatgtacgagatcctgctgggcaaggccaccctgtacgccgtgctggtgtctgccctggtgctgatggctatggtcaagcggaaggacagccggggacgcgccaagagaagcggatctggcgtgaagcagaccctgaatttcgacctgctgaagctggctggcgacgtggaatccaacccaggccctactagtatggactggatttggcgcatccttttccttgtcggcgctgctaccggcgcgcattccttcgaacaagttcagcttcaacagcctggcgctgagctggtcaaacctggcgcttctgtgaagatgagctgcaaagccagcggctacaccttcagcagctactggatcaactggatgaagcagaaacccggccagggactcgaatggatcggccaaatctatcccggcgacggcgacaccaactacaacggcaagttcaagggcagagccacactgaccgccgatacctctagcagcacagcctacatgcagctgagcagcctgaccagcgaagatagcgccgtgtacttctgtgcccggtccatcacaacagtcgtgggctgcgctatggactattggggccagggaacaagcgtgaccgtgtctagtacgcgtgcctctacaaagggaccctccgtgtttcctctggctcccagcagcaagtctacaagcggaggaacagccgctctgggctgcctggtcaaggattactttcccgagcctgtgaccgtgtcctggaatagcggagcactgacaagcggcgtgcacacctttccagccgtgctgcaaagcagcggcctgtactctctgagcagcgtggtcacagtgcctagctctagcctgggcacccagacctacatctgcaatgtgaaccacaagcctagcaacaccaaggtggacaagagagtggaacccaagagctgtatccccgaggacacattcttcccaagccccgagagcagctgcgacgtgaagctggtggaaaagagcttcgagacagacaccaacctgaacttccagaacctgagcgtgatcggcctgcggatgctgttcgccaaaaccgtggccgtgaacttcctgctgaccgccaagctgttcttcct

SEQ ID NO: 40260 - DNA, 1928 bp, synthetic construct
  source 1..1928: mol_type = other DNA
atggccttaccagtgaccgccttgctcctgccgctggccttgctgctccacgccgccaggccggacatccagatgacacagagccctagcagcctgtctgccagcgtgggagacagagtgaccatcacatgcaaggccagcgaccacatcaacaactggctggcctggtatcagcagaagcctggacaggcccctaagctgctgatctacggcgctaccacactggaaacaggcgtgcccagcagattttctggcagcggctctggcaccgactacaccctgacaatatccagcctccagcctgaggacttcgccacctactactgtcagcagagctggaacaccccttggacattcggccagggcaccaagctggaaatcaagagactcgaggagggacagcctaaggccaatcctaccgtgacactgttccctccaagcagcgaagaactccaggccaacaaggccacacttgtgtgcctgatctccgacttctaccctggggctgtgacagtggcttggaaggccgatggatctcctgtgaaagccggcgtggaaaccaccaagccatccaagcagagcaacaacaaatacgccgccagctcctacctgagcctgacacctgagcagtggaagtcccacagatcctacagctgccaagtgacccacgaaggcagcaccgtggaaaagacagtggcccctacagagtgcagccccatcaagaccgatgtgattacaatggaccccaaggacaactgctccaaggacgccaacgataccctgctgctccagctgaccaacaccagcgcctactacatgtacgagatcctgctgggcaaggccaccctgtacgccgtgctggtgtctgccctggtgctgatggctatggtcaagcggaaggacagccggggacgcgccaagagaagcggatctggcgtgaagcagaccctgaatttcgacctgctgaagctggctggcgacgtggaatccaacccaggccctactagtatggactggatttggcgcatccttttccttgtcggcgctgctaccggcgcgcattccttcgaacaagttcagcttcaacagcctggcgctgagctggtcaaacctggcgcttctgtgaagatgagctgcaaagccagcggctacgccttcagcagctcttggatcaactggatgaagcagaaacccggccagggactcgaatggatcggccaaatctatcccggcgacggcgacaccaactacaacggcaagttcaagggcagagccacactgaccgccgatacctctagcagcacagcctacatgcagctgagcagcctgaccagcgaagatagcgccgtgtacttctgtgcccggtccatcacaacagtcgtgggctgcgctatggactattggggccagggaacaagcgtgaccgtgtctagtacgcgtgcctctacaaagggaccctccgtgtttcctctggctcccagcagcaagtctacaagcggaggaacagccgctctgggctgcctggtcaaggattactttcccgagcctgtgaccgtgtcctggaatagcggagcactgacaagcggcgtgcacacctttccagccgtgctgcaaagcagcggcctgtactctctgagcagcgtggtcacagtgcctagctctagcctgggcacccagacctacatctgcaatgtgaaccacaagcctagcaacaccaaggtggacaagagagtggaacccaagagctgtatccccgaggacacattcttcccaagccccgagagcagctgcgacgtgaagctggtggaaaagagcttcgagacagacaccaacctgaacttccagaacctgagcgtgatcggcctgcggatgctgttcgccaaaaccgtggccgtgaacttcctgctgaccgccaagctgttcttcct

SEQ ID NO: 40261 - DNA, 1928 bp, synthetic construct
  source 1..1928: mol_type = other DNA
atggccttaccagtgaccgccttgctcctgccgctggccttgctgctccacgccgccaggccggagatcgtgctgacacagagccctgccaccctgtctctgagccctggcgaaagagccaccctgagctgtagagccagccagagcgtgtccagctacctggcctggtatcagcagaagcccggccaggctccccggctgctgatctacgatgccagcaatagagccaccggcatccccgccagattttccggctctggcagcggcaccgacttcaccctgaccatcagctccctggaacccgaggacttcgccgtgtactactgccagcagcggagcaactggcccatcacattcggccagggcacccggctggaaatcaaactcgaggagggacagcctaaggccaatcctaccgtgacactgttccctccaagcagcgaagaactccaggccaacaaggccacacttgtgtgcctgatctccgacttctaccctggggctgtgacagtggcttggaaggccgatggatctcctgtgaaagccggcgtggaaaccaccaagccatccaagcagagcaacaacaaatacgccgccagctcctacctgagcctgacacctgagcagtggaagtcccacagatcctacagctgccaagtgacccacgaaggcagcaccgtggaaaagacagtggcccctacagagtgcagccccatcaagaccgatgtgattacaatggaccccaaggacaactgctccaaggacgccaacgataccctgctgctccagctgaccaacaccagcgcctactacatgtacgagatcctgctgggcaaggccaccctgtacgccgtgctggtgtctgccctggtgctgatggctatggtcaagcggaaggacagccggggacgcgccaagagaagcggatctggcgtgaagcagaccctgaatttcgacctgctgaagctggctggcgacgtggaatccaacccaggccctactagtatggactggatttggcgcatccttttccttgtcggcgctgctaccggcgcgcattccttcgaagaagtgcagctggtggaatcaggcggcggactggtgcagcctggcagaagcctgagactgagctgtgccgccagcggcttcaccttcaacgactacgccatgcactgggtgcgccaggcccctggaaaaggactggaatgggtgtccacaatcagctggaacagcggcagcatcggctacgccgatagcgtgaagggccggttcaccatcagccgggacaacgccaagaagtccctgtacctccagatgaacagcctgcgggccgaggacacagccctgtactattgcgccaaggacatccagtacggcaactactactacggcatggacgtgtggggccagggaaccaccgtgaccgtgtcatctacgcgtgcctctacaaagggaccctccgtgtttcctctggctcccagcagcaagtctacaagcggaggaacagccgctctgggctgcctggtcaaggattactttcccgagcctgtgaccgtgtcctggaatagcggagcactgacaagcggcgtgcacacctttccagccgtgctgcaaagcagcggcctgtactctctgagcagcgtggtcacagtgcctagctctagcctgggcacccagacctacatctgcaatgtgaaccacaagcctagcaacaccaaggtggacaagagagtggaacccaagagctgtatccccgaggacacattcttcccaagccccgagagcagctgcgacgtgaagctggtggaaaagagcttcgagacagacaccaacctgaacttccagaacctgagcgtgatcggcctgcggatgctgttcgccaaaaccgtggccgtgaacttcctgctgaccgccaagctgttcttcct

SEQ ID NO: 40262 - DNA, 1937 bp, synthetic construct
  source 1..1937: mol_type = other DNA
atggccttaccagtgaccgccttgctcctgccgctggccttgctgctccacgccgccaggccgatccagatgacccagagccccagcagcctgtctgccagcgtgggcgacagagtgaccatcacctgtcggagcagccagagcatcgtgcactccgtgggcaacaccttcctggaatggtatcagcagaagcccggcaaggcccccaagctgctgatctacaaggtgtccaacagattcagcggcgtgcccagcaggtttagcggctctggcagcggcaccgacttcaccctgaccatctctagcctccagcccgaggacttcgccacctactactgttttcaaggcagccagttcccctacaccttcggccagggaacaaaggtggaaatcaagcggctcgaggagggacagcctaaggccaatcctaccgtgacactgttccctccaagcagcgaagaactccaggccaacaaggccacacttgtgtgcctgatctccgacttctaccctggggctgtgacagtggcttggaaggccgatggatctcctgtgaaagccggcgtggaaaccaccaagccatccaagcagagcaacaacaaatacgccgccagctcctacctgagcctgacacctgagcagtggaagtcccacagatcctacagctgccaagtgacccacgaaggcagcaccgtggaaaagacagtggcccctacagagtgcagccccatcaagaccgatgtgattacaatggaccccaaggacaactgctccaaggacgccaacgataccctgctgctccagctgaccaacaccagcgcctactacatgtacgagatcctgctgggcaaggccaccctgtacgccgtgctggtgtctgccctggtgctgatggctatggtcaagcggaaggacagccggggacgcgccaagagaagcggatctggcgtgaagcagaccctgaatttcgacctgctgaagctggctggcgacgtggaatccaacccaggccctactagtatggactggatttggcgcatccttttccttgtcggcgctgctaccggcgcgcattccttcgaagaagtgcaactggtggaaagcggaggcggcctggtgcagcctggcggatctctgagactgagctgtgccgccagcggctacgagttcagccggtcctggatgaactgggtgcgccaggcccctggcaagggactggaatgggtgggaagaatctaccccggcgacggcgacaccaactacagcggcaagttcaagggccggttcaccatcagcgccgacaccagcaagaacaccgcctacctccagatgaacagcctgcgggccgaggataccgccgtgtactactgtgccagagatggcagctcctgggactggtacttcgacgtgtggggacagggaacccttgtgaccgtgtccagcacgcgtgcctctacaaagggaccctccgtgtttcctctggctcccagcagcaagtctacaagcggaggaacagccgctctgggctgcctggtcaaggattactttcccgagcctgtgaccgtgtcctggaatagcggagcactgacaagcggcgtgcacacctttccagccgtgctgcaaagcagcggcctgtactctctgagcagcgtggtcacagtgcctagctctagcctgggcacccagacctacatctgcaatgtgaaccacaagcctagcaacaccaaggtggacaagagagtggaacccaagagctgtatccccgaggacacattcttcccaagccccgagagcagctgcgacgtgaagctggtggaaaagagcttcgagacagacaccaacctgaacttccagaacctgagcgtgatcggcctgcggatgctgttcgccaaaaccgtggccgtgaacttcctgctgaccgccaagctgttcttcct

SEQ ID NO: 40263 - DNA, 1949 bp, synthetic construct
  source 1..1949: mol_type = other DNA
atggccttaccagtgaccgccttgctcctgccgctggccttgctgctccacgccgccaggccggaactgcaaagcgtgctgacacagcctcctagcgcctctggaacacctggacagagagtgacaatcagctgctccggcagctccagcaacatcggcagcaactacgtgaactggtatcagcagctgcctggcacagcccctaaactgctgatctacggcgactaccagaggccaagcggcgtgccagatagattcagcggcagcaagtctggcacaagcgccagcctggctatctctggactgagaagcgaggacgaggccgactactactgtgccaccagagatgatagcctgagcggcagcgtggtgtttggcacaggcacaaagctgacagtgctgggcctcgaggagggacagcctaaggccaatcctaccgtgacactgttccctccaagcagcgaagaactccaggccaacaaggccacacttgtgtgcctgatctccgacttctaccctggggctgtgacagtggcttggaaggccgatggatctcctgtgaaagccggcgtggaaaccaccaagccatccaagcagagcaacaacaaatacgccgccagctcctacctgagcctgacacctgagcagtggaagtcccacagatcctacagctgccaagtgacccacgaaggcagcaccgtggaaaagacagtggcccctacagagtgcagccccatcaagaccgatgtgattacaatggaccccaaggacaactgctccaaggacgccaacgataccctgctgctccagctgaccaacaccagcgcctactacatgtacgagatcctgctgggcaaggccaccctgtacgccgtgctggtgtctgccctggtgctgatggctatggtcaagcggaaggacagccggggacgcgccaagagaagcggatctggcgtgaagcagaccctgaatttcgacctgctgaagctggctggcgacgtggaatccaacccaggccctactagtatggactggatttggcgcatccttttccttgtcggcgctgctaccggcgcgcattccttcgaagaagttcagctggttcagagcggagccgaagtgaagaagcctggcgagagcctgaagattagctgcaaaggcagcggctacggcttcaccagctattggatcggctgggtccgacagatgcctggcaaaggactggaatggatgggcatcattcaccccgacgacagcgacaccaagtacagccctagcttccagggccaagtgaccatcagcgccgacaagagcatcagcacagcctacctccagtggtcctctctgaaggccagcgataccgccatgtactactgcgccagcagctacctgagaggactgtggggcggctacttcgatttttggggccagggcacactggtcaccgttagttctacgcgtgcctctacaaagggaccctccgtgtttcctctggctcccagcagcaagtctacaagcggaggaacagccgctctgggctgcctggtcaaggattactttcccgagcctgtgaccgtgtcctggaatagcggagcactgacaagcggcgtgcacacctttccagccgtgctgcaaagcagcggcctgtactctctgagcagcgtggtcacagtgcctagctctagcctgggcacccagacctacatctgcaatgtgaaccacaagcctagcaacaccaaggtggacaagagagtggaacccaagagctgtatccccgaggacacattcttcccaagccccgagagcagctgcgacgtgaagctggtggaaaagagcttcgagacagacaccaacctgaacttccagaacctgagcgtgatcggcctgcggatgctgttcgccaaaaccgtggccgtgaacttcctgctgaccgccaagctgttcttcct

SEQ ID NO: 40264 - DNA, 1940 bp, synthetic construct
  source 1..1940: mol_type = other DNA
atggccttaccagtgaccgccttgctcctgccgctggccttgctgctccacgccgccaggccggacttcgtgatgacacagagccctgatagcctggccgtgtctctcggcgagcgagtgaccatgagctgcaagtctagccagagcctgctgaacagcggcaaccagaagaactacctgacctggtatcagcagaagcccggccagcctcctaagctgctgatctactgggccagcaccagagaaagcggcgtgcccgatagattttctggctctggcagcggcaccgacttcaccctgacaatttctagcctgcaagccgaggacgtggccgtgtactactgccagaacgactacagctacccctacaccttcggccagggcaccaagctggaaatcaaactcgaggagggacagcctaaggccaatcctaccgtgacactgttccctccaagcagcgaagaactccaggccaacaaggccacacttgtgtgcctgatctccgacttctaccctggggctgtgacagtggcttggaaggccgatggatctcctgtgaaagccggcgtggaaaccaccaagccatccaagcagagcaacaacaaatacgccgccagctcctacctgagcctgacacctgagcagtggaagtcccacagatcctacagctgccaagtgacccacgaaggcagcaccgtggaaaagacagtggcccctacagagtgcagccccatcaagaccgatgtgattacaatggaccccaaggacaactgctccaaggacgccaacgataccctgctgctccagctgaccaacaccagcgcctactacatgtacgagatcctgctgggcaaggccaccctgtacgccgtgctggtgtctgccctggtgctgatggctatggtcaagcggaaggacagccggggacgcgccaagagaagcggatctggcgtgaagcagaccctgaatttcgacctgctgaagctggctggcgacgtggaatccaacccaggccctactagtatggactggatttggcgcatccttttccttgtcggcgctgctaccggcgcgcattccttcgaagaagtgcaactggttcagagcggagccgagctgaagaaacctggggccagcgtgaaggtgtcctgtaaagccagcggctacacctttaccgactactacatgaaatgggtccgacaggccccaggccagggactcgaatggatcggcgatattatccccagcaacggggccaccttctacaaccagaaattcaagggccgcgtgaccatcaccgtggacaagagcacaagcaccgcctacatggaactgagcagcctgagaagcgaggacaccgccgtgtattattgcgccagaagccatctgctgcgggccagttggttcgcctattggggacagggaaccctggtcaccgttagctctacgcgtgcctctacaaagggaccctccgtgtttcctctggctcccagcagcaagtctacaagcggaggaacagccgctctgggctgcctggtcaaggattactttcccgagcctgtgaccgtgtcctggaatagcggagcactgacaagcggcgtgcacacctttccagccgtgctgcaaagcagcggcctgtactctctgagcagcgtggtcacagtgcctagctctagcctgggcacccagacctacatctgcaatgtgaaccacaagcctagcaacaccaaggtggacaagagagtggaacccaagagctgtatccccgaggacacattcttcccaagccccgagagcagctgcgacgtgaagctggtggaaaagagcttcgagacagacaccaacctgaacttccagaacctgagcgtgatcggcctgcggatgctgttcgccaaaaccgtggccgtgaacttcctgctgaccgccaagctgttcttcct

SEQ ID NO: 40265 - DNA, 1946 bp, synthetic construct
  source 1..1946: mol_type = other DNA
atggccttaccagtgaccgccttgctcctgccgctggccttgctgctccacgccgccaggccggagatcgtgctgacacagtctcccgccacactgtcactgtctccaggcgaaagagccacactgagctgtagcgtgtccagcagcatcagcagcagcaacctgcactggtatcagcagaagcctggacaggcccctcggctgctgatctacgccacatctaatctggcctctggcatccccgccagattttctggctctggaagcggcaccgacttcaccctgaccataagcagcctggaacctgaggacttcgccgtgtactactgccagcagtggtccagctatccccacacatttggcggaggcaccaaggtggaaatcaagagactcgaggagggacagcctaaggccaatcctaccgtgacactgttccctccaagcagcgaagaactccaggccaacaaggccacacttgtgtgcctgatctccgacttctaccctggggctgtgacagtggcttggaaggccgatggatctcctgtgaaagccggcgtggaaaccaccaagccatccaagcagagcaacaacaaatacgccgccagctcctacctgagcctgacacctgagcagtggaagtcccacagatcctacagctgccaagtgacccacgaaggcagcaccgtggaaaagacagtggcccctacagagtgcagccccatcaagaccgatgtgattacaatggaccccaaggacaactgctccaaggacgccaacgataccctgctgctccagctgaccaacaccagcgcctactacatgtacgagatcctgctgggcaaggccaccctgtacgccgtgctggtgtctgccctggtgctgatggctatggtcaagcggaaggacagccggggacgcgccaagagaagcggatctggcgtgaagcagaccctgaatttcgacctgctgaagctggctggcgacgtggaatccaacccaggccctactagtatggactggatttggcgcatccttttccttgtcggcgctgctaccggcgcgcattccttcgaacaggttcagctggttcagagcggagccgaagtgaagaaacctggggcctctgtgaaggtgtcctgcaaggcttccggctacacctttaccaactacctgatcgagtgggtccgacaggctccaggacaaggactggaatggatgggcctgattaaccctggcagcggcggcaccaactacaacgagaagttcaagggcagagtgaccatgaccaccgacaccagcacaagcaccgcctacatggaactgcggagcctgagaagcgacgacaccgccgtgtattattgcgccagaagaagccctctcggctcttggatctactacgcctatgacggcgtggcctattggggccagggaacactggttacagtgtcctctacgcgtgcctctacaaagggaccctccgtgtttcctctggctcccagcagcaagtctacaagcggaggaacagccgctctgggctgcctggtcaaggattactttcccgagcctgtgaccgtgtcctggaatagcggagcactgacaagcggcgtgcacacctttccagccgtgctgcaaagcagcggcctgtactctctgagcagcgtggtcacagtgcctagctctagcctgggcacccagacctacatctgcaatgtgaaccacaagcctagcaacaccaaggtggacaagagagtggaacccaagagctgtatccccgaggacacattcttcccaagccccgagagcagctgcgacgtgaagctggtggaaaagagcttcgagacagacaccaacctgaacttccagaacctgagcgtgatcggcctgcggatgctgttcgccaaaaccgtggccgtgaacttcctgctgaccgccaagctgttcttcct

SEQ ID NO: 40266 - DNA, 1913 bp, synthetic construct
  source 1..1913: mol_type = other DNA
atggccttaccagtgaccgccttgctcctgccgctggccttgctgctccacgccgccaggccgcagatcgtgctgacacagagccccgccatcatgtctgttagccctggcgagaaagtgaccatgacctgtagcgccagcagcagcgtgaactacatgcactggttccagcagaagcccggcacaagccctaagctgtgggtgtacagcaccagcaatctggcctctggcgtgccagccagattttctggctctggcagcggcaccagctacagcctgacaatcagcagcatggaagccgaggatgccgccacctactattgtcagcagcggagcatctacccaccttggacatttggcggaggcaccaagctggaaatcaaactcgaggagggacagcctaaggccaatcctaccgtgacactgttccctccaagcagcgaagaactccaggccaacaaggccacacttgtgtgcctgatctccgacttctaccctggggctgtgacagtggcttggaaggccgatggatctcctgtgaaagccggcgtggaaaccaccaagccatccaagcagagcaacaacaaatacgccgccagctcctacctgagcctgacacctgagcagtggaagtcccacagatcctacagctgccaagtgacccacgaaggcagcaccgtggaaaagacagtggcccctacagagtgcagccccatcaagaccgatgtgattacaatggaccccaaggacaactgctccaaggacgccaacgataccctgctgctccagctgaccaacaccagcgcctactacatgtacgagatcctgctgggcaaggccaccctgtacgccgtgctggtgtctgccctggtgctgatggctatggtcaagcggaaggacagccggggacgcgccaagagaagcggatctggcgtgaagcagaccctgaatttcgacctgctgaagctggctggcgacgtggaatccaacccaggccctactagtatggactggatttggcgcatccttttccttgtcggcgctgctaccggcgcgcattccttcgaagaagttcagctccagcagagcggccctgagcttgtgaaacctggcgcttccgtgaagatcagctgcaaggccagcggctacagcttcaccggctacaccatgaactgggtcaagcagtcccacggcaagaacctggaatggatcggcctgattaacccctacaacggcggcacctcctacaaccagaagttcaaggccaaggccacactgaccgtggacaagagcagcagcacagcctacatgcagctgaagtccctgaccagcgaggacagcgccgtgtactactgcgccagagattacggctacgtgctggactattggggccagggcacaagcgtgacagtgtctagtacgcgtgcctctacaaagggaccctccgtgtttcctctggctcccagcagcaagtctacaagcggaggaacagccgctctgggctgcctggtcaaggattactttcccgagcctgtgaccgtgtcctggaatagcggagcactgacaagcggcgtgcacacctttccagccgtgctgcaaagcagcggcctgtactctctgagcagcgtggtcacagtgcctagctctagcctgggcacccagacctacatctgcaatgtgaaccacaagcctagcaacaccaaggtggacaagagagtggaacccaagagctgtatccccgaggacacattcttcccaagccccgagagcagctgcgacgtgaagctggtggaaaagagcttcgagacagacaccaacctgaacttccagaacctgagcgtgatcggcctgcggatgctgttcgccaaaaccgtggccgtgaacttcctgctgaccgccaagctgttcttcct

SEQ ID NO: 40267 - DNA, 1919 bp, synthetic construct
  source 1..1919: mol_type = other DNA
atggccttaccagtgaccgccttgctcctgccgctggccttgctgctccacgccgccaggccggacatcgtgatgacccagagccctgccaccctgtccgtgtctccaggcgaaagagccaccctgagctgcagagcttcccagagcgtgtccaacgacgtcgtgtggtatcagcagaagcccggccaggcccccagactgctgatctactacgccagcaacagatacaccggcatccccgccagattcagcggctctggcagcggcaccgagttcaccctgacaatcagcagcctccagagcgaggacttcgccgtgtactactgtcagcaggactacaccagcccctggaccttcggccagggcaccaagctggaaatcaagagactcgaggagggacagcctaaggccaatcctaccgtgacactgttccctccaagcagcgaagaactccaggccaacaaggccacacttgtgtgcctgatctccgacttctaccctggggctgtgacagtggcttggaaggccgatggatctcctgtgaaagccggcgtggaaaccaccaagccatccaagcagagcaacaacaaatacgccgccagctcctacctgagcctgacacctgagcagtggaagtcccacagatcctacagctgccaagtgacccacgaaggcagcaccgtggaaaagacagtggcccctacagagtgcagccccatcaagaccgatgtgattacaatggaccccaaggacaactgctccaaggacgccaacgataccctgctgctccagctgaccaacaccagcgcctactacatgtacgagatcctgctgggcaaggccaccctgtacgccgtgctggtgtctgccctggtgctgatggctatggtcaagcggaaggacagccggggacgcgccaagagaagcggatctggcgtgaagcagaccctgaatttcgacctgctgaagctggctggcgacgtggaatccaacccaggccctactagtatggactggatttggcgcatccttttccttgtcggcgctgctaccggcgcgcattccttcgaagaggtgcaactggtgcagagcggagccgaagtgaagaaacctggggccagcgtgcgggtgtcctgcaaggccagcggctacacctttaccaactacggcatgaactgggtgcgccaggctcctggacagggcctggaatggatgggctggatcaacacctacaccggcgagcccacctacgccgacgacttcaagggcagagtgaccatgaccaccgacaccagcacctccaccgcctacatggaactgcggagcctgagaagcgacgacaccgccgtgtattattgcgcccggatcggcgacagcagccccagcgattattggggccagggaaccctcgtgaccgtgtcctctacgcgtgcctctacaaagggaccctccgtgtttcctctggctcccagcagcaagtctacaagcggaggaacagccgctctgggctgcctggtcaaggattactttcccgagcctgtgaccgtgtcctggaatagcggagcactgacaagcggcgtgcacacctttccagccgtgctgcaaagcagcggcctgtactctctgagcagcgtggtcacagtgcctagctctagcctgggcacccagacctacatctgcaatgtgaaccacaagcctagcaacaccaaggtggacaagagagtggaacccaagagctgtatccccgaggacacattcttcccaagccccgagagcagctgcgacgtgaagctggtggaaaagagcttcgagacagacaccaacctgaacttccagaacctgagcgtgatcggcctgcggatgctgttcgccaaaaccgtggccgtgaacttcctgctgaccgccaagctgttcttcct

SEQ ID NO: 40268 - DNA, 1925 bp, synthetic construct
  source 1..1925: mol_type = other DNA
atggccttaccagtgaccgccttgctcctgccgctggccttgctgctccacgccgccaggccggacatccagatgacacagagccctagcagcctgtctgccagcgtgggagacagagtgaccatcacctgtagagccagccaggacgtgcggaacatcgtcgtgtggttccagcagaagcctggcaaggcccctaagctgctgatctacagcggcagctacagatacagcggcgtgcccagcagattttccggctctggctctggcaccgacttcaccctgacaatatccagcctccagcctgaggacttcgccacctactactgccagcagcactacagccctccatacacattcggccagggcaccaaggtggaaatcaagagactcgaggagggacagcctaaggccaatcctaccgtgacactgttccctccaagcagcgaagaactccaggccaacaaggccacacttgtgtgcctgatctccgacttctaccctggggctgtgacagtggcttggaaggccgatggatctcctgtgaaagccggcgtggaaaccaccaagccatccaagcagagcaacaacaaatacgccgccagctcctacctgagcctgacacctgagcagtggaagtcccacagatcctacagctgccaagtgacccacgaaggcagcaccgtggaaaagacagtggcccctacagagtgcagccccatcaagaccgatgtgattacaatggaccccaaggacaactgctccaaggacgccaacgataccctgctgctccagctgaccaacaccagcgcctactacatgtacgagatcctgctgggcaaggccaccctgtacgccgtgctggtgtctgccctggtgctgatggctatggtcaagcggaaggacagccggggacgcgccaagagaagcggatctggcgtgaagcagaccctgaatttcgacctgctgaagctggctggcgacgtggaatccaacccaggccctactagtatggactggatttggcgcatccttttccttgtcggcgctgctaccggcgcgcattccttcgaagaagttcagctggtggaatctggccctggcctggtcaagcctagcgagacactgagcctgacctgtaccgtgtccggcttcagcctgaccagatttggcgtgcactgggtccgacagccacctggcaaaggactggaatggctgggagtgatttggagaggcggcagcaccgattacaacgccgccttcatgagccggctgaccatcagcaaggacaacagcaagaaccaggtgtccctgaagctgagcagcgtgacagccgctgataccgccgtgtactactgctccaaccactactacggcagctccgactacgccctggataattggggccagggaaccctggtcaccgtgtcatctacgcgtgcctctacaaagggaccctccgtgtttcctctggctcccagcagcaagtctacaagcggaggaacagccgctctgggctgcctggtcaaggattactttcccgagcctgtgaccgtgtcctggaatagcggagcactgacaagcggcgtgcacacctttccagccgtgctgcaaagcagcggcctgtactctctgagcagcgtggtcacagtgcctagctctagcctgggcacccagacctacatctgcaatgtgaaccacaagcctagcaacaccaaggtggacaagagagtggaacccaagagctgtatccccgaggacacattcttcccaagccccgagagcagctgcgacgtgaagctggtggaaaagagcttcgagacagacaccaacctgaacttccagaacctgagcgtgatcggcctgcggatgctgttcgccaaaaccgtggccgtgaacttcctgctgaccgccaagctgttcttcct

SEQ ID NO: 40269 - DNA, 1931 bp, synthetic construct
  source 1..1931: mol_type = other DNA
atggccttaccagtgaccgccttgctcctgccgctggccttgctgctccacgccgccaggccggacatcgtgctgacccagagccctctgagcctggccgtgtctctgggacagcctgccatcatcagctgtagggccagccagagcgtgtcctttgccggcacctctctgatgcactggtatcaccagaagcccggccagcagcccagactgctgatctacagagccagcaacctggaagccggcgtgcccgatagattttccggcagcggcagcaagaccgacttcaccctgaccatcagccccgtggaagccgaagatgccgccacctactactgccagcagagcagagagtacccctacaccttcggcggaggcaccaagctggaaatcaagaggctcgaggagggacagcctaaggccaatcctaccgtgacactgttccctccaagcagcgaagaactccaggccaacaaggccacacttgtgtgcctgatctccgacttctaccctggggctgtgacagtggcttggaaggccgatggatctcctgtgaaagccggcgtggaaaccaccaagccatccaagcagagcaacaacaaatacgccgccagctcctacctgagcctgacacctgagcagtggaagtcccacagatcctacagctgccaagtgacccacgaaggcagcaccgtggaaaagacagtggcccctacagagtgcagccccatcaagaccgatgtgattacaatggaccccaaggacaactgctccaaggacgccaacgataccctgctgctccagctgaccaacaccagcgcctactacatgtacgagatcctgctgggcaaggccaccctgtacgccgtgctggtgtctgccctggtgctgatggctatggtcaagcggaaggacagccggggacgcgccaagagaagcggatctggcgtgaagcagaccctgaatttcgacctgctgaagctggctggcgacgtggaatccaacccaggccctactagtatggactggatttggcgcatccttttccttgtcggcgctgctaccggcgcgcattccttcgaacaggtccaactggtgcagagcggagccgaggtcgtgaagcctggcgcttccgtgaagattagctgcaaagccagcggctacacctttaccggctactttatgcactgggtcaagcagagccctggccagagcctggaatggatcggcagaatccacccctacgacggcgacaccttctacaaccagaagttccagggcaaggccaccctgacagtggacaagagcagcaacaccgcccacatggaactgctgagcctgaccagcgaggacttcgccgtgtactactgcaccagatacgacggcagccgggctatggactattggggccagggcaccaccgtgaccgtgtctagtacgcgtgcctctacaaagggaccctccgtgtttcctctggctcccagcagcaagtctacaagcggaggaacagccgctctgggctgcctggtcaaggattactttcccgagcctgtgaccgtgtcctggaatagcggagcactgacaagcggcgtgcacacctttccagccgtgctgcaaagcagcggcctgtactctctgagcagcgtggtcacagtgcctagctctagcctgggcacccagacctacatctgcaatgtgaaccacaagcctagcaacaccaaggtggacaagagagtggaacccaagagctgtatccccgaggacacattcttcccaagccccgagagcagctgcgacgtgaagctggtggaaaagagcttcgagacagacaccaacctgaacttccagaacctgagcgtgatcggcctgcggatgctgttcgccaaaaccgtggccgtgaacttcctgctgaccgccaagctgttcttcct

SEQ ID NO: 40270 - DNA, 1913 bp, synthetic construct
  source 1..1913: mol_type = other DNA
atggccttaccagtgaccgccttgctcctgccgctggccttgctgctccacgccgccaggccggacatccagatgacacagagccctagcagcctgtctgccagcgtgggagacagagtgaccatcacatgcaaggccagccagagcgtgtccaacgacgtgacctggtatcagcagaagcctggacaggcccctaagctgctgatctacagcgccagcaacagatacagcggagtgcccgccagattttccggctctggctacggcaccgagttcacctttaccatcagcagcgtgcagagcgaggacttcgccgtgtacttctgccagcaagactacagcagcttcggccagggcaccaagctggaaatcaagagactcgaggagggacagcctaaggccaatcctaccgtgacactgttccctccaagcagcgaagaactccaggccaacaaggccacacttgtgtgcctgatctccgacttctaccctggggctgtgacagtggcttggaaggccgatggatctcctgtgaaagccggcgtggaaaccaccaagccatccaagcagagcaacaacaaatacgccgccagctcctacctgagcctgacacctgagcagtggaagtcccacagatcctacagctgccaagtgacccacgaaggcagcaccgtggaaaagacagtggcccctacagagtgcagccccatcaagaccgatgtgattacaatggaccccaaggacaactgctccaaggacgccaacgataccctgctgctccagctgaccaacaccagcgcctactacatgtacgagatcctgctgggcaaggccaccctgtacgccgtgctggtgtctgccctggtgctgatggctatggtcaagcggaaggacagccggggacgcgccaagagaagcggatctggcgtgaagcagaccctgaatttcgacctgctgaagctggctggcgacgtggaatccaacccaggccctactagtatggactggatttggcgcatccttttccttgtcggcgctgctaccggcgcgcattccttcgaacaggtgcagctggtggaatctggacctggcgtggtgcagcctggcagaagcctgagaatcagctgtgccgtgtccggcttcagcgtgaccaactacggcgtgcactgggtgcgccagccacctggaaaaggactggaatggctgggcgtgatctgggctggcggcatcaccaactacaacagcgccttcatgtcccggctgaccatctccaaggacaacagcaagaacaccgtgtacctccagatgaacagcctgcgggccgaggacaccgccatgtactactgtgcttccagaggcggccactacggctacgccctggattattggggccagggaaccctcgtgaccgtgtcctctacgcgtgcctctacaaagggaccctccgtgtttcctctggctcccagcagcaagtctacaagcggaggaacagccgctctgggctgcctggtcaaggattactttcccgagcctgtgaccgtgtcctggaatagcggagcactgacaagcggcgtgcacacctttccagccgtgctgcaaagcagcggcctgtactctctgagcagcgtggtcacagtgcctagctctagcctgggcacccagacctacatctgcaatgtgaaccacaagcctagcaacaccaaggtggacaagagagtggaacccaagagctgtatccccgaggacacattcttcccaagccccgagagcagctgcgacgtgaagctggtggaaaagagcttcgagacagacaccaacctgaacttccagaacctgagcgtgatcggcctgcggatgctgttcgccaaaaccgtggccgtgaacttcctgctgaccgccaagctgttcttcct

SEQ ID NO: 40271 - DNA, 1925 bp, synthetic construct
  source 1..1925: mol_type = other DNA
atggccttaccagtgaccgccttgctcctgccgctggccttgctgctccacgccgccaggccggagaacgtgctgacacagagccctgccatcatgagtgcctctccaggcgagaaagtgaccatgacctgtagagccagcagcagcgtgtccagcagctacctgcactggtatcagcagaagtccggcgcaagccccaaagtgtggatctacagcaccagcaatctggcctctggcgtgccaggcagattttctggctctggcagcggcacaagctacagcctgacaatcagctccgtggaagccgaagatgccgccacctactactgccagcagtacagcggctaccccatcacatttggagccggcaccaaggtggaagtgaagagactcgaggagggacagcctaaggccaatcctaccgtgacactgttccctccaagcagcgaagaactccaggccaacaaggccacacttgtgtgcctgatctccgacttctaccctggggctgtgacagtggcttggaaggccgatggatctcctgtgaaagccggcgtggaaaccaccaagccatccaagcagagcaacaacaaatacgccgccagctcctacctgagcctgacacctgagcagtggaagtcccacagatcctacagctgccaagtgacccacgaaggcagcaccgtggaaaagacagtggcccctacagagtgcagccccatcaagaccgatgtgattacaatggaccccaaggacaactgctccaaggacgccaacgataccctgctgctccagctgaccaacaccagcgcctactacatgtacgagatcctgctgggcaaggccaccctgtacgccgtgctggtgtctgccctggtgctgatggctatggtcaagcggaaggacagccggggacgcgccaagagaagcggatctggcgtgaagcagaccctgaatttcgacctgctgaagctggctggcgacgtggaatccaacccaggccctactagtatggactggatttggcgcatccttttccttgtcggcgctgctaccggcgcgcattccttcgaacaggttcagctcaaagaatctggccccgtgctggtggccccaagccagacactgtctatcacctgtaccgtgtccggcttcagcctggcctcctacaacatccactgggtccgacagcctccaggcaaaggactggaatggctgggagtgatttgggctggcggcagcaccaactacaacagcgcactgatgagccggctgagcatcagcaaggacaacagcaagagccaggtgttcctccagatgaactccctccagaccgacgacaccgccatgtactactgcgccaagagaagcgacgactacagttggttcgcctactggggccagggcacactggttactgtgtctgcttctacgcgtgcctctacaaagggaccctccgtgtttcctctggctcccagcagcaagtctacaagcggaggaacagccgctctgggctgcctggtcaaggattactttcccgagcctgtgaccgtgtcctggaatagcggagcactgacaagcggcgtgcacacctttccagccgtgctgcaaagcagcggcctgtactctctgagcagcgtggtcacagtgcctagctctagcctgggcacccagacctacatctgcaatgtgaaccacaagcctagcaacaccaaggtggacaagagagtggaacccaagagctgtatccccgaggacacattcttcccaagccccgagagcagctgcgacgtgaagctggtggaaaagagcttcgagacagacaccaacctgaacttccagaacctgagcgtgatcggcctgcggatgctgttcgccaaaaccgtggccgtgaacttcctgctgaccgccaagctgttcttcct

SEQ ID NO: 40272 - DNA, 1937 bp, synthetic construct
  source 1..1937: mol_type = other DNA
atggccttaccagtgaccgccttgctcctgccgctggccttgctgctccacgccgccaggccggagatcgtgctgacacagtctcccgccacactgtcactgtctccaggcgaaagagccacactgagctgtagagccagccagagcgtgtcctcttacctggcctggtatcagcagaagcctggacaggctccccggctgctgatctacgatgccagcaatagagccacaggcatccccgccagattttctggctctggcagcggcaccgatttcaccctgaccataagcagcctggaacctgaggacttcgccgtgtactactgccagcagagaagcaactggcctcctacattcggccagggcaccaaggtggaaatcaaactcgaggagggacagcctaaggccaatcctaccgtgacactgttccctccaagcagcgaagaactccaggccaacaaggccacacttgtgtgcctgatctccgacttctaccctggggctgtgacagtggcttggaaggccgatggatctcctgtgaaagccggcgtggaaaccaccaagccatccaagcagagcaacaacaaatacgccgccagctcctacctgagcctgacacctgagcagtggaagtcccacagatcctacagctgccaagtgacccacgaaggcagcaccgtggaaaagacagtggcccctacagagtgcagccccatcaagaccgatgtgattacaatggaccccaaggacaactgctccaaggacgccaacgataccctgctgctccagctgaccaacaccagcgcctactacatgtacgagatcctgctgggcaaggccaccctgtacgccgtgctggtgtctgccctggtgctgatggctatggtcaagcggaaggacagccggggacgcgccaagagaagcggatctggcgtgaagcagaccctgaatttcgacctgctgaagctggctggcgacgtggaatccaacccaggccctactagtatggactggatttggcgcatccttttccttgtcggcgctgctaccggcgcgcattccttcgaacaactccagctgcaagagtctggccccggactggtcaagcctagcgaaacactgagcctgacctgtaccgtgtctggcggcagcatcagcagcagctcttattggtggggctggaccagacagcctcctggcagaggactggaatggatcggcaccatgtactacagcggcaacatctactacaaccccagcctccagagccgggccaccatctctgtggacaccagcaagaaccagttcagcctgaagctgagcagcgtgacagccgccgataccgccgtgtattattgcgccagacatgtgggctacagctacggcagacggttctggtacttcgacctgtggggcagaggcaccctggtcacagtttcttctacgcgtgcctctacaaagggaccctccgtgtttcctctggctcccagcagcaagtctacaagcggaggaacagccgctctgggctgcctggtcaaggattactttcccgagcctgtgaccgtgtcctggaatagcggagcactgacaagcggcgtgcacacctttccagccgtgctgcaaagcagcggcctgtactctctgagcagcgtggtcacagtgcctagctctagcctgggcacccagacctacatctgcaatgtgaaccacaagcctagcaacaccaaggtggacaagagagtggaacccaagagctgtatccccgaggacacattcttcccaagccccgagagcagctgcgacgtgaagctggtggaaaagagcttcgagacagacaccaacctgaacttccagaacctgagcgtgatcggcctgcggatgctgttcgccaaaaccgtggccgtgaacttcctgctgaccgccaagctgttcttcct

SEQ ID NO: 40273 - DNA, 1928 bp, synthetic construct
  source 1..1928: mol_type = other DNA
atggccttaccagtgaccgccttgctcctgccgctggccttgctgctccacgccgccaggccggacatccagatgacacagagccctagcagcctgtctgccagcgtgggagacagagtgaccatcacatgcaaggccagcgaccacatcaacaactggctggcctggtatcagcagaagcctggcaaggcccctaagctgctgatctacggcgctaccacactggaaacaggcgtgcccagcagattttctggcagcggctctggcaccgacttcaccctgacaatatccagcctccagcctgaggacttcgccacctactactgtcagcagagctggaacaccccttggacattcggccagggcaccaaggtggaaatcaagagactcgaggagggacagcctaaggccaatcctaccgtgacactgttccctccaagcagcgaagaactccaggccaacaaggccacacttgtgtgcctgatctccgacttctaccctggggctgtgacagtggcttggaaggccgatggatctcctgtgaaagccggcgtggaaaccaccaagccatccaagcagagcaacaacaaatacgccgccagctcctacctgagcctgacacctgagcagtggaagtcccacagatcctacagctgccaagtgacccacgaaggcagcaccgtggaaaagacagtggcccctacagagtgcagccccatcaagaccgatgtgattacaatggaccccaaggacaactgctccaaggacgccaacgataccctgctgctccagctgaccaacaccagcgcctactacatgtacgagatcctgctgggcaaggccaccctgtacgccgtgctggtgtctgccctggtgctgatggctatggtcaagcggaaggacagccggggacgcgccaagagaagcggatctggcgtgaagcagaccctgaatttcgacctgctgaagctggctggcgacgtggaatccaacccaggccctactagtatggactggatttggcgcatccttttccttgtcggcgctgctaccggcgcgcattccttcgaagaagttcagctggttgaatctggcggcggactggttcaacctggcggatctctgagactgagctgtgccgcctctggctacacctttagcagctactgggtcaactgggttcgacaggcccctggcaaaggactggaatgggtcgcccaaatctatcccggcgacggcgacaccaactacaacggcaagttcaagggcagattcaccatcagccgggacaacagcaagaacaccctgtacctccagatgaactccctgagagccgaggacaccgccgtgtactattgtgccagatccatcaccaccgtcgtgggctgcgctatggattattggggccagggaaccctggtcaccgtgtcctctacgcgtgcctctacaaagggaccctccgtgtttcctctggctcccagcagcaagtctacaagcggaggaacagccgctctgggctgcctggtcaaggattactttcccgagcctgtgaccgtgtcctggaatagcggagcactgacaagcggcgtgcacacctttccagccgtgctgcaaagcagcggcctgtactctctgagcagcgtggtcacagtgcctagctctagcctgggcacccagacctacatctgcaatgtgaaccacaagcctagcaacaccaaggtggacaagagagtggaacccaagagctgtatccccgaggacacattcttcccaagccccgagagcagctgcgacgtgaagctggtggaaaagagcttcgagacagacaccaacctgaacttccagaacctgagcgtgatcggcctgcggatgctgttcgccaaaaccgtggccgtgaacttcctgctgaccgccaagctgttcttcct

SEQ ID NO: 40274 - DNA, 1928 bp, synthetic construct
  source 1..1928: mol_type = other DNA
atggccttaccagtgaccgccttgctcctgccgctggccttgctgctccacgccgccaggccggacatccagatgacacagagccctagcagcctgtctgccagcgtgggagacagagtgaccatcacatgcaaggccagcgaccacatcaacaactggctggcctggtatcagcagaagcctggcaaggcccctaagctgctgatctacggcgctaccacactggaaacaggcgtgcccagcagattttctggcagcggctctggcaccgacttcaccctgacaatatccagcctccagcctgaggacttcgccacctactactgtcagcagagctggaacaccccttggacattcggccagggcaccaaggtggaaatcaagagactcgaggagggacagcctaaggccaatcctaccgtgacactgttccctccaagcagcgaagaactccaggccaacaaggccacacttgtgtgcctgatctccgacttctaccctggggctgtgacagtggcttggaaggccgatggatctcctgtgaaagccggcgtggaaaccaccaagccatccaagcagagcaacaacaaatacgccgccagctcctacctgagcctgacacctgagcagtggaagtcccacagatcctacagctgccaagtgacccacgaaggcagcaccgtggaaaagacagtggcccctacagagtgcagccccatcaagaccgatgtgattacaatggaccccaaggacaactgctccaaggacgccaacgataccctgctgctccagctgaccaacaccagcgcctactacatgtacgagatcctgctgggcaaggccaccctgtacgccgtgctggtgtctgccctggtgctgatggctatggtcaagcggaaggacagccggggacgcgccaagagaagcggatctggcgtgaagcagaccctgaatttcgacctgctgaagctggctggcgacgtggaatccaacccaggccctactagtatggactggatttggcgcatccttttccttgtcggcgctgctaccggcgcgcattccttcgaagaagttcagctggttgaatctggcggcggactggttcaacctggcggatctctgagactgagctgtgccgcctctggctacgcctttagcaactactgggtcaactgggttcgacaggcccctggcaaaggactggaatgggtcgcccaaatctatcccggcgacggcgacaccaactacaacggcaagttcaagggcagattcaccatcagccgggacaacagcaagaacaccctgtacctccagatgaactccctgagagccgaggacaccgccgtgtactattgtgccagatccatcaccaccgtcgtgggctgcgctatggattattggggccagggaaccctggtcaccgtgtcctctacgcgtgcctctacaaagggaccctccgtgtttcctctggctcccagcagcaagtctacaagcggaggaacagccgctctgggctgcctggtcaaggattactttcccgagcctgtgaccgtgtcctggaatagcggagcactgacaagcggcgtgcacacctttccagccgtgctgcaaagcagcggcctgtactctctgagcagcgtggtcacagtgcctagctctagcctgggcacccagacctacatctgcaatgtgaaccacaagcctagcaacaccaaggtggacaagagagtggaacccaagagctgtatccccgaggacacattcttcccaagccccgagagcagctgcgacgtgaagctggtggaaaagagcttcgagacagacaccaacctgaacttccagaacctgagcgtgatcggcctgcggatgctgttcgccaaaaccgtggccgtgaacttcctgctgaccgccaagctgttcttcct

SEQ ID NO: 40275 - DNA, 1919 bp, synthetic construct
  source 1..1919: mol_type = other DNA
atggccttaccagtgaccgccttgctcctgccgctggccttgctgctccacgccgccaggccggacatccagatgacacagagccctagcagcctgtctgccagcgtgggagacagagtgaccatcacatgcaagagcagccagagcctgctggactccgatggcaagacctacctgaactggtatcagcagaagcccggcaaggcccctaagctgctgatctacctggtgtccaagctggatagcggcgtgcccagcagattttctggcagcggcagcggaaccgacttcaccctgacaatatccagcctccagcctgaggacttcgccacctactactgcttccaaggcacccactttccattcaccttcggccagggcaccaaggtggaaatcaaaagactcgaggagggacagcctaaggccaatcctaccgtgacactgttccctccaagcagcgaagaactccaggccaacaaggccacacttgtgtgcctgatctccgacttctaccctggggctgtgacagtggcttggaaggccgatggatctcctgtgaaagccggcgtggaaaccaccaagccatccaagcagagcaacaacaaatacgccgccagctcctacctgagcctgacacctgagcagtggaagtcccacagatcctacagctgccaagtgacccacgaaggcagcaccgtggaaaagacagtggcccctacagagtgcagccccatcaagaccgatgtgattacaatggaccccaaggacaactgctccaaggacgccaacgataccctgctgctccagctgaccaacaccagcgcctactacatgtacgagatcctgctgggcaaggccaccctgtacgccgtgctggtgtctgccctggtgctgatggctatggtcaagcggaaggacagccggggacgcgccaagagaagcggatctggcgtgaagcagaccctgaatttcgacctgctgaagctggctggcgacgtggaatccaacccaggccctactagtatggactggatttggcgcatccttttccttgtcggcgctgctaccggcgcgcattccttcgaagaagtgcagctggttgaatcaggcggaggactggttcagcctggcggatctctgagactgtcttgtgccgccagcggctacaccttcaccagctactggatgaactgggtccgacaggcccctggcaaaggactggaatgggtcggaatgatcgaccccagcgacagcgagacacactacaaccacatcttcaaggaccgcttcaccatcagcgccgacaccagcaagaataccgcctacctccagatgaactccctgagagccgaggacaccgccgtgtactactgcgccagaaacctgtatctgttcggccagggaaccctggtcacagtgtcatctacgcgtgcctctacaaagggaccctccgtgtttcctctggctcccagcagcaagtctacaagcggaggaacagccgctctgggctgcctggtcaaggattactttcccgagcctgtgaccgtgtcctggaatagcggagcactgacaagcggcgtgcacacctttccagccgtgctgcaaagcagcggcctgtactctctgagcagcgtggtcacagtgcctagctctagcctgggcacccagacctacatctgcaatgtgaaccacaagcctagcaacaccaaggtggacaagagagtggaacccaagagctgtatccccgaggacacattcttcccaagccccgagagcagctgcgacgtgaagctggtggaaaagagcttcgagacagacaccaacctgaacttccagaacctgagcgtgatcggcctgcggatgctgttcgccaaaaccgtggccgtgaacttcctgctgaccgccaagctgttcttcct

SEQ ID NO: 40276 - DNA, 1919 bp, synthetic construct
  source 1..1919: mol_type = other DNA
atggccttaccagtgaccgccttgctcctgccgctggccttgctgctccacgccgccaggccggacatccagatgacacagagccctagcagcctgtctgccagcgtgggagacagagtgaccatcacatgcaagagcagccagagcctgctggactccgatggcaagacctacctgaactggtatcagcagaagcccggcaaggcccctaagctgctgatctacctggtgtccaagctggatagcggcgtgcccagcagattttctggcagcggcagcggaaccgacttcaccctgacaatatccagcctccagcctgaggacttcgccacctactactgcttccaaggcacccactttccattcaccttcggccagggcaccaaggtggaaatcaaaagactcgaggagggacagcctaaggccaatcctaccgtgacactgttccctccaagcagcgaagaactccaggccaacaaggccacacttgtgtgcctgatctccgacttctaccctggggctgtgacagtggcttggaaggccgatggatctcctgtgaaagccggcgtggaaaccaccaagccatccaagcagagcaacaacaaatacgccgccagctcctacctgagcctgacacctgagcagtggaagtcccacagatcctacagctgccaagtgacccacgaaggcagcaccgtggaaaagacagtggcccctacagagtgcagccccatcaagaccgatgtgattacaatggaccccaaggacaactgctccaaggacgccaacgataccctgctgctccagctgaccaacaccagcgcctactacatgtacgagatcctgctgggcaaggccaccctgtacgccgtgctggtgtctgccctggtgctgatggctatggtcaagcggaaggacagccggggacgcgccaagagaagcggatctggcgtgaagcagaccctgaatttcgacctgctgaagctggctggcgacgtggaatccaacccaggccctactagtatggactggatttggcgcatccttttccttgtcggcgctgctaccggcgcgcattccttcgaagaagtgcagctggttgaatcaggcggaggactggttcagcctggcggatctctgagactgtcttgtgccgccagcggctacaccttcagcagctactggatgaactgggtccgacaggcccctggcaaaggactggaatgggtcggaatgatcgaccccagcgacagcgagacacactacaaccacatcttcaaggaccgcttcaccatcagcgccgacaccagcaagaataccgcctacctccagatgaactccctgagagccgaggacaccgccgtgtactactgcgccagaaacctgtatctgtggggccagggaaccctggtcacagtgtcatctacgcgtgcctctacaaagggaccctccgtgtttcctctggctcccagcagcaagtctacaagcggaggaacagccgctctgggctgcctggtcaaggattactttcccgagcctgtgaccgtgtcctggaatagcggagcactgacaagcggcgtgcacacctttccagccgtgctgcaaagcagcggcctgtactctctgagcagcgtggtcacagtgcctagctctagcctgggcacccagacctacatctgcaatgtgaaccacaagcctagcaacaccaaggtggacaagagagtggaacccaagagctgtatccccgaggacacattcttcccaagccccgagagcagctgcgacgtgaagctggtggaaaagagcttcgagacagacaccaacctgaacttccagaacctgagcgtgatcggcctgcggatgctgttcgccaaaaccgtggccgtgaacttcctgctgaccgccaagctgttcttcct

SEQ ID NO: 40277 - DNA, 1919 bp, synthetic construct
  source 1..1919: mol_type = other DNA
atggccttaccagtgaccgccttgctcctgccgctggccttgctgctccacgccgccaggccggacatccagatgacacagagccctagcagcctgtctgccagcgtgggagacagagtgaccatcacatgcaagagcagccagagcctgctggactccgatggcaagacctacctgaactggtatcagcagaagcccggcaaggcccctaagctgctgatctacctggtgtccaagctggatagcggcgtgcccagcagattttctggcagcggcagcggaaccgacttcaccctgacaatatccagcctccagcctgaggacttcgccacctactactgctggcaaggcacccactttccattcaccttcggccagggcaccaaggtggaaatcaaaagactcgaggagggacagcctaaggccaatcctaccgtgacactgttccctccaagcagcgaagaactccaggccaacaaggccacacttgtgtgcctgatctccgacttctaccctggggctgtgacagtggcttggaaggccgatggatctcctgtgaaagccggcgtggaaaccaccaagccatccaagcagagcaacaacaaatacgccgccagctcctacctgagcctgacacctgagcagtggaagtcccacagatcctacagctgccaagtgacccacgaaggcagcaccgtggaaaagacagtggcccctacagagtgcagccccatcaagaccgatgtgattacaatggaccccaaggacaactgctccaaggacgccaacgataccctgctgctccagctgaccaacaccagcgcctactacatgtacgagatcctgctgggcaaggccaccctgtacgccgtgctggtgtctgccctggtgctgatggctatggtcaagcggaaggacagccggggacgcgccaagagaagcggatctggcgtgaagcagaccctgaatttcgacctgctgaagctggctggcgacgtggaatccaacccaggccctactagtatggactggatttggcgcatccttttccttgtcggcgctgctaccggcgcgcattccttcgaagaagtgcagctggttgaatcaggcggaggactggttcagcctggcggatctctgagactgtcttgtgccgccagcggctacaccttcaccagctactggatgaactgggtccgacaggcccctggcaaaggactggaatgggtcggaatgatcgaccccagcgacagcgagacacactacaaccacatcttcaaggaccgcttcaccatcagcgccgacaccagcaagaataccgcctacctccagatgaactccctgagagccgaggacaccgccgtgtactactgcgccagaaacctgtatctgttcggccagggaaccctggtcacagtgtcatctacgcgtgcctctacaaagggaccctccgtgtttcctctggctcccagcagcaagtctacaagcggaggaacagccgctctgggctgcctggtcaaggattactttcccgagcctgtgaccgtgtcctggaatagcggagcactgacaagcggcgtgcacacctttccagccgtgctgcaaagcagcggcctgtactctctgagcagcgtggtcacagtgcctagctctagcctgggcacccagacctacatctgcaatgtgaaccacaagcctagcaacaccaaggtggacaagagagtggaacccaagagctgtatccccgaggacacattcttcccaagccccgagagcagctgcgacgtgaagctggtggaaaagagcttcgagacagacaccaacctgaacttccagaacctgagcgtgatcggcctgcggatgctgttcgccaaaaccgtggccgtgaacttcctgctgaccgccaagctgttcttcct

SEQ ID NO: 40278 - DNA, 1919 bp, synthetic construct
  source 1..1919: mol_type = other DNA
atggccttaccagtgaccgccttgctcctgccgctggccttgctgctccacgccgccaggccggacatccagatgacacagagccctagcagcctgtctgccagcgtgggagacagagtgaccatcacatgcaagagcagccagagcctgctggactccgatggcaagacctacctgaactggtatcagcagaagcccggcaaggcccctaagctgctgatctacctggtgtccaagctggatagcggcgtgcccagcagattttctggcagcggcagcggaaccgacttcaccctgacaatatccagcctccagcctgaggacttcgccacctactactgctggcaaggcacccactttccattcaccttcggccagggcaccaaggtggaaatcaaaagactcgaggagggacagcctaaggccaatcctaccgtgacactgttccctccaagcagcgaagaactccaggccaacaaggccacacttgtgtgcctgatctccgacttctaccctggggctgtgacagtggcttggaaggccgatggatctcctgtgaaagccggcgtggaaaccaccaagccatccaagcagagcaacaacaaatacgccgccagctcctacctgagcctgacacctgagcagtggaagtcccacagatcctacagctgccaagtgacccacgaaggcagcaccgtggaaaagacagtggcccctacagagtgcagccccatcaagaccgatgtgattacaatggaccccaaggacaactgctccaaggacgccaacgataccctgctgctccagctgaccaacaccagcgcctactacatgtacgagatcctgctgggcaaggccaccctgtacgccgtgctggtgtctgccctggtgctgatggctatggtcaagcggaaggacagccggggacgcgccaagagaagcggatctggcgtgaagcagaccctgaatttcgacctgctgaagctggctggcgacgtggaatccaacccaggccctactagtatggactggatttggcgcatccttttccttgtcggcgctgctaccggcgcgcattccttcgaagaagtgcagctggttgaatcaggcggaggactggttcagcctggcggatctctgagactgtcttgtgccgccagcggctacaccttcagcagctactggatgaactgggtccgacaggcccctggcaaaggactggaatgggtcggaatgatcgaccccagcgacagcgagacacactacaaccacatcttcaaggaccgcttcaccatcagcgccgacaccagcaagaataccgcctacctccagatgaactccctgagagccgaggacaccgccgtgtactactgcgccagaaacctgtatctgtggggccagggaaccctggtcacagtgtcatctacgcgtgcctctacaaagggaccctccgtgtttcctctggctcccagcagcaagtctacaagcggaggaacagccgctctgggctgcctggtcaaggattactttcccgagcctgtgaccgtgtcctggaatagcggagcactgacaagcggcgtgcacacctttccagccgtgctgcaaagcagcggcctgtactctctgagcagcgtggtcacagtgcctagctctagcctgggcacccagacctacatctgcaatgtgaaccacaagcctagcaacaccaaggtggacaagagagtggaacccaagagctgtatccccgaggacacattcttcccaagccccgagagcagctgcgacgtgaagctggtggaaaagagcttcgagacagacaccaacctgaacttccagaacctgagcgtgatcggcctgcggatgctgttcgccaaaaccgtggccgtgaacttcctgctgaccgccaagctgttcttcct

SEQ ID NO: 40279 - DNA, 1919 bp, synthetic construct
  source 1..1919: mol_type = other DNA
atggccttaccagtgaccgccttgctcctgccgctggccttgctgctccacgccgccaggccggacatccagatgacacagagccctagcagcctgtctgccagcgtgggagacagagtgaccatcacatgcaagagcagccagagcctgctggactccgatggcaagacctacctgaactggtatcagcagaagcccggcaaggcccctaagctgctgatctacctggtgtccaagctggatagcggcgtgcccagcagattttctggcagcggcagcggaaccgacttcaccctgacaatatccagcctccagcctgaggacttcgccacctactactgcttccaaggcacccactttccatacaccttcggccagggcaccaaggtggaaatcaaaagactcgaggagggacagcctaaggccaatcctaccgtgacactgttccctccaagcagcgaagaactccaggccaacaaggccacacttgtgtgcctgatctccgacttctaccctggggctgtgacagtggcttggaaggccgatggatctcctgtgaaagccggcgtggaaaccaccaagccatccaagcagagcaacaacaaatacgccgccagctcctacctgagcctgacacctgagcagtggaagtcccacagatcctacagctgccaagtgacccacgaaggcagcaccgtggaaaagacagtggcccctacagagtgcagccccatcaagaccgatgtgattacaatggaccccaaggacaactgctccaaggacgccaacgataccctgctgctccagctgaccaacaccagcgcctactacatgtacgagatcctgctgggcaaggccaccctgtacgccgtgctggtgtctgccctggtgctgatggctatggtcaagcggaaggacagccggggacgcgccaagagaagcggatctggcgtgaagcagaccctgaatttcgacctgctgaagctggctggcgacgtggaatccaacccaggccctactagtatggactggatttggcgcatccttttccttgtcggcgctgctaccggcgcgcattccttcgaagaagtgcagctggttgaatcaggcggaggactggttcagcctggcggatctctgagactgtcttgtgccgccagcggctacaccttcaccagctactggatgaactgggtccgacaggcccctggcaaaggactggaatgggtcggaatgatcgaccccagcgacagcgagacacactacaaccacatcttcaaggaccgcttcaccatcagcgccgacaccagcaagaataccgcctacctccagatgaactccctgagagccgaggacaccgccgtgtactactgcgccagaaacctgtatctgttcggccagggaaccctggtcacagtgtcatctacgcgtgcctctacaaagggaccctccgtgtttcctctggctcccagcagcaagtctacaagcggaggaacagccgctctgggctgcctggtcaaggattactttcccgagcctgtgaccgtgtcctggaatagcggagcactgacaagcggcgtgcacacctttccagccgtgctgcaaagcagcggcctgtactctctgagcagcgtggtcacagtgcctagctctagcctgggcacccagacctacatctgcaatgtgaaccacaagcctagcaacaccaaggtggacaagagagtggaacccaagagctgtatccccgaggacacattcttcccaagccccgagagcagctgcgacgtgaagctggtggaaaagagcttcgagacagacaccaacctgaacttccagaacctgagcgtgatcggcctgcggatgctgttcgccaaaaccgtggccgtgaacttcctgctgaccgccaagctgttcttcct

SEQ ID NO: 40280 - DNA, 1919 bp, synthetic construct
  source 1..1919: mol_type = other DNA
atggccttaccagtgaccgccttgctcctgccgctggccttgctgctccacgccgccaggccggacatccagatgacacagagccctagcagcctgtctgccagcgtgggagacagagtgaccatcacatgcaagagcagccagagcctgctggactccgatggcaagacctacctgaactggtatcagcagaagcccggcaaggcccctaagctgctgatctacctggtgtccaagctggatagcggcgtgcccagcagattttctggcagcggcagcggaaccgacttcaccctgacaatatccagcctccagcctgaggacttcgccacctactactgcttccaaggcacccactttccatacaccttcggccagggcaccaaggtggaaatcaaaagactcgaggagggacagcctaaggccaatcctaccgtgacactgttccctccaagcagcgaagaactccaggccaacaaggccacacttgtgtgcctgatctccgacttctaccctggggctgtgacagtggcttggaaggccgatggatctcctgtgaaagccggcgtggaaaccaccaagccatccaagcagagcaacaacaaatacgccgccagctcctacctgagcctgacacctgagcagtggaagtcccacagatcctacagctgccaagtgacccacgaaggcagcaccgtggaaaagacagtggcccctacagagtgcagccccatcaagaccgatgtgattacaatggaccccaaggacaactgctccaaggacgccaacgataccctgctgctccagctgaccaacaccagcgcctactacatgtacgagatcctgctgggcaaggccaccctgtacgccgtgctggtgtctgccctggtgctgatggctatggtcaagcggaaggacagccggggacgcgccaagagaagcggatctggcgtgaagcagaccctgaatttcgacctgctgaagctggctggcgacgtggaatccaacccaggccctactagtatggactggatttggcgcatccttttccttgtcggcgctgctaccggcgcgcattccttcgaagaagtgcagctggttgaatcaggcggaggactggttcagcctggcggatctctgagactgtcttgtgccgccagcggctacaccttcaccaactactggatgaactgggtccgacaggcccctggcaaaggactggaatgggtcggaatgatcgaccccagcgacagcgagacacactacaaccacatcttcaaggaccgcttcaccatcagcgccgacaccagcaagaataccgcctacctccagatgaactccctgagagccgaggacaccgccgtgtactactgcgccagaaacctgtatctgtggggccagggaaccctggtcacagtgtcatctacgcgtgcctctacaaagggaccctccgtgtttcctctggctcccagcagcaagtctacaagcggaggaacagccgctctgggctgcctggtcaaggattactttcccgagcctgtgaccgtgtcctggaatagcggagcactgacaagcggcgtgcacacctttccagccgtgctgcaaagcagcggcctgtactctctgagcagcgtggtcacagtgcctagctctagcctgggcacccagacctacatctgcaatgtgaaccacaagcctagcaacaccaaggtggacaagagagtggaacccaagagctgtatccccgaggacacattcttcccaagccccgagagcagctgcgacgtgaagctggtggaaaagagcttcgagacagacaccaacctgaacttccagaacctgagcgtgatcggcctgcggatgctgttcgccaaaaccgtggccgtgaacttcctgctgaccgccaagctgttcttcct

SEQ ID NO: 40281 - DNA, 1919 bp, synthetic construct
  source 1..1919: mol_type = other DNA
atggccttaccagtgaccgccttgctcctgccgctggccttgctgctccacgccgccaggccggacatccagatgacacagagccctagcagcctgtctgccagcgtgggagacagagtgaccatcacatgcaagagcagccagagcctgctggactccgatggcaagacctacctgaactggtatcagcagaagcccggcaaggcccctaagctgctgatctacctggtgtccaagctggatagcggcgtgcccagcagattttctggcagcggcagcggaaccgacttcaccctgacaatatccagcctccagcctgaggacttcgccacctactactgcttccaaggcacccactttccattcaccttcggccagggcaccaaggtggaaatcaaaagactcgaggagggacagcctaaggccaatcctaccgtgacactgttccctccaagcagcgaagaactccaggccaacaaggccacacttgtgtgcctgatctccgacttctaccctggggctgtgacagtggcttggaaggccgatggatctcctgtgaaagccggcgtggaaaccaccaagccatccaagcagagcaacaacaaatacgccgccagctcctacctgagcctgacacctgagcagtggaagtcccacagatcctacagctgccaagtgacccacgaaggcagcaccgtggaaaagacagtggcccctacagagtgcagccccatcaagaccgatgtgattacaatggaccccaaggacaactgctccaaggacgccaacgataccctgctgctccagctgaccaacaccagcgcctactacatgtacgagatcctgctgggcaaggccaccctgtacgccgtgctggtgtctgccctggtgctgatggctatggtcaagcggaaggacagccggggacgcgccaagagaagcggatctggcgtgaagcagaccctgaatttcgacctgctgaagctggctggcgacgtggaatccaacccaggccctactagtatggactggatttggcgcatccttttccttgtcggcgctgctaccggcgcgcattccttcgaagaagtgcagctggttgaatcaggcggaggactggttcagcctggcggatctctgagactgtcttgtgccgccagcggctacaccttcaccaactactggatgaactgggtccgacaggcccctggcaaaggactggaatgggtcggaatgatcgaccccagcgacagcgagacacactacaaccacatcttcaaggaccgcttcaccatcagcgccgacaccagcaagaataccgcctacctccagatgaactccctgagagccgaggacaccgccgtgtactactgcgccagaaacctgtatctgtggggccagggaaccctggtcacagtgtcatctacgcgtgcctctacaaagggaccctccgtgtttcctctggctcccagcagcaagtctacaagcggaggaacagccgctctgggctgcctggtcaaggattactttcccgagcctgtgaccgtgtcctggaatagcggagcactgacaagcggcgtgcacacctttccagccgtgctgcaaagcagcggcctgtactctctgagcagcgtggtcacagtgcctagctctagcctgggcacccagacctacatctgcaatgtgaaccacaagcctagcaacaccaaggtggacaagagagtggaacccaagagctgtatccccgaggacacattcttcccaagccccgagagcagctgcgacgtgaagctggtggaaaagagcttcgagacagacaccaacctgaacttccagaacctgagcgtgatcggcctgcggatgctgttcgccaaaaccgtggccgtgaacttcctgctgaccgccaagctgttcttcct

SEQ ID NO: 40282 - DNA, 1928 bp, synthetic construct
  source 1..1928: mol_type = other DNA
atggccttaccagtgaccgccttgctcctgccgctggccttgctgctccacgccgccaggccggacatccagttgacccagtcccccagctcactcagcgccagtgtgggggaccgggtgaccattacctgtaaagccagtcagagtgtggactatgacggggatagcttcctgaattggtatcagcagaagcctggcaaagccccaaagctgctgatctacgctgcatctaatctggagtcaggcgtgccttccaggttctccggtagtgggtctgggaccgatttcacattgaccatttcatccctccaacccgaggatttcgctacatattactgtcagcagtccaatgaggaccctctcacctttggccagggcaccaaagttgaaattaagagactcgaggagggacagcctaaggccaatcctaccgtgacactgttccctccaagcagcgaagaactccaggccaacaaggccacacttgtgtgcctgatctccgacttctaccctggggctgtgacagtggcttggaaggccgatggatctcctgtgaaagccggcgtggaaaccaccaagccatccaagcagagcaacaacaaatacgccgccagctcctacctgagcctgacacctgagcagtggaagtcccacagatcctacagctgccaagtgacccacgaaggcagcaccgtggaaaagacagtggcccctacagagtgcagccccatcaagaccgatgtgattacaatggaccccaaggacaactgctccaaggacgccaacgataccctgctgctccagctgaccaacaccagcgcctactacatgtacgagatcctgctgggcaaggccaccctgtacgccgtgctggtgtctgccctggtgctgatggctatggtcaagcggaaggacagccggggacgcgccaagagaagcggatctggcgtgaagcagaccctgaatttcgacctgctgaagctggctggcgacgtggaatccaacccaggccctactagtatggactggatttggcgcatccttttccttgtcggcgctgctaccggcgcgcattccttcgaagaagtccaacttgtggagtctggagggggcctggtgcagcccggcggctctctcagactgtcttgtgcggcaagcggctacaccttcacctcttactggatagaatgggtgaggcaggcacctggaaagggactggagtggattggagagattctgccaggagggggagatacaaattacaatgaaatcttcaaggggcgggccaccttttcagcggataccagcaagaatacagcttacctgcagatgaatagcctccgggcagaagataccgctgtttattattgcacgagacgggtgccaataagactggactattgggggcaagggactcttgtcaccgtcagttcaacgcgtgcctctacaaagggaccctccgtgtttcctctggctcccagcagcaagtctacaagcggaggaacagccgctctgggctgcctggtcaaggattactttcccgagcctgtgaccgtgtcctggaatagcggagcactgacaagcggcgtgcacacctttccagccgtgctgcaaagcagcggcctgtactctctgagcagcgtggtcacagtgcctagctctagcctgggcacccagacctacatctgcaatgtgaaccacaagcctagcaacaccaaggtggacaagagagtggaacccaagagctgtatccccgaggacacattcttcccaagccccgagagcagctgcgacgtgaagctggtggaaaagagcttcgagacagacaccaacctgaacttccagaacctgagcgtgatcggcctgcggatgctgttcgccaaaaccgtggccgtgaacttcctgctgaccgccaagctgttcttcct

SEQ ID NO: 40283 - DNA, 1928 bp, synthetic construct
  source 1..1928: mol_type = other DNA
atggccttaccagtgaccgccttgctcctgccgctggccttgctgctccacgccgccaggccggacatccagttgacccagtcccccagctcactcagcgccagtgtgggggaccgggtgaccattacctgtaaagccagtcagagtgtggactatgagggggatagcttcctgaattggtatcagcagaagcctggcaaagccccaaagctgctgatctacgctgcatctaatctggagtcaggcgtgccttctaggttctccggtagtgggtctgggaccgatttcacattgaccatttcatccctccaacccgaggatttcgctacatattactgtcagcagtccaatgaggaccctctcacctttggccagggcaccaaagttgaaattaagagactcgaggagggacagcctaaggccaatcctaccgtgacactgttccctccaagcagcgaagaactccaggccaacaaggccacacttgtgtgcctgatctccgacttctaccctggggctgtgacagtggcttggaaggccgatggatctcctgtgaaagccggcgtggaaaccaccaagccatccaagcagagcaacaacaaatacgccgccagctcctacctgagcctgacacctgagcagtggaagtcccacagatcctacagctgccaagtgacccacgaaggcagcaccgtggaaaagacagtggcccctacagagtgcagccccatcaagaccgatgtgattacaatggaccccaaggacaactgctccaaggacgccaacgataccctgctgctccagctgaccaacaccagcgcctactacatgtacgagatcctgctgggcaaggccaccctgtacgccgtgctggtgtctgccctggtgctgatggctatggtcaagcggaaggacagccggggacgcgccaagagaagcggatctggcgtgaagcagaccctgaatttcgacctgctgaagctggctggcgacgtggaatccaacccaggccctactagtatggactggatttggcgcatccttttccttgtcggcgctgctaccggcgcgcattccttcgaagaagtccaacttgtggagtctggagggggcctggtgcagcccggcggctctctcagactgtcttgtgcggcaagcggctacaccttcacctcttactggatagaatgggtgaggcaggcacctggaaagggactggagtggattggagagattctgccaggagggggagatacaaattacaatgaaatcttcaaggggcgggccaccttttcagcggataccagcaagaatacagcttacctgcagatgaatagcctccgggcagaagataccgctgtttattattgcacgagacgggtgccaataagactggactattgggggcaagggactcttgtcaccgtcagttcaacgcgtgcctctacaaagggaccctccgtgtttcctctggctcccagcagcaagtctacaagcggaggaacagccgctctgggctgcctggtcaaggattactttcccgagcctgtgaccgtgtcctggaatagcggagcactgacaagcggcgtgcacacctttccagccgtgctgcaaagcagcggcctgtactctctgagcagcgtggtcacagtgcctagctctagcctgggcacccagacctacatctgcaatgtgaaccacaagcctagcaacaccaaggtggacaagagagtggaacccaagagctgtatccccgaggacacattcttcccaagccccgagagcagctgcgacgtgaagctggtggaaaagagcttcgagacagacaccaacctgaacttccagaacctgagcgtgatcggcctgcggatgctgttcgccaaaaccgtggccgtgaacttcctgctgaccgccaagctgttcttcct

SEQ ID NO: 40284 - DNA, 1925 bp, synthetic construct
  source 1..1925: mol_type = other DNA
atggccttaccagtgaccgccttgctcctgccgctggccttgctgctccacgccgccaggccggacatcgtgatgacacagagccctgatagcctggccgtgtctctgggagagagagccaccattaactgcaaggccagccagagcgtggactacgacggcgacagcttcctgaactggtatcagcagaagcccggccagcctcctaagctgctgatctacgccgccagcaatctggaaagcggcgtgccaagcagattttccggctctggcagcggcaccgatttcaccctgacaatatccagcctccagcctgaggacgtggccgtgtactactgccagcagagcaacgacgaccctctgacctttggacagggcaccaaggtggaaatcaaactcgaggagggacagcctaaggccaatcctaccgtgacactgttccctccaagcagcgaagaactccaggccaacaaggccacacttgtgtgcctgatctccgacttctaccctggggctgtgacagtggcttggaaggccgatggatctcctgtgaaagccggcgtggaaaccaccaagccatccaagcagagcaacaacaaatacgccgccagctcctacctgagcctgacacctgagcagtggaagtcccacagatcctacagctgccaagtgacccacgaaggcagcaccgtggaaaagacagtggcccctacagagtgcagccccatcaagaccgatgtgattacaatggaccccaaggacaactgctccaaggacgccaacgataccctgctgctccagctgaccaacaccagcgcctactacatgtacgagatcctgctgggcaaggccaccctgtacgccgtgctggtgtctgccctggtgctgatggctatggtcaagcggaaggacagccggggacgcgccaagagaagcggatctggcgtgaagcagaccctgaatttcgacctgctgaagctggctggcgacgtggaatccaacccaggccctactagtatggactggatttggcgcatccttttccttgtcggcgctgctaccggcgcgcattccttcgaacaagttcagctggttcagagcggagccgaagtgaagaaacctggggcctctgtgaaggtgtcctgcaaagccagcggctacacctttaccagctactggatcaactgggtccgacaggcccctggacaaggactggaatggatgggacagatccttccaggcggaggggacaccaactacaacggcaagttcaagggcagagtgaccatcaccgccgacaccagcacaagcaccgcctacatggaactgagcagcctgagaagcgaggacaccgccgtgtattattgcaccagacgggtgcccatccggctggattattggggacagggaaccctggtcaccgtgtctagtacgcgtgcctctacaaagggaccctccgtgtttcctctggctcccagcagcaagtctacaagcggaggaacagccgctctgggctgcctggtcaaggattactttcccgagcctgtgaccgtgtcctggaatagcggagcactgacaagcggcgtgcacacctttccagccgtgctgcaaagcagcggcctgtactctctgagcagcgtggtcacagtgcctagctctagcctgggcacccagacctacatctgcaatgtgaaccacaagcctagcaacaccaaggtggacaagagagtggaacccaagagctgtatccccgaggacacattcttcccaagccccgagagcagctgcgacgtgaagctggtggaaaagagcttcgagacagacaccaacctgaacttccagaacctgagcgtgatcggcctgcggatgctgttcgccaaaaccgtggccgtgaacttcctgctgaccgccaagctgttcttcct

SEQ ID NO: 40285 - DNA, 1925 bp, synthetic construct
  source 1..1925: mol_type = other DNA
atggccttaccagtgaccgccttgctcctgccgctggccttgctgctccacgccgccaggccggacatcgtgatgacacagagccctgatagcctggccgtgtctctgggagagagagccaccattaactgcaaggccagccagagcgtggactacgacggcgacagcttcctgaactggtatcagcagaagcccggccagcctcctaagctgctgatctacgccgccagcaatctggaaagcggcgtgccaagcagattttccggctctggcagcggcaccgatttcaccctgacaatatccagcctccagcctgaggacgtggccgtgtactactgccagcagagcaacgacgaccctctgacctttggacagggcaccaaggtggaaatcaaactcgaggagggacagcctaaggccaatcctaccgtgacactgttccctccaagcagcgaagaactccaggccaacaaggccacacttgtgtgcctgatctccgacttctaccctggggctgtgacagtggcttggaaggccgatggatctcctgtgaaagccggcgtggaaaccaccaagccatccaagcagagcaacaacaaatacgccgccagctcctacctgagcctgacacctgagcagtggaagtcccacagatcctacagctgccaagtgacccacgaaggcagcaccgtggaaaagacagtggcccctacagagtgcagccccatcaagaccgatgtgattacaatggaccccaaggacaactgctccaaggacgccaacgataccctgctgctccagctgaccaacaccagcgcctactacatgtacgagatcctgctgggcaaggccaccctgtacgccgtgctggtgtctgccctggtgctgatggctatggtcaagcggaaggacagccggggacgcgccaagagaagcggatctggcgtgaagcagaccctgaatttcgacctgctgaagctggctggcgacgtggaatccaacccaggccctactagtatggactggatttggcgcatccttttccttgtcggcgctgctaccggcgcgcattccttcgaagaagtccaacttgtggagtctggagggggcctggtgcagcccggcggctctctcagactgtcttgtgcggcaagcggctacaccttcacctcttactggatagaatgggtgaggcaggcacctggaaagggactggagtggattggagagattctgccaggagggggagatacaaattacaatgaaatcttcaaggggcgggccaccttttcagcggataccagcaagaatacagcttacctgcagatgaatagcctccgggcagaagataccgctgtttattattgcacgagacgggtgccaataagactggactattgggggcaagggactcttgtcaccgtcagttcaacgcgtgcctctacaaagggaccctccgtgtttcctctggctcccagcagcaagtctacaagcggaggaacagccgctctgggctgcctggtcaaggattactttcccgagcctgtgaccgtgtcctggaatagcggagcactgacaagcggcgtgcacacctttccagccgtgctgcaaagcagcggcctgtactctctgagcagcgtggtcacagtgcctagctctagcctgggcacccagacctacatctgcaatgtgaaccacaagcctagcaacaccaaggtggacaagagagtggaacccaagagctgtatccccgaggacacattcttcccaagccccgagagcagctgcgacgtgaagctggtggaaaagagcttcgagacagacaccaacctgaacttccagaacctgagcgtgatcggcctgcggatgctgttcgccaaaaccgtggccgtgaacttcctgctgaccgccaagctgttcttcct

SEQ ID NO: 40286 - DNA, 1925 bp, synthetic construct
  source 1..1925: mol_type = other DNA
atggccttaccagtgaccgccttgctcctgccgctggccttgctgctccacgccgccaggccggacatcgtgatgacacagagccctgatagcctggccgtgtctctgggagagagagccaccattaactgcaaggccagccagagcgtggactacgacggcgacagcttcctgaactggtatcagcagaagcccggccagcctcctaagctgctgatctacgccgccagcaatctggaaagcggcgtgccaagcagattttccggctctggcagcggcaccgatttcaccctgacaatatccagcctccagcctgaggacgtggccgtgtactactgccagcagagcaacgacgaccctctgacctttggacagggcaccaaggtggaaatcaaactcgaggagggacagcctaaggccaatcctaccgtgacactgttccctccaagcagcgaagaactccaggccaacaaggccacacttgtgtgcctgatctccgacttctaccctggggctgtgacagtggcttggaaggccgatggatctcctgtgaaagccggcgtggaaaccaccaagccatccaagcagagcaacaacaaatacgccgccagctcctacctgagcctgacacctgagcagtggaagtcccacagatcctacagctgccaagtgacccacgaaggcagcaccgtggaaaagacagtggcccctacagagtgcagccccatcaagaccgatgtgattacaatggaccccaaggacaactgctccaaggacgccaacgataccctgctgctccagctgaccaacaccagcgcctactacatgtacgagatcctgctgggcaaggccaccctgtacgccgtgctggtgtctgccctggtgctgatggctatggtcaagcggaaggacagccggggacgcgccaagagaagcggatctggcgtgaagcagaccctgaatttcgacctgctgaagctggctggcgacgtggaatccaacccaggccctactagtatggactggatttggcgcatccttttccttgtcggcgctgctaccggcgcgcattccttcgaagaagtccaacttgtggagtctggagggggcctggtgcagcccggcggctctctcagactgtcttgtgcggcaagcggctacaccttcagctcttactggatagaatgggtgaggcaggcacctggaaagggactggagtggattggagagattctgccaggagggggagatacaaattacaatgaaatcttcaaggggcgggccaccttttcagcggataccagcaagaatacagcttacctgcagatgaatagcctccgggcagaagataccgctgtttattattgcacgagacgggtgccaataagactggactattgggggcaagggactcttgtcaccgtcagttcaacgcgtgcctctacaaagggaccctccgtgtttcctctggctcccagcagcaagtctacaagcggaggaacagccgctctgggctgcctggtcaaggattactttcccgagcctgtgaccgtgtcctggaatagcggagcactgacaagcggcgtgcacacctttccagccgtgctgcaaagcagcggcctgtactctctgagcagcgtggtcacagtgcctagctctagcctgggcacccagacctacatctgcaatgtgaaccacaagcctagcaacaccaaggtggacaagagagtggaacccaagagctgtatccccgaggacacattcttcccaagccccgagagcagctgcgacgtgaagctggtggaaaagagcttcgagacagacaccaacctgaacttccagaacctgagcgtgatcggcctgcggatgctgttcgccaaaaccgtggccgtgaacttcctgctgaccgccaagctgttcttcct

SEQ ID NO: 40287 - DNA, 1916 bp, synthetic construct
  source 1..1916: mol_type = other DNA
atggccttaccagtgaccgccttgctcctgccgctggccttgctgctccacgccgccaggccggacgtggtcatgacacagagcccttctagcctgtctgccagcgtgggcgacagagtgaccatcacctgtatggcctccgaggacatctacatccggctggcctggtatcagcagaagcctggaaacgcccctaagctgctgatctacgccgccacctctctggaaacaggcgtgccaagcagattttccggcagcggctctggcaccgatttcaccctgacaatatccagcctccagcctgaggacttcgccacctactactgccagcagtattggagcagcccctggacatttggcggaggcaccaaggtggaaatcaaactcgaggagggacagcctaaggccaatcctaccgtgacactgttccctccaagcagcgaagaactccaggccaacaaggccacacttgtgtgcctgatctccgacttctaccctggggctgtgacagtggcttggaaggccgatggatctcctgtgaaagccggcgtggaaaccaccaagccatccaagcagagcaacaacaaatacgccgccagctcctacctgagcctgacacctgagcagtggaagtcccacagatcctacagctgccaagtgacccacgaaggcagcaccgtggaaaagacagtggcccctacagagtgcagccccatcaagaccgatgtgattacaatggaccccaaggacaactgctccaaggacgccaacgataccctgctgctccagctgaccaacaccagcgcctactacatgtacgagatcctgctgggcaaggccaccctgtacgccgtgctggtgtctgccctggtgctgatggctatggtcaagcggaaggacagccggggacgcgccaagagaagcggatctggcgtgaagcagaccctgaatttcgacctgctgaagctggctggcgacgtggaatccaacccaggccctactagtatggactggatttggcgcatccttttccttgtcggcgctgctaccggcgcgcattccttcgaacaggttcagctgcaagagtctggccccggactggtcaagcctagccaaacactgagcctgacctgtaccgtgtccggctacagcatcaccagcgactacacctggaactggatcagacagcctcctggcaacggactggaatggatcggctacatcacctacagcggcagcaccagctacaaccccagcctgaaaagccgggtgctgatctccgtggacaccagcaagaatcaggtgtccctgaagctgagcagcgtgacagccgctgataccgccgtgtactactgtgccagactggggagaagatacacaatggactactggggccagggcaccaccgtgacagtttcttctacgcgtgcctctacaaagggaccctccgtgtttcctctggctcccagcagcaagtctacaagcggaggaacagccgctctgggctgcctggtcaaggattactttcccgagcctgtgaccgtgtcctggaatagcggagcactgacaagcggcgtgcacacctttccagccgtgctgcaaagcagcggcctgtactctctgagcagcgtggtcacagtgcctagctctagcctgggcacccagacctacatctgcaatgtgaaccacaagcctagcaacaccaaggtggacaagagagtggaacccaagagctgtatccccgaggacacattcttcccaagccccgagagcagctgcgacgtgaagctggtggaaaagagcttcgagacagacaccaacctgaacttccagaacctgagcgtgatcggcctgcggatgctgttcgccaaaaccgtggccgtgaacttcctgctgaccgccaagctgttcttcct

SEQ ID NO: 40288 - DNA, 1913 bp, synthetic construct
  source 1..1913: mol_type = other DNA
atggccttaccagtgaccgccttgctcctgccgctggccttgctgctccacgccgccaggccggacatccagatgacacagagccctagcagcctgtctgccagcgtgggagacagagtgaccatcacatgcaaggccagcgacctgatccacaactggctggcctggtatcagcagaagcctggcaaggcccctaagctgctgatctacggcgctacctctctggaaacaggcgtgcccagcagattttctggcagcggctctggcaccgacttcaccctgacaatatccagcctccagcctgaggacttcgccacctactactgccagcagtactggaccacacctttcaccttcggccagggcaccaaggtggaaatcaaaagactcgaggagggacagcctaaggccaatcctaccgtgacactgttccctccaagcagcgaagaactccaggccaacaaggccacacttgtgtgcctgatctccgacttctaccctggggctgtgacagtggcttggaaggccgatggatctcctgtgaaagccggcgtggaaaccaccaagccatccaagcagagcaacaacaaatacgccgccagctcctacctgagcctgacacctgagcagtggaagtcccacagatcctacagctgccaagtgacccacgaaggcagcaccgtggaaaagacagtggcccctacagagtgcagccccatcaagaccgatgtgattacaatggaccccaaggacaactgctccaaggacgccaacgataccctgctgctccagctgaccaacaccagcgcctactacatgtacgagatcctgctgggcaaggccaccctgtacgccgtgctggtgtctgccctggtgctgatggctatggtcaagcggaaggacagccggggacgcgccaagagaagcggatctggcgtgaagcagaccctgaatttcgacctgctgaagctggctggcgacgtggaatccaacccaggccctactagtatggactggatttggcgcatccttttccttgtcggcgctgctaccggcgcgcattccttcgaagaagtgcagctggttgaatcaggtggcggcctggttcaacctggcggatctctgagactgagctgtgccgccagcggctacagcatcaccaatgactacgcctggaactgggtccgacaggcccctggaaaaggactggaatgggtcggatatatcagctactccggctacaccacctacaatcccagcatcaagagccggttcaccatcagcagagacaccagcaagaacaccctgtacctccagatgaactccctgagagccgaggacaccgccgtgtactattgtgccagatggaccagcggcctggactattggggacagggaacactggtcaccgtgtcctctacgcgtgcctctacaaagggaccctccgtgtttcctctggctcccagcagcaagtctacaagcggaggaacagccgctctgggctgcctggtcaaggattactttcccgagcctgtgaccgtgtcctggaatagcggagcactgacaagcggcgtgcacacctttccagccgtgctgcaaagcagcggcctgtactctctgagcagcgtggtcacagtgcctagctctagcctgggcacccagacctacatctgcaatgtgaaccacaagcctagcaacaccaaggtggacaagagagtggaacccaagagctgtatccccgaggacacattcttcccaagccccgagagcagctgcgacgtgaagctggtggaaaagagcttcgagacagacaccaacctgaacttccagaacctgagcgtgatcggcctgcggatgctgttcgccaaaaccgtggccgtgaacttcctgctgaccgccaagctgttcttcct

SEQ ID NO: 40289 - DNA, 1934 bp, synthetic construct
  source 1..1934: mol_type = other DNA
atggccttaccagtgaccgccttgctcctgccgctggccttgctgctccacgccgccaggccggacatcgtgatgacacagagccctgatagcctggccgtgtctctgggagagagagccaccatcaactgcaagagcagccagagcctgctgaacagcggcaaccagaagaactacctggcctggtatcagcagaagcccggccagcctcctaagctgctgatctactggggcagcaccagatccacaggcgtgcccgatagattttctggctctggcagcggcaccgacttcaccctgacaatttctagcctgcaagccgaggacgtggccgtgtactactgccagaacgactacacataccccttcaccttcggccagggcaccaagctggaaatcaaactcgaggagggacagcctaaggccaatcctaccgtgacactgttccctccaagcagcgaagaactccaggccaacaaggccacacttgtgtgcctgatctccgacttctaccctggggctgtgacagtggcttggaaggccgatggatctcctgtgaaagccggcgtggaaaccaccaagccatccaagcagagcaacaacaaatacgccgccagctcctacctgagcctgacacctgagcagtggaagtcccacagatcctacagctgccaagtgacccacgaaggcagcaccgtggaaaagacagtggcccctacagagtgcagccccatcaagaccgatgtgattacaatggaccccaaggacaactgctccaaggacgccaacgataccctgctgctccagctgaccaacaccagcgcctactacatgtacgagatcctgctgggcaaggccaccctgtacgccgtgctggtgtctgccctggtgctgatggctatggtcaagcggaaggacagccggggacgcgccaagagaagcggatctggcgtgaagcagaccctgaatttcgacctgctgaagctggctggcgacgtggaatccaacccaggccctactagtatggactggatttggcgcatccttttccttgtcggcgctgctaccggcgcgcattccttcgaacaagttcagctggttcagagcggagccgaagtgaagaaacctggggcctctgtgaaggtgtcctgcaaggcttccggctataccttcaccagcttttggctgaactgggtccgacaggcccctggacaaggactggaatggatgggcaacatctaccccagcaccagctacaccgtgtacaaccagaaattcaaggaccgcgtgaccatgaccagggacaccagcacaagcacagtgtacatggaactgagcagcctgcggagcgaggataccgccgtgtattattgcgccagaacctggcggggcaacagcttcgattattggggccagggaaccaccgtgaccgtgtcatctacgcgtgcctctacaaagggaccctccgtgtttcctctggctcccagcagcaagtctacaagcggaggaacagccgctctgggctgcctggtcaaggattactttcccgagcctgtgaccgtgtcctggaatagcggagcactgacaagcggcgtgcacacctttccagccgtgctgcaaagcagcggcctgtactctctgagcagcgtggtcacagtgcctagctctagcctgggcacccagacctacatctgcaatgtgaaccacaagcctagcaacaccaaggtggacaagagagtggaacccaagagctgtatccccgaggacacattcttcccaagccccgagagcagctgcgacgtgaagctggtggaaaagagcttcgagacagacaccaacctgaacttccagaacctgagcgtgatcggcctgcggatgctgttcgccaaaaccgtggccgtgaacttcctgctgaccgccaagctgttcttcct

SEQ ID NO: 40290 - DNA, 1934 bp, synthetic construct
  source 1..1934: mol_type = other DNA
atggccttaccagtgaccgccttgctcctgccgctggccttgctgctccacgccgccaggccggacatcgtgatgacacagagccctgatagcctggccgtgtctctgggagagagagccaccatcaactgcaagagcagccagagcctgctgaacagcggcaacaacaagaactacgtgacatggtatcagcagaagcccggccagcctcctaagctgctgatctactggggcagcaccagatccacaggcgtgcccgatagattttctggctctggcagcggcaccgacttcaccctgacaatttctagcctgcaagccgaggacgtggccgtgtactactgccagaacgactacacataccccttcaccttcggccagggcaccaagctggaaatcaaactcgaggagggacagcctaaggccaatcctaccgtgacactgttccctccaagcagcgaagaactccaggccaacaaggccacacttgtgtgcctgatctccgacttctaccctggggctgtgacagtggcttggaaggccgatggatctcctgtgaaagccggcgtggaaaccaccaagccatccaagcagagcaacaacaaatacgccgccagctcctacctgagcctgacacctgagcagtggaagtcccacagatcctacagctgccaagtgacccacgaaggcagcaccgtggaaaagacagtggcccctacagagtgcagccccatcaagaccgatgtgattacaatggaccccaaggacaactgctccaaggacgccaacgataccctgctgctccagctgaccaacaccagcgcctactacatgtacgagatcctgctgggcaaggccaccctgtacgccgtgctggtgtctgccctggtgctgatggctatggtcaagcggaaggacagccggggacgcgccaagagaagcggatctggcgtgaagcagaccctgaatttcgacctgctgaagctggctggcgacgtggaatccaacccaggccctactagtatggactggatttggcgcatccttttccttgtcggcgctgctaccggcgcgcattccttcgaacaagttcagctggttcagagcggagccgaagtgaagaaacctggggcctctgtgaaggtgtcctgcaaggcttccggctataccttcaccagcttttggctgaactgggtccgacaggcccctggacaaggactggaatggatgggcaacatctaccccagcgacagctacaccgtgtacaaccagaaattcaaggaccgcgtgaccatgaccagggacaccagcacaagcacagtgtacatggaactgagcagcctgcggagcgaggataccgccgtgtattattgcgccagaacctggcggggcaacagcttcgattattggggccagggaaccaccgtgaccgtgtcatctacgcgtgcctctacaaagggaccctccgtgtttcctctggctcccagcagcaagtctacaagcggaggaacagccgctctgggctgcctggtcaaggattactttcccgagcctgtgaccgtgtcctggaatagcggagcactgacaagcggcgtgcacacctttccagccgtgctgcaaagcagcggcctgtactctctgagcagcgtggtcacagtgcctagctctagcctgggcacccagacctacatctgcaatgtgaaccacaagcctagcaacaccaaggtggacaagagagtggaacccaagagctgtatccccgaggacacattcttcccaagccccgagagcagctgcgacgtgaagctggtggaaaagagcttcgagacagacaccaacctgaacttccagaacctgagcgtgatcggcctgcggatgctgttcgccaaaaccgtggccgtgaacttcctgctgaccgccaagctgttcttcct

SEQ ID NO: 40291 - DNA, 1910 bp, synthetic construct
  source 1..1910: mol_type = other DNA
atggccttaccagtgaccgccttgctcctgccgctggccttgctgctccacgccgccaggccgcagatcgtgctgacacagagccctgccatcatgtccgcttctcccggcgagaaagtgaccatgacatgtagcgccagcagcagcgtgtccttcatgcactggtatcagcagaagtccggcacaagccccaagcggtggatctacgataccagcacactggcctctggcgtgccagccagatttggcggatctggcagcggcacatcttacagcctgaccatcagcagcatggaagccgaagatgccgccacctactactgccagcagtggtccagcaatcccctgacatttggagccggcaccaagctggaactgaagagactcgaggagggacagcctaaggccaatcctaccgtgacactgttccctccaagcagcgaagaactccaggccaacaaggccacacttgtgtgcctgatctccgacttctaccctggggctgtgacagtggcttggaaggccgatggatctcctgtgaaagccggcgtggaaaccaccaagccatccaagcagagcaacaacaaatacgccgccagctcctacctgagcctgacacctgagcagtggaagtcccacagatcctacagctgccaagtgacccacgaaggcagcaccgtggaaaagacagtggcccctacagagtgcagccccatcaagaccgatgtgattacaatggaccccaaggacaactgctccaaggacgccaacgataccctgctgctccagctgaccaacaccagcgcctactacatgtacgagatcctgctgggcaaggccaccctgtacgccgtgctggtgtctgccctggtgctgatggctatggtcaagcggaaggacagccggggacgcgccaagagaagcggatctggcgtgaagcagaccctgaatttcgacctgctgaagctggctggcgacgtggaatccaacccaggccctactagtatggactggatttggcgcatccttttccttgtcggcgctgctaccggcgcgcattccttcgaacaagttcagctgcaacagagcggccctgagctggttaagcctggcgcttctgtgcggatctcttgcaaggccagcggctacaccttcaccagctactacatccactgggtcaagcagcggcctggacagggactcgaatggatcggctggatctaccccggcaacctgaacaccaagtacaacgagaagttcaagggcaaagccacactgaccgccgacaagagcagcagcacagcctacatgcagctgagcagcctgacaagcgaggacagcgccgtgtacttctgcgccagatacgactggtacttcgacgtgtggggagccggaaccaccgtgacagtttcttctacgcgtgcctctacaaagggaccctccgtgtttcctctggctcccagcagcaagtctacaagcggaggaacagccgctctgggctgcctggtcaaggattactttcccgagcctgtgaccgtgtcctggaatagcggagcactgacaagcggcgtgcacacctttccagccgtgctgcaaagcagcggcctgtactctctgagcagcgtggtcacagtgcctagctctagcctgggcacccagacctacatctgcaatgtgaaccacaagcctagcaacaccaaggtggacaagagagtggaacccaagagctgtatccccgaggacacattcttcccaagccccgagagcagctgcgacgtgaagctggtggaaaagagcttcgagacagacaccaacctgaacttccagaacctgagcgtgatcggcctgcggatgctgttcgccaaaaccgtggccgtgaacttcctgctgaccgccaagctgttcttcct

SEQ ID NO: 40292 - DNA, 1928 bp, synthetic construct
  source 1..1928: mol_type = other DNA
atggccttaccagtgaccgccttgctcctgccgctggccttgctgctccacgccgccaggccggacatccagatgacacagagccctagcagcctgtctgccagcgtgggagacagagtgaccatcacctgtagagccagccagagcatcagcagctacctgaactggtatcagcagaagcccggcaaggcccctaaactgctgatctatgccgccagctctctccagagcggagtgcctagcagattttctggcagcggctccggcaccgatttcaccctgacaatatccagcctccagcctgaggacttcgccacctactactgccagcagagctacagcacccctctgacctttggacagggcaccaaggtggaaatcaagctcgaggagggacagcctaaggccaatcctaccgtgacactgttccctccaagcagcgaagaactccaggccaacaaggccacacttgtgtgcctgatctccgacttctaccctggggctgtgacagtggcttggaaggccgatggatctcctgtgaaagccggcgtggaaaccaccaagccatccaagcagagcaacaacaaatacgccgccagctcctacctgagcctgacacctgagcagtggaagtcccacagatcctacagctgccaagtgacccacgaaggcagcaccgtggaaaagacagtggcccctacagagtgcagccccatcaagaccgatgtgattacaatggaccccaaggacaactgctccaaggacgccaacgataccctgctgctccagctgaccaacaccagcgcctactacatgtacgagatcctgctgggcaaggccaccctgtacgccgtgctggtgtctgccctggtgctgatggctatggtcaagcggaaggacagccggggacgcgccaagagaagcggatctggcgtgaagcagaccctgaatttcgacctgctgaagctggctggcgacgtggaatccaacccaggccctactagtatggactggatttggcgcatccttttccttgtcggcgctgctaccggcgcgcattccttcgaagaggtgcagctggttgaatctggcggaggactggttcagcctggcggatctctgagactgtcttgtgctgccagcggcttcaccttcagctcctacgccatgagctgggtccgacaggctcctggcaaaggactggaatgggtgtccgccatctctggctcaggcggcagcacatattacgccgactctgtgaagggcagattcaccatcagccgggacaacagcaagaacaccctgtacctccagatgaactccctgagagccgaggacaccgccgtgtactattgtgccagactgggctaccccaccaccacactgctgccctttgattattggggccagggcaccctggtcaccgtttcttctacgcgtgcctctacaaagggaccctccgtgtttcctctggctcccagcagcaagtctacaagcggaggaacagccgctctgggctgcctggtcaaggattactttcccgagcctgtgaccgtgtcctggaatagcggagcactgacaagcggcgtgcacacctttccagccgtgctgcaaagcagcggcctgtactctctgagcagcgtggtcacagtgcctagctctagcctgggcacccagacctacatctgcaatgtgaaccacaagcctagcaacaccaaggtggacaagagagtggaacccaagagctgtatccccgaggacacattcttcccaagccccgagagcagctgcgacgtgaagctggtggaaaagagcttcgagacagacaccaacctgaacttccagaacctgagcgtgatcggcctgcggatgctgttcgccaaaaccgtggccgtgaacttcctgctgaccgccaagctgttcttcct

SEQ ID NO: 40293 - DNA, 1931 bp, synthetic construct
  source 1..1931: mol_type = other DNA
atggccttaccagtgaccgccttgctcctgccgctggccttgctgctccacgccgccaggccggacatccagatgacacagagccctagcagcctgtctgccagcgtgggagacagagtgaccatcacctgtagagccagccaggacatcaacacagccgtggcttggtatcagcagaagcctggcaaggcccctaagctgctgatctacagcgcctacttcctgtacagcggcgtgcccagcagattcagcggaagcagaagcggcaccgacttcaccctgacaatatccagcctccagcctgaggacttcgccacctactactgccagcagtacagcagatacagccccgtgacctttggacagggcaccaaggtggaaatcaagagactcgaggagggacagcctaaggccaatcctaccgtgacactgttccctccaagcagcgaagaactccaggccaacaaggccacacttgtgtgcctgatctccgacttctaccctggggctgtgacagtggcttggaaggccgatggatctcctgtgaaagccggcgtggaaaccaccaagccatccaagcagagcaacaacaaatacgccgccagctcctacctgagcctgacacctgagcagtggaagtcccacagatcctacagctgccaagtgacccacgaaggcagcaccgtggaaaagacagtggcccctacagagtgcagccccatcaagaccgatgtgattacaatggaccccaaggacaactgctccaaggacgccaacgataccctgctgctccagctgaccaacaccagcgcctactacatgtacgagatcctgctgggcaaggccaccctgtacgccgtgctggtgtctgccctggtgctgatggctatggtcaagcggaaggacagccggggacgcgccaagagaagcggatctggcgtgaagcagaccctgaatttcgacctgctgaagctggctggcgacgtggaatccaacccaggccctactagtatggactggatttggcgcatccttttccttgtcggcgctgctaccggcgcgcattccttcgaagaagttcagctggttgaaagtggtggcggcctggttcaacctggcggatctctgagactgagctgtgccgccagcggcttcaatgtgtacgcctctggaatgcactgggtccgacaggcccctggcaaaggacttgagtgggtcgccaaaatctaccccgacagcgactacacctattacgccgacagcgtgaagggcagattcaccatcagcgccgacaccagcaagaacaccgcctacctccagatgaactccctgagagccgaggacaccgccgtgtactactgtagcagagacagcagcttctactacgtgtacgctatggactactggggccagggcacactggtcacagtctcttctacgcgtgcctctacaaagggaccctccgtgtttcctctggctcccagcagcaagtctacaagcggaggaacagccgctctgggctgcctggtcaaggattactttcccgagcctgtgaccgtgtcctggaatagcggagcactgacaagcggcgtgcacacctttccagccgtgctgcaaagcagcggcctgtactctctgagcagcgtggtcacagtgcctagctctagcctgggcacccagacctacatctgcaatgtgaaccacaagcctagcaacaccaaggtggacaagagagtggaacccaagagctgtatccccgaggacacattcttcccaagccccgagagcagctgcgacgtgaagctggtggaaaagagcttcgagacagacaccaacctgaacttccagaacctgagcgtgatcggcctgcggatgctgttcgccaaaaccgtggccgtgaacttcctgctgaccgccaagctgttcttcct

SEQ ID NO: 40294 - DNA, 1931 bp, synthetic construct
  source 1..1931: mol_type = other DNA
atggccttaccagtgaccgccttgctcctgccgctggccttgctgctccacgccgccaggccggacatccagatgacacagagccctagcagcctgtctgccagcgtgggagacagagtgaccatcacctgtagagccagccaggacgtgaacacagccgtggcttggtatcagcagaagcctggcaaggcccctaagctgctgatctacagcgcctacttcctgtacagcggcgtgcccagcagattcagcggaagcagaagcggcaccgacttcaccctgacaatatccagcctccagcctgaggacttcgccacctactactgccagcagtacagcagatacagccccgtgacctttggacagggcaccaaggtggaaatcaagagactcgaggagggacagcctaaggccaatcctaccgtgacactgttccctccaagcagcgaagaactccaggccaacaaggccacacttgtgtgcctgatctccgacttctaccctggggctgtgacagtggcttggaaggccgatggatctcctgtgaaagccggcgtggaaaccaccaagccatccaagcagagcaacaacaaatacgccgccagctcctacctgagcctgacacctgagcagtggaagtcccacagatcctacagctgccaagtgacccacgaaggcagcaccgtggaaaagacagtggcccctacagagtgcagccccatcaagaccgatgtgattacaatggaccccaaggacaactgctccaaggacgccaacgataccctgctgctccagctgaccaacaccagcgcctactacatgtacgagatcctgctgggcaaggccaccctgtacgccgtgctggtgtctgccctggtgctgatggctatggtcaagcggaaggacagccggggacgcgccaagagaagcggatctggcgtgaagcagaccctgaatttcgacctgctgaagctggctggcgacgtggaatccaacccaggccctactagtatggactggatttggcgcatccttttccttgtcggcgctgctaccggcgcgcattccttcgaagaagttcagctggttgaaagtggtggcggcctggttcaacctggcggatctctgagactgagctgtgccgccagcggcttcaatgtgtacgcctctggaatgcactgggtccgacaggcccctggcaaaggacttgagtgggtcgccaaaatctaccccgacagcgactacacctattacgccgacagcgtgaagggcagattcaccatcagcgccgacaccagcaagaacaccgcctacctccagatgaactccctgagagccgaggacaccgccgtgtactactgtagcagagacagcagcttctactacgtgtacgctatggactactggggccagggcacactggtcacagtctcttctacgcgtgcctctacaaagggaccctccgtgtttcctctggctcccagcagcaagtctacaagcggaggaacagccgctctgggctgcctggtcaaggattactttcccgagcctgtgaccgtgtcctggaatagcggagcactgacaagcggcgtgcacacctttccagccgtgctgcaaagcagcggcctgtactctctgagcagcgtggtcacagtgcctagctctagcctgggcacccagacctacatctgcaatgtgaaccacaagcctagcaacaccaaggtggacaagagagtggaacccaagagctgtatccccgaggacacattcttcccaagccccgagagcagctgcgacgtgaagctggtggaaaagagcttcgagacagacaccaacctgaacttccagaacctgagcgtgatcggcctgcggatgctgttcgccaaaaccgtggccgtgaacttcctgctgaccgccaagctgttcttcct

SEQ ID NO: 40295 - DNA, 1916 bp, synthetic construct
  source 1..1916: mol_type = other DNA
atggccttaccagtgaccgccttgctcctgccgctggccttgctgctccacgccgccaggccggacatccagatgacacagagccctagcagcctgtctgccagcgtgggagacagagtgaccatcacctgtagagccagccaggatgtgtctacagccgtggcctggtatcagcagaagcctggaaaggcccctaagctgctgatctacagcgccagctttctgtactccggcgtgcccagcagattcagcggaagcagaagcggcaccgacttcaccctgacaatatccagcctccagcctgaggacttcgccacctactactgccagcagtacctgtaccagccttggacattcggccagggcaccaaggtggaaatcaagagactcgaggagggacagcctaaggccaatcctaccgtgacactgttccctccaagcagcgaagaactccaggccaacaaggccacacttgtgtgcctgatctccgacttctaccctggggctgtgacagtggcttggaaggccgatggatctcctgtgaaagccggcgtggaaaccaccaagccatccaagcagagcaacaacaaatacgccgccagctcctacctgagcctgacacctgagcagtggaagtcccacagatcctacagctgccaagtgacccacgaaggcagcaccgtggaaaagacagtggcccctacagagtgcagccccatcaagaccgatgtgattacaatggaccccaaggacaactgctccaaggacgccaacgataccctgctgctccagctgaccaacaccagcgcctactacatgtacgagatcctgctgggcaaggccaccctgtacgccgtgctggtgtctgccctggtgctgatggctatggtcaagcggaaggacagccggggacgcgccaagagaagcggatctggcgtgaagcagaccctgaatttcgacctgctgaagctggctggcgacgtggaatccaacccaggccctactagtatggactggatttggcgcatccttttccttgtcggcgctgctaccggcgcgcattccttcgaagaagttcagctggttgagtctggcggaggactggttcaacctggcggaagcctgagactgtcttgtgccgccagcggcttcaacatcgactactacggaatgcactgggtccgacaggcccctggcaaaggacttgaatgggtcgcctctctgtacggcggcagcgatagcacagattacgccgactctgtgaagggcagattcaccatcagcgccgacaccagcaagaacaccgcctacctccagatgaactccctgagagccgaagataccgccgtgtactactgctccagacagtacagcgcctacttcgactattggggccagggaaccctggtcaccgttagctctacgcgtgcctctacaaagggaccctccgtgtttcctctggctcccagcagcaagtctacaagcggaggaacagccgctctgggctgcctggtcaaggattactttcccgagcctgtgaccgtgtcctggaatagcggagcactgacaagcggcgtgcacacctttccagccgtgctgcaaagcagcggcctgtactctctgagcagcgtggtcacagtgcctagctctagcctgggcacccagacctacatctgcaatgtgaaccacaagcctagcaacaccaaggtggacaagagagtggaacccaagagctgtatccccgaggacacattcttcccaagccccgagagcagctgcgacgtgaagctggtggaaaagagcttcgagacagacaccaacctgaacttccagaacctgagcgtgatcggcctgcggatgctgttcgccaaaaccgtggccgtgaacttcctgctgaccgccaagctgttcttcct

SEQ ID NO: 40296 - DNA, 1922 bp, synthetic construct
  source 1..1922: mol_type = other DNA
atggccttaccagtgaccgccttgctcctgccgctggccttgctgctccacgccgccaggccggagatcgtgctgacacagtctcccgccacactgtcactgtctccaggcgaaagagccacactgagctgtagagccagccagagcgtgtcctcttacctggcctggtatcagcagaagcctggacaggctccccggctgctgatctacgatgccagcaatagagccacaggcatccccgccagattttctggctctggcagcggcaccgatttcaccctgaccataagcagcctggaacctgaggacttcgccgtgtactactgccagcagagaagcgactggcccctgacatttggcggcggaacaaaggtggaaatcaaactcgaggagggacagcctaaggccaatcctaccgtgacactgttccctccaagcagcgaagaactccaggccaacaaggccacacttgtgtgcctgatctccgacttctaccctggggctgtgacagtggcttggaaggccgatggatctcctgtgaaagccggcgtggaaaccaccaagccatccaagcagagcaacaacaaatacgccgccagctcctacctgagcctgacacctgagcagtggaagtcccacagatcctacagctgccaagtgacccacgaaggcagcaccgtggaaaagacagtggcccctacagagtgcagccccatcaagaccgatgtgattacaatggaccccaaggacaactgctccaaggacgccaacgataccctgctgctccagctgaccaacaccagcgcctactacatgtacgagatcctgctgggcaaggccaccctgtacgccgtgctggtgtctgccctggtgctgatggctatggtcaagcggaaggacagccggggacgcgccaagagaagcggatctggcgtgaagcagaccctgaatttcgacctgctgaagctggctggcgacgtggaatccaacccaggccctactagtatggactggatttggcgcatccttttccttgtcggcgctgctaccggcgcgcattccttcgaacaagttcagctggttcagagcggagccgaagtgaagaaacctggcagcagcgtgaaggtgtcctgcaaagcaagcggcggcacctttagctcctacgccatccactgggttcgacaggcaccaggacaaggactggaatggatgggcagaatcatccccatcgagggcagagcctactacgcccagaaattccagggcagagtgaccatcaccgccgacgagtctacaagcaccgcctacatggaactgagcagcctgagaagcgaggataccgctgtgtactattgcgccagaggccggtacagctacagatattggttcgactactggggccagggcaccctggttacagtctcttctacgcgtgcctctacaaagggaccctccgtgtttcctctggctcccagcagcaagtctacaagcggaggaacagccgctctgggctgcctggtcaaggattactttcccgagcctgtgaccgtgtcctggaatagcggagcactgacaagcggcgtgcacacctttccagccgtgctgcaaagcagcggcctgtactctctgagcagcgtggtcacagtgcctagctctagcctgggcacccagacctacatctgcaatgtgaaccacaagcctagcaacaccaaggtggacaagagagtggaacccaagagctgtatccccgaggacacattcttcccaagccccgagagcagctgcgacgtgaagctggtggaaaagagcttcgagacagacaccaacctgaacttccagaacctgagcgtgatcggcctgcggatgctgttcgccaaaaccgtggccgtgaacttcctgctgaccgccaagctgttcttcct

SEQ ID NO: 40297 - DNA, 1922 bp, synthetic construct
  source 1..1922: mol_type = other DNA
atggccttaccagtgaccgccttgctcctgccgctggccttgctgctccacgccgccaggccggagatcgtgctgacacagtctcccgccacactgtcactgtctccaggcgaaagagccacactgagctgtagagccagccagagcgtgtcctcttacctggcctggtatcagcagaagcctggacaggctccccggctgctgatctacgatgccagcaatagagccacaggcatccccgccagattttctggctctggcagcggcaccgatttcaccctgaccataagcagcctggaacctgaggacttcgccgtgtactactgccagcagagaagcaactggcccctgacctttggacagggcaccaaggtggaaatcaaactcgaggagggacagcctaaggccaatcctaccgtgacactgttccctccaagcagcgaagaactccaggccaacaaggccacacttgtgtgcctgatctccgacttctaccctggggctgtgacagtggcttggaaggccgatggatctcctgtgaaagccggcgtggaaaccaccaagccatccaagcagagcaacaacaaatacgccgccagctcctacctgagcctgacacctgagcagtggaagtcccacagatcctacagctgccaagtgacccacgaaggcagcaccgtggaaaagacagtggcccctacagagtgcagccccatcaagaccgatgtgattacaatggaccccaaggacaactgctccaaggacgccaacgataccctgctgctccagctgaccaacaccagcgcctactacatgtacgagatcctgctgggcaaggccaccctgtacgccgtgctggtgtctgccctggtgctgatggctatggtcaagcggaaggacagccggggacgcgccaagagaagcggatctggcgtgaagcagaccctgaatttcgacctgctgaagctggctggcgacgtggaatccaacccaggccctactagtatggactggatttggcgcatccttttccttgtcggcgctgctaccggcgcgcattccttcgaacaagttcagctggttcagagcggagccgaagtgaagaaacctggcagcagcgtgaaggtgtcctgcaaagcaagcggcggcacctttagcacctacgccatccactgggttcgacaggcaccaggacaaggactggaatggatgggcagaatcatccccatcgagggcagagcctactacgcccagaaattccagggcagagtgaccatcaccgccgacgagtctacaagcaccgcctacatggaactgagcagcctgagaagcgaggataccgctgtgtactattgcgccagaggccggtacagctacagatattggttcgactactggggccagggcaccctggttacagtctcttctacgcgtgcctctacaaagggaccctccgtgtttcctctggctcccagcagcaagtctacaagcggaggaacagccgctctgggctgcctggtcaaggattactttcccgagcctgtgaccgtgtcctggaatagcggagcactgacaagcggcgtgcacacctttccagccgtgctgcaaagcagcggcctgtactctctgagcagcgtggtcacagtgcctagctctagcctgggcacccagacctacatctgcaatgtgaaccacaagcctagcaacaccaaggtggacaagagagtggaacccaagagctgtatccccgaggacacattcttcccaagccccgagagcagctgcgacgtgaagctggtggaaaagagcttcgagacagacaccaacctgaacttccagaacctgagcgtgatcggcctgcggatgctgttcgccaaaaccgtggccgtgaacttcctgctgaccgccaagctgttcttcct

SEQ ID NO: 40298 - DNA, 1964 bp, synthetic construct
  source 1..1964: mol_type = other DNA
atggccttaccagtgaccgccttgctcctgccgctggccttgctgctccacgccgccaggccggacatccagatgacacagagcccctctagcctgtctgccagcgtgggagacagagtgaccatcacctgtagagccagccagagcatcagaaactacctgaactggtatcagcaaaagcccggcaaggcccctgagctgctgattcatgctgcaagcagcctccagagcggcgtgccaagcagattttctggcagcggcagcggaaccgacttcaccctgacaatatctagcctccagcctgaggacttcgccagctactactgccagcagagctacagcgcccctcctatcacctttggacagggcaccagactggaaatcaagctcgaggagggacagcctaaggccaatcctaccgtgacactgttccctccaagcagcgaagaactccaggccaacaaggccacacttgtgtgcctgatctccgacttctaccctggggctgtgacagtggcttggaaggccgatggatctcctgtgaaagccggcgtggaaaccaccaagccatccaagcagagcaacaacaaatacgccgccagctcctacctgagcctgacacctgagcagtggaagtcccacagatcctacagctgccaagtgacccacgaaggcagcaccgtggaaaagacagtggcccctacagagtgcagccccatcaagaccgatgtgattacaatggaccccaaggacaactgctccaaggacgccaacgataccctgctgctccagctgaccaacaccagcgcctactacatgtacgagatcctgctgggcaaggccaccctgtacgccgtgctggtgtctgccctggtgctgatggctatggtcaagcggaaggacagccggggacgcgccaagagaagcggatctggcgtgaagcagaccctgaatttcgacctgctgaagctggctggcgacgtggaatccaacccaggccctactagtatggactggatttggcgcatccttttccttgtcggcgctgctaccggcgcgcattccttcgaacaggttcagctccagcagtctggacctggcctggtcaagcctagccagacactgtctctgacctgtgccatcagcggcgatagcgtgtcctctaatagagccgcctggaactggatcagacagagccctagcagaggactccagtggctgggcagaacctactaccgcagcaagtggtacaacgactacgccgtgtctctgcggagccggatcaccatcaatcccgtgaccagcaagaaccaggtggccctgcacatgaacagcgtgacccctgaagataccgccgtgtactactgtgccagagccggaattgtggtggtgcccggacctgagacattctactactacgaccacggcctggacgtgtggggccagggaacaacagtgactgtctcttctacgcgtgcctctacaaagggaccctccgtgtttcctctggctcccagcagcaagtctacaagcggaggaacagccgctctgggctgcctggtcaaggattactttcccgagcctgtgaccgtgtcctggaatagcggagcactgacaagcggcgtgcacacctttccagccgtgctgcaaagcagcggcctgtactctctgagcagcgtggtcacagtgcctagctctagcctgggcacccagacctacatctgcaatgtgaaccacaagcctagcaacaccaaggtggacaagagagtggaacccaagagctgtatccccgaggacacattcttcccaagccccgagagcagctgcgacgtgaagctggtggaaaagagcttcgagacagacaccaacctgaacttccagaacctgagcgtgatcggcctgcggatgctgttcgccaaaaccgtggccgtgaacttcctgctgaccgccaagctgttcttcct

SEQ ID NO: 40299 - DNA, 1895 bp, synthetic construct
  source 1..1895: mol_type = other DNA
atggccttaccagtgaccgccttgctcctgccgctggccttgctgctccacgccgccaggccggacatccagctgacacagagccctagcacactgagcgccagcatgggcgacagagtgaccatcacatgtagcgcctctagcagcgtgcggttcatccactggtatcagcagaagcctggcaaggcccctaagcggctgatctacgataccagcaaactggcctctggcgtgcccagcagattttctggctctggcagcggcaccgacttcaccctgacaatatctagcctccagcctgaggacttcgccacctactactgtcagcagtggggcagcagccctttcacctttggacagggcaccaaggtggaaatcaagctcgaggagggacagcctaaggccaatcctaccgtgacactgttccctccaagcagcgaagaactccaggccaacaaggccacacttgtgtgcctgatctccgacttctaccctggggctgtgacagtggcttggaaggccgatggatctcctgtgaaagccggcgtggaaaccaccaagccatccaagcagagcaacaacaaatacgccgccagctcctacctgagcctgacacctgagcagtggaagtcccacagatcctacagctgccaagtgacccacgaaggcagcaccgtggaaaagacagtggcccctacagagtgcagccccatcaagaccgatgtgattacaatggaccccaaggacaactgctccaaggacgccaacgataccctgctgctccagctgaccaacaccagcgcctactacatgtacgagatcctgctgggcaaggccaccctgtacgccgtgctggtgtctgccctggtgctgatggctatggtcaagcggaaggacagccggggacgcgccaagagaagcggatctggcgtgaagcagaccctgaatttcgacctgctgaagctggctggcgacgtggaatccaacccaggccctactagtatggactggatttggcgcatccttttccttgtcggcgctgctaccggcgcgcattccttcgaagtgcagctggttgagtacggtggcggactggttcaacctggcggtagcctgagactgtcttgtgccgccagcggcttcaacatcaaggactactatatccactgggtccgacaggccccaggcaaaggacttgaatgggttgcctggatcgaccccgagaacggcgataccgagttcgtgcccaagtttcagggcagagccaccatgagcgccgacacctctaagaacacagcctacctccagatgaacagcctgagagccgaggacaccgccgtgtactactgtaaaaccggcggcttttggggccagggcacactggtcacagtcagctctacgcgtgcctctacaaagggaccctccgtgtttcctctggctcccagcagcaagtctacaagcggaggaacagccgctctgggctgcctggtcaaggattactttcccgagcctgtgaccgtgtcctggaatagcggagcactgacaagcggcgtgcacacctttccagccgtgctgcaaagcagcggcctgtactctctgagcagcgtggtcacagtgcctagctctagcctgggcacccagacctacatctgcaatgtgaaccacaagcctagcaacaccaaggtggacaagagagtggaacccaagagctgtatccccgaggacacattcttcccaagccccgagagcagctgcgacgtgaagctggtggaaaagagcttcgagacagacaccaacctgaacttccagaacctgagcgtgatcggcctgcggatgctgttcgccaaaaccgtggccgtgaacttcctgctgaccgccaagctgttcttccttaa

SEQ ID NO: 40300 - DNA, 1910 bp, synthetic construct
  source 1..1910: mol_type = other DNA
atggccttaccagtgaccgccttgctcctgccgctggccttgctgctccacgccgccaggccggacatccagatgacacagagccctagcagcctgtctgccagcgtgggagacagagtgaccatcacatgcaaggccagccaggatgtgggcacagccgtggattggtatcagcagaagcctggcaaggcccctaagctgctgatctactgggccagcacaagacacacaggcgtgcccagcagattttctggcagcggctctggcaccgacttcaccctgacaatatccagcctccagcctgaggacttcgccacctactactgccagcagtacaacagctaccctctgaccttcggccagggcaccaaggtggaaatcaaaagactcgaggagggacagcctaaggccaatcctaccgtgacactgttccctccaagcagcgaagaactccaggccaacaaggccacacttgtgtgcctgatctccgacttctaccctggggctgtgacagtggcttggaaggccgatggatctcctgtgaaagccggcgtggaaaccaccaagccatccaagcagagcaacaacaaatacgccgccagctcctacctgagcctgacacctgagcagtggaagtcccacagatcctacagctgccaagtgacccacgaaggcagcaccgtggaaaagacagtggcccctacagagtgcagccccatcaagaccgatgtgattacaatggaccccaaggacaactgctccaaggacgccaacgataccctgctgctccagctgaccaacaccagcgcctactacatgtacgagatcctgctgggcaaggccaccctgtacgccgtgctggtgtctgccctggtgctgatggctatggtcaagcggaaggacagccggggacgcgccaagagaagcggatctggcgtgaagcagaccctgaatttcgacctgctgaagctggctggcgacgtggaatccaacccaggccctactagtatggactggatttggcgcatccttttccttgtcggcgctgctaccggcgcgcattccttcgaagtgcagctggttgaatcaggtggcggcctggttcaacctggcggatctctgagactgagctgtgccgccagcggctacacctttaccgagtacacaatccactgggtccgacaggcccctggcaaaggacttgagtgggtcgccaacatcaaccccaacaatggcggcaccacctacaaccagaagttcgaggacagattcaccatcagccgggacaacagcaagaacaccctgtacctccagatgaactccctgagagccgaggacaccgccgtgtactattgtgccagaggctggaacttcgactactggggccagggaacactggtcaccgttagctctacgcgtgcctctacaaagggaccctccgtgtttcctctggctcccagcagcaagtctacaagcggaggaacagccgctctgggctgcctggtcaaggattactttcccgagcctgtgaccgtgtcctggaatagcggagcactgacaagcggcgtgcacacctttccagccgtgctgcaaagcagcggcctgtactctctgagcagcgtggtcacagtgcctagctctagcctgggcacccagacctacatctgcaatgtgaaccacaagcctagcaacaccaaggtggacaagagagtggaacccaagagctgtatccccgaggacacattcttcccaagccccgagagcagctgcgacgtgaagctggtggaaaagagcttcgagacagacaccaacctgaacttccagaacctgagcgtgatcggcctgcggatgctgttcgccaaaaccgtggccgtgaacttcctgctgaccgccaagctgttcttccttaa

SEQ ID NO: 40301 - DNA, 1957 bp, synthetic construct
  source 1..1957: mol_type = other DNA
atggccttaccagtgaccgccttgctcctgccgctggccttgctgctccacgccgccaggccgagctacgtgctgacacagcctccatccgtgtctgtggctccaggacagaccgccagaatcacatgcggcggcaacaacatcggcggcaagagcgtgcactggtatcagcagccacctggacaggctccagtggtggtggtgtacgacgacagcgatagacctagcggcatccccgagagattcagcggcagcaattccggcaataccgccacactgaccatcagcagagtggaagctggcgacgaggccgtgtactactgccaagtgtgggacagcagcagcgatcacgtggtgtttggcggcggaacaaagctgacagtgcttctcgaggagggacagcctaaggccaatcctaccgtgacactgttccctccaagcagcgaagaactccaggccaacaaggccacacttgtgtgcctgatctccgacttctaccctggggctgtgacagtggcttggaaggccgatggatctcctgtgaaagccggcgtggaaaccaccaagccatccaagcagagcaacaacaaatacgccgccagctcctacctgagcctgacacctgagcagtggaagtcccacagatcctacagctgccaagtgacccacgaaggcagcaccgtggaaaagacagtggcccctacagagtgcagccccatcaagaccgatgtgattacaatggaccccaaggacaactgctccaaggacgccaacgataccctgctgctccagctgaccaacaccagcgccaccatcctgtacgagatcctgctgggcaaggccaccctgtacgccgtgctggtgtctgccctggtgctgatggctatggtcaagcggaaggacagccggggaccgcgccaagagaagcggatctggcgtgaagcagaccctgaatttcgacctgctgaagctggctggcgacgtggaatccaacccaggccctactagtatggactggatttggcgcatccttttccttgtcggcgctgctaccggcgcgcattccttcgaacaactccagctgcaagagtctggccctggcctggtcaagcctagcgaaacactgagcctgacctgtaccgtgtctggcggctctatcagctccagcagctatttctggggctggatcagacaacctcctggcaaaggactggaatggatcggctccatctactacagcggcatcacctactacaaccccagcctgaagtccagagtgaccatctccgtggacaccagcaagaaccagttctccctgaagctgagcagcgtgacagccgccgataccgccgtgtattattgtgccagacatgacggcgctgtggccggcctgtttgattattggggacagggcaccctggtcaccgtgtcatctgctacgcgtgcctctacaaagggaccctccgtgtttcctctggctcccagcagcaagtctacaagcggaggaacagccgctctgggctgcctggtcaaggattactttcccgagcctgtgaccgtgtcctggaatagcggagcactgacaagcggcgtgcacacctttccagccgtgctgcaaagcagcggcctgtactctctgagcagcgtggtcacagtgcctagctctagcctgggcacccagacctacatctgcaatgtgaaccacaagcctagcaacaccaaggtggacaagagagtggaacccaagagctgtgaagtgaaaaccgactccaccgaccacgtgaagcccaaagagacagagaacaccaagcagcccagcaagagctgccacaagcccaaggccatcgtgcacaccgagaaagtgaacatgatgagcctgaccgtgctgggcttcagaatcctgctgctgaaagtggccggctttaacctgctgatgaccctgcggctgtggtccagc

SEQ ID NO: 40302 - DNA, 1954 bp, synthetic construct
  source 1..1954: mol_type = other DNA
atggccttaccagtgaccgccttgctcctgccgctggccttgctgctccacgccgccaggccggacatccagatgacacagagccctagcagcctgtctgccagcgtgggagacagagtgaccatcacatgcaaggccagcgaccacatcaacaactggctggcctggtatcagcagaagcctggacaggcccctaagctgctgatctacggcgctaccacactggaaacaggcgtgcccagcagattttctggcagcggctctggcaccgactacaccctgacaatatccagcctccagcctgaggacttcgccacctactactgtcagcagagctggaacaccccttggacattcggccagggcaccaagctggaaatcaagagactcgaggagggacagcctaaggccaatcctaccgtgacactgttccctccaagcagcgaagaactccaggccaacaaggccacacttgtgtgcctgatctccgacttctaccctggggctgtgacagtggcttggaaggccgatggatctcctgtgaaagccggcgtggaaaccaccaagccatccaagcagagcaacaacaaatacgccgccagctcctacctgagcctgacacctgagcagtggaagtcccacagatcctacagctgccaagtgacccacgaaggcagcaccgtggaaaagacagtggcccctacagagtgcagccccatcaagaccgatgtgattacaatggaccccaaggacaactgctccaaggacgccaacgataccctgctgctccagctgaccaacaccagcgccaccatcctgtacgagatcctgctgggcaaggccaccctgtacgccgtgctggtgtctgccctggtgctgatggctatggtcaagcggaaggacagccggggaccgcgccaagagaagcggatctggcgtgaagcagaccctgaatttcgacctgctgaagctggctggcgacgtggaatccaacccaggccctactagtatggactggatttggcgcatccttttccttgtcggcgctgctaccggcgcgcattccttcgaacaagttcagcttcaacagcctggcgctgagctggtcaaacctggcgcttctgtgaagatgagctgcaaagccagcggctacaccttcagcagctactggatcaactggatgaagcagaaacccggccagggactcgaatggatcggccaaatctatcccggcgacggcgacaccaactacaacggcaagttcaagggcagagccacactgaccgccgatacctctagcagcacagcctacatgcagctgagcagcctgaccagcgaagatagcgccgtgtacttctgtgcccggtccatcacaacagtcgtgggctgcgctatggactattggggccagggaacaagcgtgaccgtgtctagtacgcgtgcctctacaaagggaccctccgtgtttcctctggctcccagcagcaagtctacaagcggaggaacagccgctctgggctgcctggtcaaggattactttcccgagcctgtgaccgtgtcctggaatagcggagcactgacaagcggcgtgcacacctttccagccgtgctgcaaagcagcggcctgtactctctgagcagcgtggtcacagtgcctagctctagcctgggcacccagacctacatctgcaatgtgaaccacaagcctagcaacaccaaggtggacaagagagtggaacccaagagctgtgaagtgaaaaccgactccaccgaccacgtgaagcccaaagagacagagaacaccaagcagcccagcaagagctgccacaagcccaaggccatcgtgcacaccgagaaagtgaacatgatgagcctgaccgtgctgggcttcagaatcctgctgctgaaagtggccggctttaacctgctgatgaccctgcggctgtggtccagc

SEQ ID NO: 40303 - DNA, 1954 bp, synthetic construct
  source 1..1954: mol_type = other DNA
atggccttaccagtgaccgccttgctcctgccgctggccttgctgctccacgccgccaggccggacatccagatgacacagagccctagcagcctgtctgccagcgtgggagacagagtgaccatcacatgcaaggccagcgaccacatcaacaactggctggcctggtatcagcagaagcctggacaggcccctaagctgctgatctacggcgctaccacactggaaacaggcgtgcccagcagattttctggcagcggctctggcaccgactacaccctgacaatatccagcctccagcctgaggacttcgccacctactactgtcagcagagctggaacaccccttggacattcggccagggcaccaagctggaaatcaagagactcgaggagggacagcctaaggccaatcctaccgtgacactgttccctccaagcagcgaagaactccaggccaacaaggccacacttgtgtgcctgatctccgacttctaccctggggctgtgacagtggcttggaaggccgatggatctcctgtgaaagccggcgtggaaaccaccaagccatccaagcagagcaacaacaaatacgccgccagctcctacctgagcctgacacctgagcagtggaagtcccacagatcctacagctgccaagtgacccacgaaggcagcaccgtggaaaagacagtggcccctacagagtgcagccccatcaagaccgatgtgattacaatggaccccaaggacaactgctccaaggacgccaacgataccctgctgctccagctgaccaacaccagcgccaccatcctgtacgagatcctgctgggcaaggccaccctgtacgccgtgctggtgtctgccctggtgctgatggctatggtcaagcggaaggacagccggggaccgcgccaagagaagcggatctggcgtgaagcagaccctgaatttcgacctgctgaagctggctggcgacgtggaatccaacccaggccctactagtatggactggatttggcgcatccttttccttgtcggcgctgctaccggcgcgcattccttcgaacaagttcagcttcaacagcctggcgctgagctggtcaaacctggcgcttctgtgaagatgagctgcaaagccagcggctacgccttcagcagctcttggatcaactggatgaagcagaaacccggccagggactcgaatggatcggccaaatctatcccggcgacggcgacaccaactacaacggcaagttcaagggcagagccacactgaccgccgatacctctagcagcacagcctacatgcagctgagcagcctgaccagcgaagatagcgccgtgtacttctgtgcccggtccatcacaacagtcgtgggctgcgctatggactattggggccagggaacaagcgtgaccgtgtctagtacgcgtgcctctacaaagggaccctccgtgtttcctctggctcccagcagcaagtctacaagcggaggaacagccgctctgggctgcctggtcaaggattactttcccgagcctgtgaccgtgtcctggaatagcggagcactgacaagcggcgtgcacacctttccagccgtgctgcaaagcagcggcctgtactctctgagcagcgtggtcacagtgcctagctctagcctgggcacccagacctacatctgcaatgtgaaccacaagcctagcaacaccaaggtggacaagagagtggaacccaagagctgtgaagtgaaaaccgactccaccgaccacgtgaagcccaaagagacagagaacaccaagcagcccagcaagagctgccacaagcccaaggccatcgtgcacaccgagaaagtgaacatgatgagcctgaccgtgctgggcttcagaatcctgctgctgaaagtggccggctttaacctgctgatgaccctgcggctgtggtccagc

SEQ ID NO: 40304 - DNA, 1954 bp, synthetic construct
  source 1..1954: mol_type = other DNA
atggccttaccagtgaccgccttgctcctgccgctggccttgctgctccacgccgccaggccggagatcgtgctgacacagagccctgccaccctgtctctgagccctggcgaaagagccaccctgagctgtagagccagccagagcgtgtccagctacctggcctggtatcagcagaagcccggccaggctccccggctgctgatctacgatgccagcaatagagccaccggcatccccgccagattttccggctctggcagcggcaccgacttcaccctgaccatcagctccctggaacccgaggacttcgccgtgtactactgccagcagcggagcaactggcccatcacattcggccagggcacccggctggaaatcaaactcgaggagggacagcctaaggccaatcctaccgtgacactgttccctccaagcagcgaagaactccaggccaacaaggccacacttgtgtgcctgatctccgacttctaccctggggctgtgacagtggcttggaaggccgatggatctcctgtgaaagccggcgtggaaaccaccaagccatccaagcagagcaacaacaaatacgccgccagctcctacctgagcctgacacctgagcagtggaagtcccacagatcctacagctgccaagtgacccacgaaggcagcaccgtggaaaagacagtggcccctacagagtgcagccccatcaagaccgatgtgattacaatggaccccaaggacaactgctccaaggacgccaacgataccctgctgctccagctgaccaacaccagcgccaccatcctgtacgagatcctgctgggcaaggccaccctgtacgccgtgctggtgtctgccctggtgctgatggctatggtcaagcggaaggacagccggggaccgcgccaagagaagcggatctggcgtgaagcagaccctgaatttcgacctgctgaagctggctggcgacgtggaatccaacccaggccctactagtatggactggatttggcgcatccttttccttgtcggcgctgctaccggcgcgcattccttcgaagaagtgcagctggtggaatcaggcggcggactggtgcagcctggcagaagcctgagactgagctgtgccgccagcggcttcaccttcaacgactacgccatgcactgggtgcgccaggcccctggaaaaggactggaatgggtgtccacaatcagctggaacagcggcagcatcggctacgccgatagcgtgaagggccggttcaccatcagccgggacaacgccaagaagtccctgtacctccagatgaacagcctgcgggccgaggacacagccctgtactattgcgccaaggacatccagtacggcaactactactacggcatggacgtgtggggccagggaaccaccgtgaccgtgtcatctacgcgtgcctctacaaagggaccctccgtgtttcctctggctcccagcagcaagtctacaagcggaggaacagccgctctgggctgcctggtcaaggattactttcccgagcctgtgaccgtgtcctggaatagcggagcactgacaagcggcgtgcacacctttccagccgtgctgcaaagcagcggcctgtactctctgagcagcgtggtcacagtgcctagctctagcctgggcacccagacctacatctgcaatgtgaaccacaagcctagcaacaccaaggtggacaagagagtggaacccaagagctgtgaagtgaaaaccgactccaccgaccacgtgaagcccaaagagacagagaacaccaagcagcccagcaagagctgccacaagcccaaggccatcgtgcacaccgagaaagtgaacatgatgagcctgaccgtgctgggcttcagaatcctgctgctgaaagtggccggctttaacctgctgatgaccctgcggctgtggtccagc

SEQ ID NO: 40305 - DNA, 1963 bp, synthetic construct
  source 1..1963: mol_type = other DNA
atggccttaccagtgaccgccttgctcctgccgctggccttgctgctccacgccgccaggccgatccagatgacccagagccccagcagcctgtctgccagcgtgggcgacagagtgaccatcacctgtcggagcagccagagcatcgtgcactccgtgggcaacaccttcctggaatggtatcagcagaagcccggcaaggcccccaagctgctgatctacaaggtgtccaacagattcagcggcgtgcccagcaggtttagcggctctggcagcggcaccgacttcaccctgaccatctctagcctccagcccgaggacttcgccacctactactgttttcaaggcagccagttcccctacaccttcggccagggaacaaaggtggaaatcaagcggctcgaggagggacagcctaaggccaatcctaccgtgacactgttccctccaagcagcgaagaactccaggccaacaaggccacacttgtgtgcctgatctccgacttctaccctggggctgtgacagtggcttggaaggccgatggatctcctgtgaaagccggcgtggaaaccaccaagccatccaagcagagcaacaacaaatacgccgccagctcctacctgagcctgacacctgagcagtggaagtcccacagatcctacagctgccaagtgacccacgaaggcagcaccgtggaaaagacagtggcccctacagagtgcagccccatcaagaccgatgtgattacaatggaccccaaggacaactgctccaaggacgccaacgataccctgctgctccagctgaccaacaccagcgccaccatcctgtacgagatcctgctgggcaaggccaccctgtacgccgtgctggtgtctgccctggtgctgatggctatggtcaagcggaaggacagccggggaccgcgccaagagaagcggatctggcgtgaagcagaccctgaatttcgacctgctgaagctggctggcgacgtggaatccaacccaggccctactagtatggactggatttggcgcatccttttccttgtcggcgctgctaccggcgcgcattccttcgaagaagtgcaactggtggaaagcggaggcggcctggtgcagcctggcggatctctgagactgagctgtgccgccagcggctacgagttcagccggtcctggatgaactgggtgcgccaggcccctggcaagggactggaatgggtgggaagaatctaccccggcgacggcgacaccaactacagcggcaagttcaagggccggttcaccatcagcgccgacaccagcaagaacaccgcctacctccagatgaacagcctgcgggccgaggataccgccgtgtactactgtgccagagatggcagctcctgggactggtacttcgacgtgtggggacagggaacccttgtgaccgtgtccagcacgcgtgcctctacaaagggaccctccgtgtttcctctggctcccagcagcaagtctacaagcggaggaacagccgctctgggctgcctggtcaaggattactttcccgagcctgtgaccgtgtcctggaatagcggagcactgacaagcggcgtgcacacctttccagccgtgctgcaaagcagcggcctgtactctctgagcagcgtggtcacagtgcctagctctagcctgggcacccagacctacatctgcaatgtgaaccacaagcctagcaacaccaaggtggacaagagagtggaacccaagagctgtgaagtgaaaaccgactccaccgaccacgtgaagcccaaagagacagagaacaccaagcagcccagcaagagctgccacaagcccaaggccatcgtgcacaccgagaaagtgaacatgatgagcctgaccgtgctgggcttcagaatcctgctgctgaaagtggccggctttaacctgctgatgaccctgcggctgtggtccagc

SEQ ID NO: 40306 - DNA, 1975 bp, synthetic construct
  source 1..1975: mol_type = other DNA
atggccttaccagtgaccgccttgctcctgccgctggccttgctgctccacgccgccaggccggaactgcaaagcgtgctgacacagcctcctagcgcctctggaacacctggacagagagtgacaatcagctgctccggcagctccagcaacatcggcagcaactacgtgaactggtatcagcagctgcctggcacagcccctaaactgctgatctacggcgactaccagaggccaagcggcgtgccagatagattcagcggcagcaagtctggcacaagcgccagcctggctatctctggactgagaagcgaggacgaggccgactactactgtgccaccagagatgatagcctgagcggcagcgtggtgtttggcacaggcacaaagctgacagtgctgggcctcgaggagggacagcctaaggccaatcctaccgtgacactgttccctccaagcagcgaagaactccaggccaacaaggccacacttgtgtgcctgatctccgacttctaccctggggctgtgacagtggcttggaaggccgatggatctcctgtgaaagccggcgtggaaaccaccaagccatccaagcagagcaacaacaaatacgccgccagctcctacctgagcctgacacctgagcagtggaagtcccacagatcctacagctgccaagtgacccacgaaggcagcaccgtggaaaagacagtggcccctacagagtgcagccccatcaagaccgatgtgattacaatggaccccaaggacaactgctccaaggacgccaacgataccctgctgctccagctgaccaacaccagcgccaccatcctgtacgagatcctgctgggcaaggccaccctgtacgccgtgctggtgtctgccctggtgctgatggctatggtcaagcggaaggacagccggggaccgcgccaagagaagcggatctggcgtgaagcagaccctgaatttcgacctgctgaagctggctggcgacgtggaatccaacccaggccctactagtatggactggatttggcgcatccttttccttgtcggcgctgctaccggcgcgcattccttcgaagaagttcagctggttcagagcggagccgaagtgaagaagcctggcgagagcctgaagattagctgcaaaggcagcggctacggcttcaccagctattggatcggctgggtccgacagatgcctggcaaaggactggaatggatgggcatcattcaccccgacgacagcgacaccaagtacagccctagcttccagggccaagtgaccatcagcgccgacaagagcatcagcacagcctacctccagtggtcctctctgaaggccagcgataccgccatgtactactgcgccagcagctacctgagaggactgtggggcggctacttcgatttttggggccagggcacactggtcaccgttagttctacgcgtgcctctacaaagggaccctccgtgtttcctctggctcccagcagcaagtctacaagcggaggaacagccgctctgggctgcctggtcaaggattactttcccgagcctgtgaccgtgtcctggaatagcggagcactgacaagcggcgtgcacacctttccagccgtgctgcaaagcagcggcctgtactctctgagcagcgtggtcacagtgcctagctctagcctgggcacccagacctacatctgcaatgtgaaccacaagcctagcaacaccaaggtggacaagagagtggaacccaagagctgtgaagtgaaaaccgactccaccgaccacgtgaagcccaaagagacagagaacaccaagcagcccagcaagagctgccacaagcccaaggccatcgtgcacaccgagaaagtgaacatgatgagcctgaccgtgctgggcttcagaatcctgctgctgaaagtggccggctttaacctgctgatgaccctgcggctgtggtccagc

SEQ ID NO: 40307 - DNA, 1966 bp, synthetic construct
  source 1..1966: mol_type = other DNA
atggccttaccagtgaccgccttgctcctgccgctggccttgctgctccacgccgccaggccggacttcgtgatgacacagagccctgatagcctggccgtgtctctcggcgagcgagtgaccatgagctgcaagtctagccagagcctgctgaacagcggcaaccagaagaactacctgacctggtatcagcagaagcccggccagcctcctaagctgctgatctactgggccagcaccagagaaagcggcgtgcccgatagattttctggctctggcagcggcaccgacttcaccctgacaatttctagcctgcaagccgaggacgtggccgtgtactactgccagaacgactacagctacccctacaccttcggccagggcaccaagctggaaatcaaactcgaggagggacagcctaaggccaatcctaccgtgacactgttccctccaagcagcgaagaactccaggccaacaaggccacacttgtgtgcctgatctccgacttctaccctggggctgtgacagtggcttggaaggccgatggatctcctgtgaaagccggcgtggaaaccaccaagccatccaagcagagcaacaacaaatacgccgccagctcctacctgagcctgacacctgagcagtggaagtcccacagatcctacagctgccaagtgacccacgaaggcagcaccgtggaaaagacagtggcccctacagagtgcagccccatcaagaccgatgtgattacaatggaccccaaggacaactgctccaaggacgccaacgataccctgctgctccagctgaccaacaccagcgccaccatcctgtacgagatcctgctgggcaaggccaccctgtacgccgtgctggtgtctgccctggtgctgatggctatggtcaagcggaaggacagccggggaccgcgccaagagaagcggatctggcgtgaagcagaccctgaatttcgacctgctgaagctggctggcgacgtggaatccaacccaggccctactagtatggactggatttggcgcatccttttccttgtcggcgctgctaccggcgcgcattccttcgaagaagtgcaactggttcagagcggagccgagctgaagaaacctggggccagcgtgaaggtgtcctgtaaagccagcggctacacctttaccgactactacatgaaatgggtccgacaggccccaggccagggactcgaatggatcggcgatattatccccagcaacggggccaccttctacaaccagaaattcaagggccgcgtgaccatcaccgtggacaagagcacaagcaccgcctacatggaactgagcagcctgagaagcgaggacaccgccgtgtattattgcgccagaagccatctgctgcgggccagttggttcgcctattggggacagggaaccctggtcaccgttagctctacgcgtgcctctacaaagggaccctccgtgtttcctctggctcccagcagcaagtctacaagcggaggaacagccgctctgggctgcctggtcaaggattactttcccgagcctgtgaccgtgtcctggaatagcggagcactgacaagcggcgtgcacacctttccagccgtgctgcaaagcagcggcctgtactctctgagcagcgtggtcacagtgcctagctctagcctgggcacccagacctacatctgcaatgtgaaccacaagcctagcaacaccaaggtggacaagagagtggaacccaagagctgtgaagtgaaaaccgactccaccgaccacgtgaagcccaaagagacagagaacaccaagcagcccagcaagagctgccacaagcccaaggccatcgtgcacaccgagaaagtgaacatgatgagcctgaccgtgctgggcttcagaatcctgctgctgaaagtggccggctttaacctgctgatgaccctgcggctgtggtccagc

SEQ ID NO: 40308 - DNA, 1972 bp, synthetic construct
  source 1..1972: mol_type = other DNA
atggccttaccagtgaccgccttgctcctgccgctggccttgctgctccacgccgccaggccggagatcgtgctgacacagtctcccgccacactgtcactgtctccaggcgaaagagccacactgagctgtagcgtgtccagcagcatcagcagcagcaacctgcactggtatcagcagaagcctggacaggcccctcggctgctgatctacgccacatctaatctggcctctggcatccccgccagattttctggctctggaagcggcaccgacttcaccctgaccataagcagcctggaacctgaggacttcgccgtgtactactgccagcagtggtccagctatccccacacatttggcggaggcaccaaggtggaaatcaagagactcgaggagggacagcctaaggccaatcctaccgtgacactgttccctccaagcagcgaagaactccaggccaacaaggccacacttgtgtgcctgatctccgacttctaccctggggctgtgacagtggcttggaaggccgatggatctcctgtgaaagccggcgtggaaaccaccaagccatccaagcagagcaacaacaaatacgccgccagctcctacctgagcctgacacctgagcagtggaagtcccacagatcctacagctgccaagtgacccacgaaggcagcaccgtggaaaagacagtggcccctacagagtgcagccccatcaagaccgatgtgattacaatggaccccaaggacaactgctccaaggacgccaacgataccctgctgctccagctgaccaacaccagcgccaccatcctgtacgagatcctgctgggcaaggccaccctgtacgccgtgctggtgtctgccctggtgctgatggctatggtcaagcggaaggacagccggggaccgcgccaagagaagcggatctggcgtgaagcagaccctgaatttcgacctgctgaagctggctggcgacgtggaatccaacccaggccctactagtatggactggatttggcgcatccttttccttgtcggcgctgctaccggcgcgcattccttcgaacaggttcagctggttcagagcggagccgaagtgaagaaacctggggcctctgtgaaggtgtcctgcaaggcttccggctacacctttaccaactacctgatcgagtgggtccgacaggctccaggacaaggactggaatggatgggcctgattaaccctggcagcggcggcaccaactacaacgagaagttcaagggcagagtgaccatgaccaccgacaccagcacaagcaccgcctacatggaactgcggagcctgagaagcgacgacaccgccgtgtattattgcgccagaagaagccctctcggctcttggatctactacgcctatgacggcgtggcctattggggccagggaacactggttacagtgtcctctacgcgtgcctctacaaagggaccctccgtgtttcctctggctcccagcagcaagtctacaagcggaggaacagccgctctgggctgcctggtcaaggattactttcccgagcctgtgaccgtgtcctggaatagcggagcactgacaagcggcgtgcacacctttccagccgtgctgcaaagcagcggcctgtactctctgagcagcgtggtcacagtgcctagctctagcctgggcacccagacctacatctgcaatgtgaaccacaagcctagcaacaccaaggtggacaagagagtggaacccaagagctgtgaagtgaaaaccgactccaccgaccacgtgaagcccaaagagacagagaacaccaagcagcccagcaagagctgccacaagcccaaggccatcgtgcacaccgagaaagtgaacatgatgagcctgaccgtgctgggcttcagaatcctgctgctgaaagtggccggctttaacctgctgatgaccctgcggctgtggtccagc

SEQ ID NO: 40309 - DNA, 1939 bp, synthetic construct
  source 1..1939: mol_type = other DNA
atggccttaccagtgaccgccttgctcctgccgctggccttgctgctccacgccgccaggccgcagatcgtgctgacacagagccccgccatcatgtctgttagccctggcgagaaagtgaccatgacctgtagcgccagcagcagcgtgaactacatgcactggttccagcagaagcccggcacaagccctaagctgtgggtgtacagcaccagcaatctggcctctggcgtgccagccagattttctggctctggcagcggcaccagctacagcctgacaatcagcagcatggaagccgaggatgccgccacctactattgtcagcagcggagcatctacccaccttggacatttggcggaggcaccaagctggaaatcaaactcgaggagggacagcctaaggccaatcctaccgtgacactgttccctccaagcagcgaagaactccaggccaacaaggccacacttgtgtgcctgatctccgacttctaccctggggctgtgacagtggcttggaaggccgatggatctcctgtgaaagccggcgtggaaaccaccaagccatccaagcagagcaacaacaaatacgccgccagctcctacctgagcctgacacctgagcagtggaagtcccacagatcctacagctgccaagtgacccacgaaggcagcaccgtggaaaagacagtggcccctacagagtgcagccccatcaagaccgatgtgattacaatggaccccaaggacaactgctccaaggacgccaacgataccctgctgctccagctgaccaacaccagcgccaccatcctgtacgagatcctgctgggcaaggccaccctgtacgccgtgctggtgtctgccctggtgctgatggctatggtcaagcggaaggacagccggggaccgcgccaagagaagcggatctggcgtgaagcagaccctgaatttcgacctgctgaagctggctggcgacgtggaatccaacccaggccctactagtatggactggatttggcgcatccttttccttgtcggcgctgctaccggcgcgcattccttcgaagaagttcagctccagcagagcggccctgagcttgtgaaacctggcgcttccgtgaagatcagctgcaaggccagcggctacagcttcaccggctacaccatgaactgggtcaagcagtcccacggcaagaacctggaatggatcggcctgattaacccctacaacggcggcacctcctacaaccagaagttcaaggccaaggccacactgaccgtggacaagagcagcagcacagcctacatgcagctgaagtccctgaccagcgaggacagcgccgtgtactactgcgccagagattacggctacgtgctggactattggggccagggcacaagcgtgacagtgtctagtacgcgtgcctctacaaagggaccctccgtgtttcctctggctcccagcagcaagtctacaagcggaggaacagccgctctgggctgcctggtcaaggattactttcccgagcctgtgaccgtgtcctggaatagcggagcactgacaagcggcgtgcacacctttccagccgtgctgcaaagcagcggcctgtactctctgagcagcgtggtcacagtgcctagctctagcctgggcacccagacctacatctgcaatgtgaaccacaagcctagcaacaccaaggtggacaagagagtggaacccaagagctgtgaagtgaaaaccgactccaccgaccacgtgaagcccaaagagacagagaacaccaagcagcccagcaagagctgccacaagcccaaggccatcgtgcacaccgagaaagtgaacatgatgagcctgaccgtgctgggcttcagaatcctgctgctgaaagtggccggctttaacctgctgatgaccctgcggctgtggtccagc

SEQ ID NO: 40310 - DNA, 1945 bp, synthetic construct
  source 1..1945: mol_type = other DNA
atggccttaccagtgaccgccttgctcctgccgctggccttgctgctccacgccgccaggccggacatcgtgatgacccagagccctgccaccctgtccgtgtctccaggcgaaagagccaccctgagctgcagagcttcccagagcgtgtccaacgacgtcgtgtggtatcagcagaagcccggccaggcccccagactgctgatctactacgccagcaacagatacaccggcatccccgccagattcagcggctctggcagcggcaccgagttcaccctgacaatcagcagcctccagagcgaggacttcgccgtgtactactgtcagcaggactacaccagcccctggaccttcggccagggcaccaagctggaaatcaagagactcgaggagggacagcctaaggccaatcctaccgtgacactgttccctccaagcagcgaagaactccaggccaacaaggccacacttgtgtgcctgatctccgacttctaccctggggctgtgacagtggcttggaaggccgatggatctcctgtgaaagccggcgtggaaaccaccaagccatccaagcagagcaacaacaaatacgccgccagctcctacctgagcctgacacctgagcagtggaagtcccacagatcctacagctgccaagtgacccacgaaggcagcaccgtggaaaagacagtggcccctacagagtgcagccccatcaagaccgatgtgattacaatggaccccaaggacaactgctccaaggacgccaacgataccctgctgctccagctgaccaacaccagcgccaccatcctgtacgagatcctgctgggcaaggccaccctgtacgccgtgctggtgtctgccctggtgctgatggctatggtcaagcggaaggacagccggggaccgcgccaagagaagcggatctggcgtgaagcagaccctgaatttcgacctgctgaagctggctggcgacgtggaatccaacccaggccctactagtatggactggatttggcgcatccttttccttgtcggcgctgctaccggcgcgcattccttcgaagaggtgcaactggtgcagagcggagccgaagtgaagaaacctggggccagcgtgcgggtgtcctgcaaggccagcggctacacctttaccaactacggcatgaactgggtgcgccaggctcctggacagggcctggaatggatgggctggatcaacacctacaccggcgagcccacctacgccgacgacttcaagggcagagtgaccatgaccaccgacaccagcacctccaccgcctacatggaactgcggagcctgagaagcgacgacaccgccgtgtattattgcgcccggatcggcgacagcagccccagcgattattggggccagggaaccctcgtgaccgtgtcctctacgcgtgcctctacaaagggaccctccgtgtttcctctggctcccagcagcaagtctacaagcggaggaacagccgctctgggctgcctggtcaaggattactttcccgagcctgtgaccgtgtcctggaatagcggagcactgacaagcggcgtgcacacctttccagccgtgctgcaaagcagcggcctgtactctctgagcagcgtggtcacagtgcctagctctagcctgggcacccagacctacatctgcaatgtgaaccacaagcctagcaacaccaaggtggacaagagagtggaacccaagagctgtgaagtgaaaaccgactccaccgaccacgtgaagcccaaagagacagagaacaccaagcagcccagcaagagctgccacaagcccaaggccatcgtgcacaccgagaaagtgaacatgatgagcctgaccgtgctgggcttcagaatcctgctgctgaaagtggccggctttaacctgctgatgaccctgcggctgtggtccagc

SEQ ID NO: 40311 - DNA, 1951 bp, synthetic construct
  source 1..1951: mol_type = other DNA
atggccttaccagtgaccgccttgctcctgccgctggccttgctgctccacgccgccaggccggacatccagatgacacagagccctagcagcctgtctgccagcgtgggagacagagtgaccatcacctgtagagccagccaggacgtgcggaacatcgtcgtgtggttccagcagaagcctggcaaggcccctaagctgctgatctacagcggcagctacagatacagcggcgtgcccagcagattttccggctctggctctggcaccgacttcaccctgacaatatccagcctccagcctgaggacttcgccacctactactgccagcagcactacagccctccatacacattcggccagggcaccaaggtggaaatcaagagactcgaggagggacagcctaaggccaatcctaccgtgacactgttccctccaagcagcgaagaactccaggccaacaaggccacacttgtgtgcctgatctccgacttctaccctggggctgtgacagtggcttggaaggccgatggatctcctgtgaaagccggcgtggaaaccaccaagccatccaagcagagcaacaacaaatacgccgccagctcctacctgagcctgacacctgagcagtggaagtcccacagatcctacagctgccaagtgacccacgaaggcagcaccgtggaaaagacagtggcccctacagagtgcagccccatcaagaccgatgtgattacaatggaccccaaggacaactgctccaaggacgccaacgataccctgctgctccagctgaccaacaccagcgccaccatcctgtacgagatcctgctgggcaaggccaccctgtacgccgtgctggtgtctgccctggtgctgatggctatggtcaagcggaaggacagccggggaccgcgccaagagaagcggatctggcgtgaagcagaccctgaatttcgacctgctgaagctggctggcgacgtggaatccaacccaggccctactagtatggactggatttggcgcatccttttccttgtcggcgctgctaccggcgcgcattccttcgaagaagttcagctggtggaatctggccctggcctggtcaagcctagcgagacactgagcctgacctgtaccgtgtccggcttcagcctgaccagatttggcgtgcactgggtccgacagccacctggcaaaggactggaatggctgggagtgatttggagaggcggcagcaccgattacaacgccgccttcatgagccggctgaccatcagcaaggacaacagcaagaaccaggtgtccctgaagctgagcagcgtgacagccgctgataccgccgtgtactactgctccaaccactactacggcagctccgactacgccctggataattggggccagggaaccctggtcaccgtgtcatctacgcgtgcctctacaaagggaccctccgtgtttcctctggctcccagcagcaagtctacaagcggaggaacagccgctctgggctgcctggtcaaggattactttcccgagcctgtgaccgtgtcctggaatagcggagcactgacaagcggcgtgcacacctttccagccgtgctgcaaagcagcggcctgtactctctgagcagcgtggtcacagtgcctagctctagcctgggcacccagacctacatctgcaatgtgaaccacaagcctagcaacaccaaggtggacaagagagtggaacccaagagctgtgaagtgaaaaccgactccaccgaccacgtgaagcccaaagagacagagaacaccaagcagcccagcaagagctgccacaagcccaaggccatcgtgcacaccgagaaagtgaacatgatgagcctgaccgtgctgggcttcagaatcctgctgctgaaagtggccggctttaacctgctgatgaccctgcggctgtggtccagc

SEQ ID NO: 40312 - DNA, 1957 bp, synthetic construct
  source 1..1957: mol_type = other DNA
atggccttaccagtgaccgccttgctcctgccgctggccttgctgctccacgccgccaggccggacatcgtgctgacccagagccctctgagcctggccgtgtctctgggacagcctgccatcatcagctgtagggccagccagagcgtgtcctttgccggcacctctctgatgcactggtatcaccagaagcccggccagcagcccagactgctgatctacagagccagcaacctggaagccggcgtgcccgatagattttccggcagcggcagcaagaccgacttcaccctgaccatcagccccgtggaagccgaagatgccgccacctactactgccagcagagcagagagtacccctacaccttcggcggaggcaccaagctggaaatcaagaggctcgaggagggacagcctaaggccaatcctaccgtgacactgttccctccaagcagcgaagaactccaggccaacaaggccacacttgtgtgcctgatctccgacttctaccctggggctgtgacagtggcttggaaggccgatggatctcctgtgaaagccggcgtggaaaccaccaagccatccaagcagagcaacaacaaatacgccgccagctcctacctgagcctgacacctgagcagtggaagtcccacagatcctacagctgccaagtgacccacgaaggcagcaccgtggaaaagacagtggcccctacagagtgcagccccatcaagaccgatgtgattacaatggaccccaaggacaactgctccaaggacgccaacgataccctgctgctccagctgaccaacaccagcgccaccatcctgtacgagatcctgctgggcaaggccaccctgtacgccgtgctggtgtctgccctggtgctgatggctatggtcaagcggaaggacagccggggaccgcgccaagagaagcggatctggcgtgaagcagaccctgaatttcgacctgctgaagctggctggcgacgtggaatccaacccaggccctactagtatggactggatttggcgcatccttttccttgtcggcgctgctaccggcgcgcattccttcgaacaggtccaactggtgcagagcggagccgaggtcgtgaagcctggcgcttccgtgaagattagctgcaaagccagcggctacacctttaccggctactttatgcactgggtcaagcagagccctggccagagcctggaatggatcggcagaatccacccctacgacggcgacaccttctacaaccagaagttccagggcaaggccaccctgacagtggacaagagcagcaacaccgcccacatggaactgctgagcctgaccagcgaggacttcgccgtgtactactgcaccagatacgacggcagccgggctatggactattggggccagggcaccaccgtgaccgtgtctagtacgcgtgcctctacaaagggaccctccgtgtttcctctggctcccagcagcaagtctacaagcggaggaacagccgctctgggctgcctggtcaaggattactttcccgagcctgtgaccgtgtcctggaatagcggagcactgacaagcggcgtgcacacctttccagccgtgctgcaaagcagcggcctgtactctctgagcagcgtggtcacagtgcctagctctagcctgggcacccagacctacatctgcaatgtgaaccacaagcctagcaacaccaaggtggacaagagagtggaacccaagagctgtgaagtgaaaaccgactccaccgaccacgtgaagcccaaagagacagagaacaccaagcagcccagcaagagctgccacaagcccaaggccatcgtgcacaccgagaaagtgaacatgatgagcctgaccgtgctgggcttcagaatcctgctgctgaaagtggccggctttaacctgctgatgaccctgcggctgtggtccagc

SEQ ID NO: 40313 - DNA, 1939 bp, synthetic construct
  source 1..1939: mol_type = other DNA
atggccttaccagtgaccgccttgctcctgccgctggccttgctgctccacgccgccaggccggacatccagatgacacagagccctagcagcctgtctgccagcgtgggagacagagtgaccatcacatgcaaggccagccagagcgtgtccaacgacgtgacctggtatcagcagaagcctggacaggcccctaagctgctgatctacagcgccagcaacagatacagcggagtgcccgccagattttccggctctggctacggcaccgagttcacctttaccatcagcagcgtgcagagcgaggacttcgccgtgtacttctgccagcaagactacagcagcttcggccagggcaccaagctggaaatcaagagactcgaggagggacagcctaaggccaatcctaccgtgacactgttccctccaagcagcgaagaactccaggccaacaaggccacacttgtgtgcctgatctccgacttctaccctggggctgtgacagtggcttggaaggccgatggatctcctgtgaaagccggcgtggaaaccaccaagccatccaagcagagcaacaacaaatacgccgccagctcctacctgagcctgacacctgagcagtggaagtcccacagatcctacagctgccaagtgacccacgaaggcagcaccgtggaaaagacagtggcccctacagagtgcagccccatcaagaccgatgtgattacaatggaccccaaggacaactgctccaaggacgccaacgataccctgctgctccagctgaccaacaccagcgccaccatcctgtacgagatcctgctgggcaaggccaccctgtacgccgtgctggtgtctgccctggtgctgatggctatggtcaagcggaaggacagccggggaccgcgccaagagaagcggatctggcgtgaagcagaccctgaatttcgacctgctgaagctggctggcgacgtggaatccaacccaggccctactagtatggactggatttggcgcatccttttccttgtcggcgctgctaccggcgcgcattccttcgaacaggtgcagctggtggaatctggacctggcgtggtgcagcctggcagaagcctgagaatcagctgtgccgtgtccggcttcagcgtgaccaactacggcgtgcactgggtgcgccagccacctggaaaaggactggaatggctgggcgtgatctgggctggcggcatcaccaactacaacagcgccttcatgtcccggctgaccatctccaaggacaacagcaagaacaccgtgtacctccagatgaacagcctgcgggccgaggacaccgccatgtactactgtgcttccagaggcggccactacggctacgccctggattattggggccagggaaccctcgtgaccgtgtcctctacgcgtgcctctacaaagggaccctccgtgtttcctctggctcccagcagcaagtctacaagcggaggaacagccgctctgggctgcctggtcaaggattactttcccgagcctgtgaccgtgtcctggaatagcggagcactgacaagcggcgtgcacacctttccagccgtgctgcaaagcagcggcctgtactctctgagcagcgtggtcacagtgcctagctctagcctgggcacccagacctacatctgcaatgtgaaccacaagcctagcaacaccaaggtggacaagagagtggaacccaagagctgtgaagtgaaaaccgactccaccgaccacgtgaagcccaaagagacagagaacaccaagcagcccagcaagagctgccacaagcccaaggccatcgtgcacaccgagaaagtgaacatgatgagcctgaccgtgctgggcttcagaatcctgctgctgaaagtggccggctttaacctgctgatgaccctgcggctgtggtccagc

SEQ ID NO: 40314 - DNA, 1951 bp, synthetic construct
  source 1..1951: mol_type = other DNA
atggccttaccagtgaccgccttgctcctgccgctggccttgctgctccacgccgccaggccggagaacgtgctgacacagagccctgccatcatgagtgcctctccaggcgagaaagtgaccatgacctgtagagccagcagcagcgtgtccagcagctacctgcactggtatcagcagaagtccggcgcaagccccaaagtgtggatctacagcaccagcaatctggcctctggcgtgccaggcagattttctggctctggcagcggcacaagctacagcctgacaatcagctccgtggaagccgaagatgccgccacctactactgccagcagtacagcggctaccccatcacatttggagccggcaccaaggtggaagtgaagagactcgaggagggacagcctaaggccaatcctaccgtgacactgttccctccaagcagcgaagaactccaggccaacaaggccacacttgtgtgcctgatctccgacttctaccctggggctgtgacagtggcttggaaggccgatggatctcctgtgaaagccggcgtggaaaccaccaagccatccaagcagagcaacaacaaatacgccgccagctcctacctgagcctgacacctgagcagtggaagtcccacagatcctacagctgccaagtgacccacgaaggcagcaccgtggaaaagacagtggcccctacagagtgcagccccatcaagaccgatgtgattacaatggaccccaaggacaactgctccaaggacgccaacgataccctgctgctccagctgaccaacaccagcgccaccatcctgtacgagatcctgctgggcaaggccaccctgtacgccgtgctggtgtctgccctggtgctgatggctatggtcaagcggaaggacagccggggaccgcgccaagagaagcggatctggcgtgaagcagaccctgaatttcgacctgctgaagctggctggcgacgtggaatccaacccaggccctactagtatggactggatttggcgcatccttttccttgtcggcgctgctaccggcgcgcattccttcgaacaggttcagctcaaagaatctggccccgtgctggtggccccaagccagacactgtctatcacctgtaccgtgtccggcttcagcctggcctcctacaacatccactgggtccgacagcctccaggcaaaggactggaatggctgggagtgatttgggctggcggcagcaccaactacaacagcgcactgatgagccggctgagcatcagcaaggacaacagcaagagccaggtgttcctccagatgaactccctccagaccgacgacaccgccatgtactactgcgccaagagaagcgacgactacagttggttcgcctactggggccagggcacactggttactgtgtctgcttctacgcgtgcctctacaaagggaccctccgtgtttcctctggctcccagcagcaagtctacaagcggaggaacagccgctctgggctgcctggtcaaggattactttcccgagcctgtgaccgtgtcctggaatagcggagcactgacaagcggcgtgcacacctttccagccgtgctgcaaagcagcggcctgtactctctgagcagcgtggtcacagtgcctagctctagcctgggcacccagacctacatctgcaatgtgaaccacaagcctagcaacaccaaggtggacaagagagtggaacccaagagctgtgaagtgaaaaccgactccaccgaccacgtgaagcccaaagagacagagaacaccaagcagcccagcaagagctgccacaagcccaaggccatcgtgcacaccgagaaagtgaacatgatgagcctgaccgtgctgggcttcagaatcctgctgctgaaagtggccggctttaacctgctgatgaccctgcggctgtggtccagc

SEQ ID NO: 40315 - DNA, 1963 bp, synthetic construct
  source 1..1963: mol_type = other DNA
atggccttaccagtgaccgccttgctcctgccgctggccttgctgctccacgccgccaggccggagatcgtgctgacacagtctcccgccacactgtcactgtctccaggcgaaagagccacactgagctgtagagccagccagagcgtgtcctcttacctggcctggtatcagcagaagcctggacaggctccccggctgctgatctacgatgccagcaatagagccacaggcatccccgccagattttctggctctggcagcggcaccgatttcaccctgaccataagcagcctggaacctgaggacttcgccgtgtactactgccagcagagaagcaactggcctcctacattcggccagggcaccaaggtggaaatcaaactcgaggagggacagcctaaggccaatcctaccgtgacactgttccctccaagcagcgaagaactccaggccaacaaggccacacttgtgtgcctgatctccgacttctaccctggggctgtgacagtggcttggaaggccgatggatctcctgtgaaagccggcgtggaaaccaccaagccatccaagcagagcaacaacaaatacgccgccagctcctacctgagcctgacacctgagcagtggaagtcccacagatcctacagctgccaagtgacccacgaaggcagcaccgtggaaaagacagtggcccctacagagtgcagccccatcaagaccgatgtgattacaatggaccccaaggacaactgctccaaggacgccaacgataccctgctgctccagctgaccaacaccagcgccaccatcctgtacgagatcctgctgggcaaggccaccctgtacgccgtgctggtgtctgccctggtgctgatggctatggtcaagcggaaggacagccggggaccgcgccaagagaagcggatctggcgtgaagcagaccctgaatttcgacctgctgaagctggctggcgacgtggaatccaacccaggccctactagtatggactggatttggcgcatccttttccttgtcggcgctgctaccggcgcgcattccttcgaacaactccagctgcaagagtctggccccggactggtcaagcctagcgaaacactgagcctgacctgtaccgtgtctggcggcagcatcagcagcagctcttattggtggggctggaccagacagcctcctggcagaggactggaatggatcggcaccatgtactacagcggcaacatctactacaaccccagcctccagagccgggccaccatctctgtggacaccagcaagaaccagttcagcctgaagctgagcagcgtgacagccgccgataccgccgtgtattattgcgccagacatgtgggctacagctacggcagacggttctggtacttcgacctgtggggcagaggcaccctggtcacagtttcttctacgcgtgcctctacaaagggaccctccgtgtttcctctggctcccagcagcaagtctacaagcggaggaacagccgctctgggctgcctggtcaaggattactttcccgagcctgtgaccgtgtcctggaatagcggagcactgacaagcggcgtgcacacctttccagccgtgctgcaaagcagcggcctgtactctctgagcagcgtggtcacagtgcctagctctagcctgggcacccagacctacatctgcaatgtgaaccacaagcctagcaacaccaaggtggacaagagagtggaacccaagagctgtgaagtgaaaaccgactccaccgaccacgtgaagcccaaagagacagagaacaccaagcagcccagcaagagctgccacaagcccaaggccatcgtgcacaccgagaaagtgaacatgatgagcctgaccgtgctgggcttcagaatcctgctgctgaaagtggccggctttaacctgctgatgaccctgcggctgtggtccagc

SEQ ID NO: 40316 - DNA, 1954 bp, synthetic construct
  source 1..1954: mol_type = other DNA
atggccttaccagtgaccgccttgctcctgccgctggccttgctgctccacgccgccaggccggacatccagatgacacagagccctagcagcctgtctgccagcgtgggagacagagtgaccatcacatgcaaggccagcgaccacatcaacaactggctggcctggtatcagcagaagcctggcaaggcccctaagctgctgatctacggcgctaccacactggaaacaggcgtgcccagcagattttctggcagcggctctggcaccgacttcaccctgacaatatccagcctccagcctgaggacttcgccacctactactgtcagcagagctggaacaccccttggacattcggccagggcaccaaggtggaaatcaagagactcgaggagggacagcctaaggccaatcctaccgtgacactgttccctccaagcagcgaagaactccaggccaacaaggccacacttgtgtgcctgatctccgacttctaccctggggctgtgacagtggcttggaaggccgatggatctcctgtgaaagccggcgtggaaaccaccaagccatccaagcagagcaacaacaaatacgccgccagctcctacctgagcctgacacctgagcagtggaagtcccacagatcctacagctgccaagtgacccacgaaggcagcaccgtggaaaagacagtggcccctacagagtgcagccccatcaagaccgatgtgattacaatggaccccaaggacaactgctccaaggacgccaacgataccctgctgctccagctgaccaacaccagcgccaccatcctgtacgagatcctgctgggcaaggccaccctgtacgccgtgctggtgtctgccctggtgctgatggctatggtcaagcggaaggacagccggggaccgcgccaagagaagcggatctggcgtgaagcagaccctgaatttcgacctgctgaagctggctggcgacgtggaatccaacccaggccctactagtatggactggatttggcgcatccttttccttgtcggcgctgctaccggcgcgcattccttcgaagaagttcagctggttgaatctggcggcggactggttcaacctggcggatctctgagactgagctgtgccgcctctggctacacctttagcagctactgggtcaactgggttcgacaggcccctggcaaaggactggaatgggtcgcccaaatctatcccggcgacggcgacaccaactacaacggcaagttcaagggcagattcaccatcagccgggacaacagcaagaacaccctgtacctccagatgaactccctgagagccgaggacaccgccgtgtactattgtgccagatccatcaccaccgtcgtgggctgcgctatggattattggggccagggaaccctggtcaccgtgtcctctacgcgtgcctctacaaagggaccctccgtgtttcctctggctcccagcagcaagtctacaagcggaggaacagccgctctgggctgcctggtcaaggattactttcccgagcctgtgaccgtgtcctggaatagcggagcactgacaagcggcgtgcacacctttccagccgtgctgcaaagcagcggcctgtactctctgagcagcgtggtcacagtgcctagctctagcctgggcacccagacctacatctgcaatgtgaaccacaagcctagcaacaccaaggtggacaagagagtggaacccaagagctgtgaagtgaaaaccgactccaccgaccacgtgaagcccaaagagacagagaacaccaagcagcccagcaagagctgccacaagcccaaggccatcgtgcacaccgagaaagtgaacatgatgagcctgaccgtgctgggcttcagaatcctgctgctgaaagtggccggctttaacctgctgatgaccctgcggctgtggtccagc

SEQ ID NO: 40317 - DNA, 1954 bp, synthetic construct
  source 1..1954: mol_type = other DNA
atggccttaccagtgaccgccttgctcctgccgctggccttgctgctccacgccgccaggccggacatccagatgacacagagccctagcagcctgtctgccagcgtgggagacagagtgaccatcacatgcaaggccagcgaccacatcaacaactggctggcctggtatcagcagaagcctggcaaggcccctaagctgctgatctacggcgctaccacactggaaacaggcgtgcccagcagattttctggcagcggctctggcaccgacttcaccctgacaatatccagcctccagcctgaggacttcgccacctactactgtcagcagagctggaacaccccttggacattcggccagggcaccaaggtggaaatcaagagactcgaggagggacagcctaaggccaatcctaccgtgacactgttccctccaagcagcgaagaactccaggccaacaaggccacacttgtgtgcctgatctccgacttctaccctggggctgtgacagtggcttggaaggccgatggatctcctgtgaaagccggcgtggaaaccaccaagccatccaagcagagcaacaacaaatacgccgccagctcctacctgagcctgacacctgagcagtggaagtcccacagatcctacagctgccaagtgacccacgaaggcagcaccgtggaaaagacagtggcccctacagagtgcagccccatcaagaccgatgtgattacaatggaccccaaggacaactgctccaaggacgccaacgataccctgctgctccagctgaccaacaccagcgccaccatcctgtacgagatcctgctgggcaaggccaccctgtacgccgtgctggtgtctgccctggtgctgatggctatggtcaagcggaaggacagccggggaccgcgccaagagaagcggatctggcgtgaagcagaccctgaatttcgacctgctgaagctggctggcgacgtggaatccaacccaggccctactagtatggactggatttggcgcatccttttccttgtcggcgctgctaccggcgcgcattccttcgaagaagttcagctggttgaatctggcggcggactggttcaacctggcggatctctgagactgagctgtgccgcctctggctacgcctttagcaactactgggtcaactgggttcgacaggcccctggcaaaggactggaatgggtcgcccaaatctatcccggcgacggcgacaccaactacaacggcaagttcaagggcagattcaccatcagccgggacaacagcaagaacaccctgtacctccagatgaactccctgagagccgaggacaccgccgtgtactattgtgccagatccatcaccaccgtcgtgggctgcgctatggattattggggccagggaaccctggtcaccgtgtcctctacgcgtgcctctacaaagggaccctccgtgtttcctctggctcccagcagcaagtctacaagcggaggaacagccgctctgggctgcctggtcaaggattactttcccgagcctgtgaccgtgtcctggaatagcggagcactgacaagcggcgtgcacacctttccagccgtgctgcaaagcagcggcctgtactctctgagcagcgtggtcacagtgcctagctctagcctgggcacccagacctacatctgcaatgtgaaccacaagcctagcaacaccaaggtggacaagagagtggaacccaagagctgtgaagtgaaaaccgactccaccgaccacgtgaagcccaaagagacagagaacaccaagcagcccagcaagagctgccacaagcccaaggccatcgtgcacaccgagaaagtgaacatgatgagcctgaccgtgctgggcttcagaatcctgctgctgaaagtggccggctttaacctgctgatgaccctgcggctgtggtccagc

SEQ ID NO: 40318 - DNA, 1945 bp, synthetic construct
  source 1..1945: mol_type = other DNA
atggccttaccagtgaccgccttgctcctgccgctggccttgctgctccacgccgccaggccggacatccagatgacacagagccctagcagcctgtctgccagcgtgggagacagagtgaccatcacatgcaagagcagccagagcctgctggactccgatggcaagacctacctgaactggtatcagcagaagcccggcaaggcccctaagctgctgatctacctggtgtccaagctggatagcggcgtgcccagcagattttctggcagcggcagcggaaccgacttcaccctgacaatatccagcctccagcctgaggacttcgccacctactactgcttccaaggcacccactttccattcaccttcggccagggcaccaaggtggaaatcaaaagactcgaggagggacagcctaaggccaatcctaccgtgacactgttccctccaagcagcgaagaactccaggccaacaaggccacacttgtgtgcctgatctccgacttctaccctggggctgtgacagtggcttggaaggccgatggatctcctgtgaaagccggcgtggaaaccaccaagccatccaagcagagcaacaacaaatacgccgccagctcctacctgagcctgacacctgagcagtggaagtcccacagatcctacagctgccaagtgacccacgaaggcagcaccgtggaaaagacagtggcccctacagagtgcagccccatcaagaccgatgtgattacaatggaccccaaggacaactgctccaaggacgccaacgataccctgctgctccagctgaccaacaccagcgccaccatcctgtacgagatcctgctgggcaaggccaccctgtacgccgtgctggtgtctgccctggtgctgatggctatggtcaagcggaaggacagccggggaccgcgccaagagaagcggatctggcgtgaagcagaccctgaatttcgacctgctgaagctggctggcgacgtggaatccaacccaggccctactagtatggactggatttggcgcatccttttccttgtcggcgctgctaccggcgcgcattccttcgaagaagtgcagctggttgaatcaggcggaggactggttcagcctggcggatctctgagactgtcttgtgccgccagcggctacaccttcaccagctactggatgaactgggtccgacaggcccctggcaaaggactggaatgggtcggaatgatcgaccccagcgacagcgagacacactacaaccacatcttcaaggaccgcttcaccatcagcgccgacaccagcaagaataccgcctacctccagatgaactccctgagagccgaggacaccgccgtgtactactgcgccagaaacctgtatctgttcggccagggaaccctggtcacagtgtcatctacgcgtgcctctacaaagggaccctccgtgtttcctctggctcccagcagcaagtctacaagcggaggaacagccgctctgggctgcctggtcaaggattactttcccgagcctgtgaccgtgtcctggaatagcggagcactgacaagcggcgtgcacacctttccagccgtgctgcaaagcagcggcctgtactctctgagcagcgtggtcacagtgcctagctctagcctgggcacccagacctacatctgcaatgtgaaccacaagcctagcaacaccaaggtggacaagagagtggaacccaagagctgtgaagtgaaaaccgactccaccgaccacgtgaagcccaaagagacagagaacaccaagcagcccagcaagagctgccacaagcccaaggccatcgtgcacaccgagaaagtgaacatgatgagcctgaccgtgctgggcttcagaatcctgctgctgaaagtggccggctttaacctgctgatgaccctgcggctgtggtccagc

SEQ ID NO: 40319 - DNA, 1945 bp, synthetic construct
  source 1..1945: mol_type = other DNA
atggccttaccagtgaccgccttgctcctgccgctggccttgctgctccacgccgccaggccggacatccagatgacacagagccctagcagcctgtctgccagcgtgggagacagagtgaccatcacatgcaagagcagccagagcctgctggactccgatggcaagacctacctgaactggtatcagcagaagcccggcaaggcccctaagctgctgatctacctggtgtccaagctggatagcggcgtgcccagcagattttctggcagcggcagcggaaccgacttcaccctgacaatatccagcctccagcctgaggacttcgccacctactactgcttccaaggcacccactttccattcaccttcggccagggcaccaaggtggaaatcaaaagactcgaggagggacagcctaaggccaatcctaccgtgacactgttccctccaagcagcgaagaactccaggccaacaaggccacacttgtgtgcctgatctccgacttctaccctggggctgtgacagtggcttggaaggccgatggatctcctgtgaaagccggcgtggaaaccaccaagccatccaagcagagcaacaacaaatacgccgccagctcctacctgagcctgacacctgagcagtggaagtcccacagatcctacagctgccaagtgacccacgaaggcagcaccgtggaaaagacagtggcccctacagagtgcagccccatcaagaccgatgtgattacaatggaccccaaggacaactgctccaaggacgccaacgataccctgctgctccagctgaccaacaccagcgccaccatcctgtacgagatcctgctgggcaaggccaccctgtacgccgtgctggtgtctgccctggtgctgatggctatggtcaagcggaaggacagccggggaccgcgccaagagaagcggatctggcgtgaagcagaccctgaatttcgacctgctgaagctggctggcgacgtggaatccaacccaggccctactagtatggactggatttggcgcatccttttccttgtcggcgctgctaccggcgcgcattccttcgaagaagtgcagctggttgaatcaggcggaggactggttcagcctggcggatctctgagactgtcttgtgccgccagcggctacaccttcagcagctactggatgaactgggtccgacaggcccctggcaaaggactggaatgggtcggaatgatcgaccccagcgacagcgagacacactacaaccacatcttcaaggaccgcttcaccatcagcgccgacaccagcaagaataccgcctacctccagatgaactccctgagagccgaggacaccgccgtgtactactgcgccagaaacctgtatctgtggggccagggaaccctggtcacagtgtcatctacgcgtgcctctacaaagggaccctccgtgtttcctctggctcccagcagcaagtctacaagcggaggaacagccgctctgggctgcctggtcaaggattactttcccgagcctgtgaccgtgtcctggaatagcggagcactgacaagcggcgtgcacacctttccagccgtgctgcaaagcagcggcctgtactctctgagcagcgtggtcacagtgcctagctctagcctgggcacccagacctacatctgcaatgtgaaccacaagcctagcaacaccaaggtggacaagagagtggaacccaagagctgtgaagtgaaaaccgactccaccgaccacgtgaagcccaaagagacagagaacaccaagcagcccagcaagagctgccacaagcccaaggccatcgtgcacaccgagaaagtgaacatgatgagcctgaccgtgctgggcttcagaatcctgctgctgaaagtggccggctttaacctgctgatgaccctgcggctgtggtccagc

SEQ ID NO: 40320 - DNA, 1945 bp, synthetic construct
  source 1..1945: mol_type = other DNA
atggccttaccagtgaccgccttgctcctgccgctggccttgctgctccacgccgccaggccggacatccagatgacacagagccctagcagcctgtctgccagcgtgggagacagagtgaccatcacatgcaagagcagccagagcctgctggactccgatggcaagacctacctgaactggtatcagcagaagcccggcaaggcccctaagctgctgatctacctggtgtccaagctggatagcggcgtgcccagcagattttctggcagcggcagcggaaccgacttcaccctgacaatatccagcctccagcctgaggacttcgccacctactactgctggcaaggcacccactttccattcaccttcggccagggcaccaaggtggaaatcaaaagactcgaggagggacagcctaaggccaatcctaccgtgacactgttccctccaagcagcgaagaactccaggccaacaaggccacacttgtgtgcctgatctccgacttctaccctggggctgtgacagtggcttggaaggccgatggatctcctgtgaaagccggcgtggaaaccaccaagccatccaagcagagcaacaacaaatacgccgccagctcctacctgagcctgacacctgagcagtggaagtcccacagatcctacagctgccaagtgacccacgaaggcagcaccgtggaaaagacagtggcccctacagagtgcagccccatcaagaccgatgtgattacaatggaccccaaggacaactgctccaaggacgccaacgataccctgctgctccagctgaccaacaccagcgccaccatcctgtacgagatcctgctgggcaaggccaccctgtacgccgtgctggtgtctgccctggtgctgatggctatggtcaagcggaaggacagccggggaccgcgccaagagaagcggatctggcgtgaagcagaccctgaatttcgacctgctgaagctggctggcgacgtggaatccaacccaggccctactagtatggactggatttggcgcatccttttccttgtcggcgctgctaccggcgcgcattccttcgaagaagtgcagctggttgaatcaggcggaggactggttcagcctggcggatctctgagactgtcttgtgccgccagcggctacaccttcaccagctactggatgaactgggtccgacaggcccctggcaaaggactggaatgggtcggaatgatcgaccccagcgacagcgagacacactacaaccacatcttcaaggaccgcttcaccatcagcgccgacaccagcaagaataccgcctacctccagatgaactccctgagagccgaggacaccgccgtgtactactgcgccagaaacctgtatctgttcggccagggaaccctggtcacagtgtcatctacgcgtgcctctacaaagggaccctccgtgtttcctctggctcccagcagcaagtctacaagcggaggaacagccgctctgggctgcctggtcaaggattactttcccgagcctgtgaccgtgtcctggaatagcggagcactgacaagcggcgtgcacacctttccagccgtgctgcaaagcagcggcctgtactctctgagcagcgtggtcacagtgcctagctctagcctgggcacccagacctacatctgcaatgtgaaccacaagcctagcaacaccaaggtggacaagagagtggaacccaagagctgtgaagtgaaaaccgactccaccgaccacgtgaagcccaaagagacagagaacaccaagcagcccagcaagagctgccacaagcccaaggccatcgtgcacaccgagaaagtgaacatgatgagcctgaccgtgctgggcttcagaatcctgctgctgaaagtggccggctttaacctgctgatgaccctgcggctgtggtccagc

SEQ ID NO: 40321 - DNA, 1945 bp, synthetic construct
  source 1..1945: mol_type = other DNA
atggccttaccagtgaccgccttgctcctgccgctggccttgctgctccacgccgccaggccggacatccagatgacacagagccctagcagcctgtctgccagcgtgggagacagagtgaccatcacatgcaagagcagccagagcctgctggactccgatggcaagacctacctgaactggtatcagcagaagcccggcaaggcccctaagctgctgatctacctggtgtccaagctggatagcggcgtgcccagcagattttctggcagcggcagcggaaccgacttcaccctgacaatatccagcctccagcctgaggacttcgccacctactactgctggcaaggcacccactttccattcaccttcggccagggcaccaaggtggaaatcaaaagactcgaggagggacagcctaaggccaatcctaccgtgacactgttccctccaagcagcgaagaactccaggccaacaaggccacacttgtgtgcctgatctccgacttctaccctggggctgtgacagtggcttggaaggccgatggatctcctgtgaaagccggcgtggaaaccaccaagccatccaagcagagcaacaacaaatacgccgccagctcctacctgagcctgacacctgagcagtggaagtcccacagatcctacagctgccaagtgacccacgaaggcagcaccgtggaaaagacagtggcccctacagagtgcagccccatcaagaccgatgtgattacaatggaccccaaggacaactgctccaaggacgccaacgataccctgctgctccagctgaccaacaccagcgccaccatcctgtacgagatcctgctgggcaaggccaccctgtacgccgtgctggtgtctgccctggtgctgatggctatggtcaagcggaaggacagccggggaccgcgccaagagaagcggatctggcgtgaagcagaccctgaatttcgacctgctgaagctggctggcgacgtggaatccaacccaggccctactagtatggactggatttggcgcatccttttccttgtcggcgctgctaccggcgcgcattccttcgaagaagtgcagctggttgaatcaggcggaggactggttcagcctggcggatctctgagactgtcttgtgccgccagcggctacaccttcagcagctactggatgaactgggtccgacaggcccctggcaaaggactggaatgggtcggaatgatcgaccccagcgacagcgagacacactacaaccacatcttcaaggaccgcttcaccatcagcgccgacaccagcaagaataccgcctacctccagatgaactccctgagagccgaggacaccgccgtgtactactgcgccagaaacctgtatctgtggggccagggaaccctggtcacagtgtcatctacgcgtgcctctacaaagggaccctccgtgtttcctctggctcccagcagcaagtctacaagcggaggaacagccgctctgggctgcctggtcaaggattactttcccgagcctgtgaccgtgtcctggaatagcggagcactgacaagcggcgtgcacacctttccagccgtgctgcaaagcagcggcctgtactctctgagcagcgtggtcacagtgcctagctctagcctgggcacccagacctacatctgcaatgtgaaccacaagcctagcaacaccaaggtggacaagagagtggaacccaagagctgtgaagtgaaaaccgactccaccgaccacgtgaagcccaaagagacagagaacaccaagcagcccagcaagagctgccacaagcccaaggccatcgtgcacaccgagaaagtgaacatgatgagcctgaccgtgctgggcttcagaatcctgctgctgaaagtggccggctttaacctgctgatgaccctgcggctgtggtccagc

SEQ ID NO: 40322 - DNA, 1945 bp, synthetic construct
  source 1..1945: mol_type = other DNA
atggccttaccagtgaccgccttgctcctgccgctggccttgctgctccacgccgccaggccggacatccagatgacacagagccctagcagcctgtctgccagcgtgggagacagagtgaccatcacatgcaagagcagccagagcctgctggactccgatggcaagacctacctgaactggtatcagcagaagcccggcaaggcccctaagctgctgatctacctggtgtccaagctggatagcggcgtgcccagcagattttctggcagcggcagcggaaccgacttcaccctgacaatatccagcctccagcctgaggacttcgccacctactactgcttccaaggcacccactttccatacaccttcggccagggcaccaaggtggaaatcaaaagactcgaggagggacagcctaaggccaatcctaccgtgacactgttccctccaagcagcgaagaactccaggccaacaaggccacacttgtgtgcctgatctccgacttctaccctggggctgtgacagtggcttggaaggccgatggatctcctgtgaaagccggcgtggaaaccaccaagccatccaagcagagcaacaacaaatacgccgccagctcctacctgagcctgacacctgagcagtggaagtcccacagatcctacagctgccaagtgacccacgaaggcagcaccgtggaaaagacagtggcccctacagagtgcagccccatcaagaccgatgtgattacaatggaccccaaggacaactgctccaaggacgccaacgataccctgctgctccagctgaccaacaccagcgccaccatcctgtacgagatcctgctgggcaaggccaccctgtacgccgtgctggtgtctgccctggtgctgatggctatggtcaagcggaaggacagccggggaccgcgccaagagaagcggatctggcgtgaagcagaccctgaatttcgacctgctgaagctggctggcgacgtggaatccaacccaggccctactagtatggactggatttggcgcatccttttccttgtcggcgctgctaccggcgcgcattccttcgaagaagtgcagctggttgaatcaggcggaggactggttcagcctggcggatctctgagactgtcttgtgccgccagcggctacaccttcaccagctactggatgaactgggtccgacaggcccctggcaaaggactggaatgggtcggaatgatcgaccccagcgacagcgagacacactacaaccacatcttcaaggaccgcttcaccatcagcgccgacaccagcaagaataccgcctacctccagatgaactccctgagagccgaggacaccgccgtgtactactgcgccagaaacctgtatctgttcggccagggaaccctggtcacagtgtcatctacgcgtgcctctacaaagggaccctccgtgtttcctctggctcccagcagcaagtctacaagcggaggaacagccgctctgggctgcctggtcaaggattactttcccgagcctgtgaccgtgtcctggaatagcggagcactgacaagcggcgtgcacacctttccagccgtgctgcaaagcagcggcctgtactctctgagcagcgtggtcacagtgcctagctctagcctgggcacccagacctacatctgcaatgtgaaccacaagcctagcaacaccaaggtggacaagagagtggaacccaagagctgtgaagtgaaaaccgactccaccgaccacgtgaagcccaaagagacagagaacaccaagcagcccagcaagagctgccacaagcccaaggccatcgtgcacaccgagaaagtgaacatgatgagcctgaccgtgctgggcttcagaatcctgctgctgaaagtggccggctttaacctgctgatgaccctgcggctgtggtccagc

SEQ ID NO: 40323 - DNA, 1945 bp, synthetic construct
  source 1..1945: mol_type = other DNA
atggccttaccagtgaccgccttgctcctgccgctggccttgctgctccacgccgccaggccggacatccagatgacacagagccctagcagcctgtctgccagcgtgggagacagagtgaccatcacatgcaagagcagccagagcctgctggactccgatggcaagacctacctgaactggtatcagcagaagcccggcaaggcccctaagctgctgatctacctggtgtccaagctggatagcggcgtgcccagcagattttctggcagcggcagcggaaccgacttcaccctgacaatatccagcctccagcctgaggacttcgccacctactactgcttccaaggcacccactttccatacaccttcggccagggcaccaaggtggaaatcaaaagactcgaggagggacagcctaaggccaatcctaccgtgacactgttccctccaagcagcgaagaactccaggccaacaaggccacacttgtgtgcctgatctccgacttctaccctggggctgtgacagtggcttggaaggccgatggatctcctgtgaaagccggcgtggaaaccaccaagccatccaagcagagcaacaacaaatacgccgccagctcctacctgagcctgacacctgagcagtggaagtcccacagatcctacagctgccaagtgacccacgaaggcagcaccgtggaaaagacagtggcccctacagagtgcagccccatcaagaccgatgtgattacaatggaccccaaggacaactgctccaaggacgccaacgataccctgctgctccagctgaccaacaccagcgccaccatcctgtacgagatcctgctgggcaaggccaccctgtacgccgtgctggtgtctgccctggtgctgatggctatggtcaagcggaaggacagccggggaccgcgccaagagaagcggatctggcgtgaagcagaccctgaatttcgacctgctgaagctggctggcgacgtggaatccaacccaggccctactagtatggactggatttggcgcatccttttccttgtcggcgctgctaccggcgcgcattccttcgaagaagtgcagctggttgaatcaggcggaggactggttcagcctggcggatctctgagactgtcttgtgccgccagcggctacaccttcaccaactactggatgaactgggtccgacaggcccctggcaaaggactggaatgggtcggaatgatcgaccccagcgacagcgagacacactacaaccacatcttcaaggaccgcttcaccatcagcgccgacaccagcaagaataccgcctacctccagatgaactccctgagagccgaggacaccgccgtgtactactgcgccagaaacctgtatctgtggggccagggaaccctggtcacagtgtcatctacgcgtgcctctacaaagggaccctccgtgtttcctctggctcccagcagcaagtctacaagcggaggaacagccgctctgggctgcctggtcaaggattactttcccgagcctgtgaccgtgtcctggaatagcggagcactgacaagcggcgtgcacacctttccagccgtgctgcaaagcagcggcctgtactctctgagcagcgtggtcacagtgcctagctctagcctgggcacccagacctacatctgcaatgtgaaccacaagcctagcaacaccaaggtggacaagagagtggaacccaagagctgtgaagtgaaaaccgactccaccgaccacgtgaagcccaaagagacagagaacaccaagcagcccagcaagagctgccacaagcccaaggccatcgtgcacaccgagaaagtgaacatgatgagcctgaccgtgctgggcttcagaatcctgctgctgaaagtggccggctttaacctgctgatgaccctgcggctgtggtccagc

SEQ ID NO: 40324 - DNA, 1945 bp, synthetic construct
  source 1..1945: mol_type = other DNA
atggccttaccagtgaccgccttgctcctgccgctggccttgctgctccacgccgccaggccggacatccagatgacacagagccctagcagcctgtctgccagcgtgggagacagagtgaccatcacatgcaagagcagccagagcctgctggactccgatggcaagacctacctgaactggtatcagcagaagcccggcaaggcccctaagctgctgatctacctggtgtccaagctggatagcggcgtgcccagcagattttctggcagcggcagcggaaccgacttcaccctgacaatatccagcctccagcctgaggacttcgccacctactactgcttccaaggcacccactttccattcaccttcggccagggcaccaaggtggaaatcaaaagactcgaggagggacagcctaaggccaatcctaccgtgacactgttccctccaagcagcgaagaactccaggccaacaaggccacacttgtgtgcctgatctccgacttctaccctggggctgtgacagtggcttggaaggccgatggatctcctgtgaaagccggcgtggaaaccaccaagccatccaagcagagcaacaacaaatacgccgccagctcctacctgagcctgacacctgagcagtggaagtcccacagatcctacagctgccaagtgacccacgaaggcagcaccgtggaaaagacagtggcccctacagagtgcagccccatcaagaccgatgtgattacaatggaccccaaggacaactgctccaaggacgccaacgataccctgctgctccagctgaccaacaccagcgccaccatcctgtacgagatcctgctgggcaaggccaccctgtacgccgtgctggtgtctgccctggtgctgatggctatggtcaagcggaaggacagccggggaccgcgccaagagaagcggatctggcgtgaagcagaccctgaatttcgacctgctgaagctggctggcgacgtggaatccaacccaggccctactagtatggactggatttggcgcatccttttccttgtcggcgctgctaccggcgcgcattccttcgaagaagtgcagctggttgaatcaggcggaggactggttcagcctggcggatctctgagactgtcttgtgccgccagcggctacaccttcaccaactactggatgaactgggtccgacaggcccctggcaaaggactggaatgggtcggaatgatcgaccccagcgacagcgagacacactacaaccacatcttcaaggaccgcttcaccatcagcgccgacaccagcaagaataccgcctacctccagatgaactccctgagagccgaggacaccgccgtgtactactgcgccagaaacctgtatctgtggggccagggaaccctggtcacagtgtcatctacgcgtgcctctacaaagggaccctccgtgtttcctctggctcccagcagcaagtctacaagcggaggaacagccgctctgggctgcctggtcaaggattactttcccgagcctgtgaccgtgtcctggaatagcggagcactgacaagcggcgtgcacacctttccagccgtgctgcaaagcagcggcctgtactctctgagcagcgtggtcacagtgcctagctctagcctgggcacccagacctacatctgcaatgtgaaccacaagcctagcaacaccaaggtggacaagagagtggaacccaagagctgtgaagtgaaaaccgactccaccgaccacgtgaagcccaaagagacagagaacaccaagcagcccagcaagagctgccacaagcccaaggccatcgtgcacaccgagaaagtgaacatgatgagcctgaccgtgctgggcttcagaatcctgctgctgaaagtggccggctttaacctgctgatgaccctgcggctgtggtccagc

SEQ ID NO: 40325 - DNA, 1954 bp, synthetic construct
  source 1..1954: mol_type = other DNA
atggccttaccagtgaccgccttgctcctgccgctggccttgctgctccacgccgccaggccggacatccagttgacccagtcccccagctcactcagcgccagtgtgggggaccgggtgaccattacctgtaaagccagtcagagtgtggactatgacggggatagcttcctgaattggtatcagcagaagcctggcaaagccccaaagctgctgatctacgctgcatctaatctggagtcaggcgtgccttccaggttctccggtagtgggtctgggaccgatttcacattgaccatttcatccctccaacccgaggatttcgctacatattactgtcagcagtccaatgaggaccctctcacctttggccagggcaccaaagttgaaattaagagactcgaggagggacagcctaaggccaatcctaccgtgacactgttccctccaagcagcgaagaactccaggccaacaaggccacacttgtgtgcctgatctccgacttctaccctggggctgtgacagtggcttggaaggccgatggatctcctgtgaaagccggcgtggaaaccaccaagccatccaagcagagcaacaacaaatacgccgccagctcctacctgagcctgacacctgagcagtggaagtcccacagatcctacagctgccaagtgacccacgaaggcagcaccgtggaaaagacagtggcccctacagagtgcagccccatcaagaccgatgtgattacaatggaccccaaggacaactgctccaaggacgccaacgataccctgctgctccagctgaccaacaccagcgccaccatcctgtacgagatcctgctgggcaaggccaccctgtacgccgtgctggtgtctgccctggtgctgatggctatggtcaagcggaaggacagccggggaccgcgccaagagaagcggatctggcgtgaagcagaccctgaatttcgacctgctgaagctggctggcgacgtggaatccaacccaggccctactagtatggactggatttggcgcatccttttccttgtcggcgctgctaccggcgcgcattccttcgaagaagtccaacttgtggagtctggagggggcctggtgcagcccggcggctctctcagactgtcttgtgcggcaagcggctacaccttcacctcttactggatagaatgggtgaggcaggcacctggaaagggactggagtggattggagagattctgccaggagggggagatacaaattacaatgaaatcttcaaggggcgggccaccttttcagcggataccagcaagaatacagcttacctgcagatgaatagcctccgggcagaagataccgctgtttattattgcacgagacgggtgccaataagactggactattgggggcaagggactcttgtcaccgtcagttcaacgcgtgcctctacaaagggaccctccgtgtttcctctggctcccagcagcaagtctacaagcggaggaacagccgctctgggctgcctggtcaaggattactttcccgagcctgtgaccgtgtcctggaatagcggagcactgacaagcggcgtgcacacctttccagccgtgctgcaaagcagcggcctgtactctctgagcagcgtggtcacagtgcctagctctagcctgggcacccagacctacatctgcaatgtgaaccacaagcctagcaacaccaaggtggacaagagagtggaacccaagagctgtgaagtgaaaaccgactccaccgaccacgtgaagcccaaagagacagagaacaccaagcagcccagcaagagctgccacaagcccaaggccatcgtgcacaccgagaaagtgaacatgatgagcctgaccgtgctgggcttcagaatcctgctgctgaaagtggccggctttaacctgctgatgaccctgcggctgtggtccagc

SEQ ID NO: 40326 - DNA, 1954 bp, synthetic construct
  source 1..1954: mol_type = other DNA
atggccttaccagtgaccgccttgctcctgccgctggccttgctgctccacgccgccaggccggacatccagttgacccagtcccccagctcactcagcgccagtgtgggggaccgggtgaccattacctgtaaagccagtcagagtgtggactatgagggggatagcttcctgaattggtatcagcagaagcctggcaaagccccaaagctgctgatctacgctgcatctaatctggagtcaggcgtgccttctaggttctccggtagtgggtctgggaccgatttcacattgaccatttcatccctccaacccgaggatttcgctacatattactgtcagcagtccaatgaggaccctctcacctttggccagggcaccaaagttgaaattaagagactcgaggagggacagcctaaggccaatcctaccgtgacactgttccctccaagcagcgaagaactccaggccaacaaggccacacttgtgtgcctgatctccgacttctaccctggggctgtgacagtggcttggaaggccgatggatctcctgtgaaagccggcgtggaaaccaccaagccatccaagcagagcaacaacaaatacgccgccagctcctacctgagcctgacacctgagcagtggaagtcccacagatcctacagctgccaagtgacccacgaaggcagcaccgtggaaaagacagtggcccctacagagtgcagccccatcaagaccgatgtgattacaatggaccccaaggacaactgctccaaggacgccaacgataccctgctgctccagctgaccaacaccagcgccaccatcctgtacgagatcctgctgggcaaggccaccctgtacgccgtgctggtgtctgccctggtgctgatggctatggtcaagcggaaggacagccggggaccgcgccaagagaagcggatctggcgtgaagcagaccctgaatttcgacctgctgaagctggctggcgacgtggaatccaacccaggccctactagtatggactggatttggcgcatccttttccttgtcggcgctgctaccggcgcgcattccttcgaagaagtccaacttgtggagtctggagggggcctggtgcagcccggcggctctctcagactgtcttgtgcggcaagcggctacaccttcacctcttactggatagaatgggtgaggcaggcacctggaaagggactggagtggattggagagattctgccaggagggggagatacaaattacaatgaaatcttcaaggggcgggccaccttttcagcggataccagcaagaatacagcttacctgcagatgaatagcctccgggcagaagataccgctgtttattattgcacgagacgggtgccaataagactggactattgggggcaagggactcttgtcaccgtcagttcaacgcgtgcctctacaaagggaccctccgtgtttcctctggctcccagcagcaagtctacaagcggaggaacagccgctctgggctgcctggtcaaggattactttcccgagcctgtgaccgtgtcctggaatagcggagcactgacaagcggcgtgcacacctttccagccgtgctgcaaagcagcggcctgtactctctgagcagcgtggtcacagtgcctagctctagcctgggcacccagacctacatctgcaatgtgaaccacaagcctagcaacaccaaggtggacaagagagtggaacccaagagctgtgaagtgaaaaccgactccaccgaccacgtgaagcccaaagagacagagaacaccaagcagcccagcaagagctgccacaagcccaaggccatcgtgcacaccgagaaagtgaacatgatgagcctgaccgtgctgggcttcagaatcctgctgctgaaagtggccggctttaacctgctgatgaccctgcggctgtggtccagc

SEQ ID NO: 40327 - DNA, 1951 bp, synthetic construct
  source 1..1951: mol_type = other DNA
atggccttaccagtgaccgccttgctcctgccgctggccttgctgctccacgccgccaggccggacatcgtgatgacacagagccctgatagcctggccgtgtctctgggagagagagccaccattaactgcaaggccagccagagcgtggactacgacggcgacagcttcctgaactggtatcagcagaagcccggccagcctcctaagctgctgatctacgccgccagcaatctggaaagcggcgtgccaagcagattttccggctctggcagcggcaccgatttcaccctgacaatatccagcctccagcctgaggacgtggccgtgtactactgccagcagagcaacgacgaccctctgacctttggacagggcaccaaggtggaaatcaaactcgaggagggacagcctaaggccaatcctaccgtgacactgttccctccaagcagcgaagaactccaggccaacaaggccacacttgtgtgcctgatctccgacttctaccctggggctgtgacagtggcttggaaggccgatggatctcctgtgaaagccggcgtggaaaccaccaagccatccaagcagagcaacaacaaatacgccgccagctcctacctgagcctgacacctgagcagtggaagtcccacagatcctacagctgccaagtgacccacgaaggcagcaccgtggaaaagacagtggcccctacagagtgcagccccatcaagaccgatgtgattacaatggaccccaaggacaactgctccaaggacgccaacgataccctgctgctccagctgaccaacaccagcgccaccatcctgtacgagatcctgctgggcaaggccaccctgtacgccgtgctggtgtctgccctggtgctgatggctatggtcaagcggaaggacagccggggaccgcgccaagagaagcggatctggcgtgaagcagaccctgaatttcgacctgctgaagctggctggcgacgtggaatccaacccaggccctactagtatggactggatttggcgcatccttttccttgtcggcgctgctaccggcgcgcattccttcgaacaagttcagctggttcagagcggagccgaagtgaagaaacctggggcctctgtgaaggtgtcctgcaaagccagcggctacacctttaccagctactggatcaactgggtccgacaggcccctggacaaggactggaatggatgggacagatccttccaggcggaggggacaccaactacaacggcaagttcaagggcagagtgaccatcaccgccgacaccagcacaagcaccgcctacatggaactgagcagcctgagaagcgaggacaccgccgtgtattattgcaccagacgggtgcccatccggctggattattggggacagggaaccctggtcaccgtgtctagtacgcgtgcctctacaaagggaccctccgtgtttcctctggctcccagcagcaagtctacaagcggaggaacagccgctctgggctgcctggtcaaggattactttcccgagcctgtgaccgtgtcctggaatagcggagcactgacaagcggcgtgcacacctttccagccgtgctgcaaagcagcggcctgtactctctgagcagcgtggtcacagtgcctagctctagcctgggcacccagacctacatctgcaatgtgaaccacaagcctagcaacaccaaggtggacaagagagtggaacccaagagctgtgaagtgaaaaccgactccaccgaccacgtgaagcccaaagagacagagaacaccaagcagcccagcaagagctgccacaagcccaaggccatcgtgcacaccgagaaagtgaacatgatgagcctgaccgtgctgggcttcagaatcctgctgctgaaagtggccggctttaacctgctgatgaccctgcggctgtggtccagc

SEQ ID NO: 40328 - DNA, 1951 bp, synthetic construct
  source 1..1951: mol_type = other DNA
atggccttaccagtgaccgccttgctcctgccgctggccttgctgctccacgccgccaggccggacatcgtgatgacacagagccctgatagcctggccgtgtctctgggagagagagccaccattaactgcaaggccagccagagcgtggactacgacggcgacagcttcctgaactggtatcagcagaagcccggccagcctcctaagctgctgatctacgccgccagcaatctggaaagcggcgtgccaagcagattttccggctctggcagcggcaccgatttcaccctgacaatatccagcctccagcctgaggacgtggccgtgtactactgccagcagagcaacgacgaccctctgacctttggacagggcaccaaggtggaaatcaaactcgaggagggacagcctaaggccaatcctaccgtgacactgttccctccaagcagcgaagaactccaggccaacaaggccacacttgtgtgcctgatctccgacttctaccctggggctgtgacagtggcttggaaggccgatggatctcctgtgaaagccggcgtggaaaccaccaagccatccaagcagagcaacaacaaatacgccgccagctcctacctgagcctgacacctgagcagtggaagtcccacagatcctacagctgccaagtgacccacgaaggcagcaccgtggaaaagacagtggcccctacagagtgcagccccatcaagaccgatgtgattacaatggaccccaaggacaactgctccaaggacgccaacgataccctgctgctccagctgaccaacaccagcgccaccatcctgtacgagatcctgctgggcaaggccaccctgtacgccgtgctggtgtctgccctggtgctgatggctatggtcaagcggaaggacagccggggaccgcgccaagagaagcggatctggcgtgaagcagaccctgaatttcgacctgctgaagctggctggcgacgtggaatccaacccaggccctactagtatggactggatttggcgcatccttttccttgtcggcgctgctaccggcgcgcattccttcgaagaagtccaacttgtggagtctggagggggcctggtgcagcccggcggctctctcagactgtcttgtgcggcaagcggctacaccttcacctcttactggatagaatgggtgaggcaggcacctggaaagggactggagtggattggagagattctgccaggagggggagatacaaattacaatgaaatcttcaaggggcgggccaccttttcagcggataccagcaagaatacagcttacctgcagatgaatagcctccgggcagaagataccgctgtttattattgcacgagacgggtgccaataagactggactattgggggcaagggactcttgtcaccgtcagttcaacgcgtgcctctacaaagggaccctccgtgtttcctctggctcccagcagcaagtctacaagcggaggaacagccgctctgggctgcctggtcaaggattactttcccgagcctgtgaccgtgtcctggaatagcggagcactgacaagcggcgtgcacacctttccagccgtgctgcaaagcagcggcctgtactctctgagcagcgtggtcacagtgcctagctctagcctgggcacccagacctacatctgcaatgtgaaccacaagcctagcaacaccaaggtggacaagagagtggaacccaagagctgtgaagtgaaaaccgactccaccgaccacgtgaagcccaaagagacagagaacaccaagcagcccagcaagagctgccacaagcccaaggccatcgtgcacaccgagaaagtgaacatgatgagcctgaccgtgctgggcttcagaatcctgctgctgaaagtggccggctttaacctgctgatgaccctgcggctgtggtccagc

SEQ ID NO: 40329 - DNA, 1951 bp, synthetic construct
  source 1..1951: mol_type = other DNA
atggccttaccagtgaccgccttgctcctgccgctggccttgctgctccacgccgccaggccggacatcgtgatgacacagagccctgatagcctggccgtgtctctgggagagagagccaccattaactgcaaggccagccagagcgtggactacgacggcgacagcttcctgaactggtatcagcagaagcccggccagcctcctaagctgctgatctacgccgccagcaatctggaaagcggcgtgccaagcagattttccggctctggcagcggcaccgatttcaccctgacaatatccagcctccagcctgaggacgtggccgtgtactactgccagcagagcaacgacgaccctctgacctttggacagggcaccaaggtggaaatcaaactcgaggagggacagcctaaggccaatcctaccgtgacactgttccctccaagcagcgaagaactccaggccaacaaggccacacttgtgtgcctgatctccgacttctaccctggggctgtgacagtggcttggaaggccgatggatctcctgtgaaagccggcgtggaaaccaccaagccatccaagcagagcaacaacaaatacgccgccagctcctacctgagcctgacacctgagcagtggaagtcccacagatcctacagctgccaagtgacccacgaaggcagcaccgtggaaaagacagtggcccctacagagtgcagccccatcaagaccgatgtgattacaatggaccccaaggacaactgctccaaggacgccaacgataccctgctgctccagctgaccaacaccagcgccaccatcctgtacgagatcctgctgggcaaggccaccctgtacgccgtgctggtgtctgccctggtgctgatggctatggtcaagcggaaggacagccggggaccgcgccaagagaagcggatctggcgtgaagcagaccctgaatttcgacctgctgaagctggctggcgacgtggaatccaacccaggccctactagtatggactggatttggcgcatccttttccttgtcggcgctgctaccggcgcgcattccttcgaagaagtccaacttgtggagtctggagggggcctggtgcagcccggcggctctctcagactgtcttgtgcggcaagcggctacaccttcagctcttactggatagaatgggtgaggcaggcacctggaaagggactggagtggattggagagattctgccaggagggggagatacaaattacaatgaaatcttcaaggggcgggccaccttttcagcggataccagcaagaatacagcttacctgcagatgaatagcctccgggcagaagataccgctgtttattattgcacgagacgggtgccaataagactggactattgggggcaagggactcttgtcaccgtcagttcaacgcgtgcctctacaaagggaccctccgtgtttcctctggctcccagcagcaagtctacaagcggaggaacagccgctctgggctgcctggtcaaggattactttcccgagcctgtgaccgtgtcctggaatagcggagcactgacaagcggcgtgcacacctttccagccgtgctgcaaagcagcggcctgtactctctgagcagcgtggtcacagtgcctagctctagcctgggcacccagacctacatctgcaatgtgaaccacaagcctagcaacaccaaggtggacaagagagtggaacccaagagctgtgaagtgaaaaccgactccaccgaccacgtgaagcccaaagagacagagaacaccaagcagcccagcaagagctgccacaagcccaaggccatcgtgcacaccgagaaagtgaacatgatgagcctgaccgtgctgggcttcagaatcctgctgctgaaagtggccggctttaacctgctgatgaccctgcggctgtggtccagc

SEQ ID NO: 40330 - DNA, 1942 bp, synthetic construct
  source 1..1942: mol_type = other DNA
atggccttaccagtgaccgccttgctcctgccgctggccttgctgctccacgccgccaggccggacgtggtcatgacacagagcccttctagcctgtctgccagcgtgggcgacagagtgaccatcacctgtatggcctccgaggacatctacatccggctggcctggtatcagcagaagcctggaaacgcccctaagctgctgatctacgccgccacctctctggaaacaggcgtgccaagcagattttccggcagcggctctggcaccgatttcaccctgacaatatccagcctccagcctgaggacttcgccacctactactgccagcagtattggagcagcccctggacatttggcggaggcaccaaggtggaaatcaaactcgaggagggacagcctaaggccaatcctaccgtgacactgttccctccaagcagcgaagaactccaggccaacaaggccacacttgtgtgcctgatctccgacttctaccctggggctgtgacagtggcttggaaggccgatggatctcctgtgaaagccggcgtggaaaccaccaagccatccaagcagagcaacaacaaatacgccgccagctcctacctgagcctgacacctgagcagtggaagtcccacagatcctacagctgccaagtgacccacgaaggcagcaccgtggaaaagacagtggcccctacagagtgcagccccatcaagaccgatgtgattacaatggaccccaaggacaactgctccaaggacgccaacgataccctgctgctccagctgaccaacaccagcgccaccatcctgtacgagatcctgctgggcaaggccaccctgtacgccgtgctggtgtctgccctggtgctgatggctatggtcaagcggaaggacagccggggaccgcgccaagagaagcggatctggcgtgaagcagaccctgaatttcgacctgctgaagctggctggcgacgtggaatccaacccaggccctactagtatggactggatttggcgcatccttttccttgtcggcgctgctaccggcgcgcattccttcgaacaggttcagctgcaagagtctggccccggactggtcaagcctagccaaacactgagcctgacctgtaccgtgtccggctacagcatcaccagcgactacacctggaactggatcagacagcctcctggcaacggactggaatggatcggctacatcacctacagcggcagcaccagctacaaccccagcctgaaaagccgggtgctgatctccgtggacaccagcaagaatcaggtgtccctgaagctgagcagcgtgacagccgctgataccgccgtgtactactgtgccagactggggagaagatacacaatggactactggggccagggcaccaccgtgacagtttcttctacgcgtgcctctacaaagggaccctccgtgtttcctctggctcccagcagcaagtctacaagcggaggaacagccgctctgggctgcctggtcaaggattactttcccgagcctgtgaccgtgtcctggaatagcggagcactgacaagcggcgtgcacacctttccagccgtgctgcaaagcagcggcctgtactctctgagcagcgtggtcacagtgcctagctctagcctgggcacccagacctacatctgcaatgtgaaccacaagcctagcaacaccaaggtggacaagagagtggaacccaagagctgtgaagtgaaaaccgactccaccgaccacgtgaagcccaaagagacagagaacaccaagcagcccagcaagagctgccacaagcccaaggccatcgtgcacaccgagaaagtgaacatgatgagcctgaccgtgctgggcttcagaatcctgctgctgaaagtggccggctttaacctgctgatgaccctgcggctgtggtccagc

SEQ ID NO: 40331 - DNA, 1939 bp, synthetic construct
  source 1..1939: mol_type = other DNA
atggccttaccagtgaccgccttgctcctgccgctggccttgctgctccacgccgccaggccggacatccagatgacacagagccctagcagcctgtctgccagcgtgggagacagagtgaccatcacatgcaaggccagcgacctgatccacaactggctggcctggtatcagcagaagcctggcaaggcccctaagctgctgatctacggcgctacctctctggaaacaggcgtgcccagcagattttctggcagcggctctggcaccgacttcaccctgacaatatccagcctccagcctgaggacttcgccacctactactgccagcagtactggaccacacctttcaccttcggccagggcaccaaggtggaaatcaaaagactcgaggagggacagcctaaggccaatcctaccgtgacactgttccctccaagcagcgaagaactccaggccaacaaggccacacttgtgtgcctgatctccgacttctaccctggggctgtgacagtggcttggaaggccgatggatctcctgtgaaagccggcgtggaaaccaccaagccatccaagcagagcaacaacaaatacgccgccagctcctacctgagcctgacacctgagcagtggaagtcccacagatcctacagctgccaagtgacccacgaaggcagcaccgtggaaaagacagtggcccctacagagtgcagccccatcaagaccgatgtgattacaatggaccccaaggacaactgctccaaggacgccaacgataccctgctgctccagctgaccaacaccagcgccaccatcctgtacgagatcctgctgggcaaggccaccctgtacgccgtgctggtgtctgccctggtgctgatggctatggtcaagcggaaggacagccggggaccgcgccaagagaagcggatctggcgtgaagcagaccctgaatttcgacctgctgaagctggctggcgacgtggaatccaacccaggccctactagtatggactggatttggcgcatccttttccttgtcggcgctgctaccggcgcgcattccttcgaagaagtgcagctggttgaatcaggtggcggcctggttcaacctggcggatctctgagactgagctgtgccgccagcggctacagcatcaccaatgactacgcctggaactgggtccgacaggcccctggaaaaggactggaatgggtcggatatatcagctactccggctacaccacctacaatcccagcatcaagagccggttcaccatcagcagagacaccagcaagaacaccctgtacctccagatgaactccctgagagccgaggacaccgccgtgtactattgtgccagatggaccagcggcctggactattggggacagggaacactggtcaccgtgtcctctacgcgtgcctctacaaagggaccctccgtgtttcctctggctcccagcagcaagtctacaagcggaggaacagccgctctgggctgcctggtcaaggattactttcccgagcctgtgaccgtgtcctggaatagcggagcactgacaagcggcgtgcacacctttccagccgtgctgcaaagcagcggcctgtactctctgagcagcgtggtcacagtgcctagctctagcctgggcacccagacctacatctgcaatgtgaaccacaagcctagcaacaccaaggtggacaagagagtggaacccaagagctgtgaagtgaaaaccgactccaccgaccacgtgaagcccaaagagacagagaacaccaagcagcccagcaagagctgccacaagcccaaggccatcgtgcacaccgagaaagtgaacatgatgagcctgaccgtgctgggcttcagaatcctgctgctgaaagtggccggctttaacctgctgatgaccctgcggctgtggtccagc

SEQ ID NO: 40332 - DNA, 1960 bp, synthetic construct
  source 1..1960: mol_type = other DNA
atggccttaccagtgaccgccttgctcctgccgctggccttgctgctccacgccgccaggccggacatcgtgatgacacagagccctgatagcctggccgtgtctctgggagagagagccaccatcaactgcaagagcagccagagcctgctgaacagcggcaaccagaagaactacctggcctggtatcagcagaagcccggccagcctcctaagctgctgatctactggggcagcaccagatccacaggcgtgcccgatagattttctggctctggcagcggcaccgacttcaccctgacaatttctagcctgcaagccgaggacgtggccgtgtactactgccagaacgactacacataccccttcaccttcggccagggcaccaagctggaaatcaaactcgaggagggacagcctaaggccaatcctaccgtgacactgttccctccaagcagcgaagaactccaggccaacaaggccacacttgtgtgcctgatctccgacttctaccctggggctgtgacagtggcttggaaggccgatggatctcctgtgaaagccggcgtggaaaccaccaagccatccaagcagagcaacaacaaatacgccgccagctcctacctgagcctgacacctgagcagtggaagtcccacagatcctacagctgccaagtgacccacgaaggcagcaccgtggaaaagacagtggcccctacagagtgcagccccatcaagaccgatgtgattacaatggaccccaaggacaactgctccaaggacgccaacgataccctgctgctccagctgaccaacaccagcgccaccatcctgtacgagatcctgctgggcaaggccaccctgtacgccgtgctggtgtctgccctggtgctgatggctatggtcaagcggaaggacagccggggaccgcgccaagagaagcggatctggcgtgaagcagaccctgaatttcgacctgctgaagctggctggcgacgtggaatccaacccaggccctactagtatggactggatttggcgcatccttttccttgtcggcgctgctaccggcgcgcattccttcgaacaagttcagctggttcagagcggagccgaagtgaagaaacctggggcctctgtgaaggtgtcctgcaaggcttccggctataccttcaccagcttttggctgaactgggtccgacaggcccctggacaaggactggaatggatgggcaacatctaccccagcaccagctacaccgtgtacaaccagaaattcaaggaccgcgtgaccatgaccagggacaccagcacaagcacagtgtacatggaactgagcagcctgcggagcgaggataccgccgtgtattattgcgccagaacctggcggggcaacagcttcgattattggggccagggaaccaccgtgaccgtgtcatctacgcgtgcctctacaaagggaccctccgtgtttcctctggctcccagcagcaagtctacaagcggaggaacagccgctctgggctgcctggtcaaggattactttcccgagcctgtgaccgtgtcctggaatagcggagcactgacaagcggcgtgcacacctttccagccgtgctgcaaagcagcggcctgtactctctgagcagcgtggtcacagtgcctagctctagcctgggcacccagacctacatctgcaatgtgaaccacaagcctagcaacaccaaggtggacaagagagtggaacccaagagctgtgaagtgaaaaccgactccaccgaccacgtgaagcccaaagagacagagaacaccaagcagcccagcaagagctgccacaagcccaaggccatcgtgcacaccgagaaagtgaacatgatgagcctgaccgtgctgggcttcagaatcctgctgctgaaagtggccggctttaacctgctgatgaccctgcggctgtggtccagc

SEQ ID NO: 40333 - DNA, 1960 bp, synthetic construct
  source 1..1960: mol_type = other DNA
atggccttaccagtgaccgccttgctcctgccgctggccttgctgctccacgccgccaggccggacatcgtgatgacacagagccctgatagcctggccgtgtctctgggagagagagccaccatcaactgcaagagcagccagagcctgctgaacagcggcaacaacaagaactacgtgacatggtatcagcagaagcccggccagcctcctaagctgctgatctactggggcagcaccagatccacaggcgtgcccgatagattttctggctctggcagcggcaccgacttcaccctgacaatttctagcctgcaagccgaggacgtggccgtgtactactgccagaacgactacacataccccttcaccttcggccagggcaccaagctggaaatcaaactcgaggagggacagcctaaggccaatcctaccgtgacactgttccctccaagcagcgaagaactccaggccaacaaggccacacttgtgtgcctgatctccgacttctaccctggggctgtgacagtggcttggaaggccgatggatctcctgtgaaagccggcgtggaaaccaccaagccatccaagcagagcaacaacaaatacgccgccagctcctacctgagcctgacacctgagcagtggaagtcccacagatcctacagctgccaagtgacccacgaaggcagcaccgtggaaaagacagtggcccctacagagtgcagccccatcaagaccgatgtgattacaatggaccccaaggacaactgctccaaggacgccaacgataccctgctgctccagctgaccaacaccagcgccaccatcctgtacgagatcctgctgggcaaggccaccctgtacgccgtgctggtgtctgccctggtgctgatggctatggtcaagcggaaggacagccggggaccgcgccaagagaagcggatctggcgtgaagcagaccctgaatttcgacctgctgaagctggctggcgacgtggaatccaacccaggccctactagtatggactggatttggcgcatccttttccttgtcggcgctgctaccggcgcgcattccttcgaacaagttcagctggttcagagcggagccgaagtgaagaaacctggggcctctgtgaaggtgtcctgcaaggcttccggctataccttcaccagcttttggctgaactgggtccgacaggcccctggacaaggactggaatggatgggcaacatctaccccagcgacagctacaccgtgtacaaccagaaattcaaggaccgcgtgaccatgaccagggacaccagcacaagcacagtgtacatggaactgagcagcctgcggagcgaggataccgccgtgtattattgcgccagaacctggcggggcaacagcttcgattattggggccagggaaccaccgtgaccgtgtcatctacgcgtgcctctacaaagggaccctccgtgtttcctctggctcccagcagcaagtctacaagcggaggaacagccgctctgggctgcctggtcaaggattactttcccgagcctgtgaccgtgtcctggaatagcggagcactgacaagcggcgtgcacacctttccagccgtgctgcaaagcagcggcctgtactctctgagcagcgtggtcacagtgcctagctctagcctgggcacccagacctacatctgcaatgtgaaccacaagcctagcaacaccaaggtggacaagagagtggaacccaagagctgtgaagtgaaaaccgactccaccgaccacgtgaagcccaaagagacagagaacaccaagcagcccagcaagagctgccacaagcccaaggccatcgtgcacaccgagaaagtgaacatgatgagcctgaccgtgctgggcttcagaatcctgctgctgaaagtggccggctttaacctgctgatgaccctgcggctgtggtccagc

SEQ ID NO: 40334 - DNA, 1936 bp, synthetic construct
  source 1..1936: mol_type = other DNA
atggccttaccagtgaccgccttgctcctgccgctggccttgctgctccacgccgccaggccgcagatcgtgctgacacagagccctgccatcatgtccgcttctcccggcgagaaagtgaccatgacatgtagcgccagcagcagcgtgtccttcatgcactggtatcagcagaagtccggcacaagccccaagcggtggatctacgataccagcacactggcctctggcgtgccagccagatttggcggatctggcagcggcacatcttacagcctgaccatcagcagcatggaagccgaagatgccgccacctactactgccagcagtggtccagcaatcccctgacatttggagccggcaccaagctggaactgaagagactcgaggagggacagcctaaggccaatcctaccgtgacactgttccctccaagcagcgaagaactccaggccaacaaggccacacttgtgtgcctgatctccgacttctaccctggggctgtgacagtggcttggaaggccgatggatctcctgtgaaagccggcgtggaaaccaccaagccatccaagcagagcaacaacaaatacgccgccagctcctacctgagcctgacacctgagcagtggaagtcccacagatcctacagctgccaagtgacccacgaaggcagcaccgtggaaaagacagtggcccctacagagtgcagccccatcaagaccgatgtgattacaatggaccccaaggacaactgctccaaggacgccaacgataccctgctgctccagctgaccaacaccagcgccaccatcctgtacgagatcctgctgggcaaggccaccctgtacgccgtgctggtgtctgccctggtgctgatggctatggtcaagcggaaggacagccggggaccgcgccaagagaagcggatctggcgtgaagcagaccctgaatttcgacctgctgaagctggctggcgacgtggaatccaacccaggccctactagtatggactggatttggcgcatccttttccttgtcggcgctgctaccggcgcgcattccttcgaacaagttcagctgcaacagagcggccctgagctggttaagcctggcgcttctgtgcggatctcttgcaaggccagcggctacaccttcaccagctactacatccactgggtcaagcagcggcctggacagggactcgaatggatcggctggatctaccccggcaacctgaacaccaagtacaacgagaagttcaagggcaaagccacactgaccgccgacaagagcagcagcacagcctacatgcagctgagcagcctgacaagcgaggacagcgccgtgtacttctgcgccagatacgactggtacttcgacgtgtggggagccggaaccaccgtgacagtttcttctacgcgtgcctctacaaagggaccctccgtgtttcctctggctcccagcagcaagtctacaagcggaggaacagccgctctgggctgcctggtcaaggattactttcccgagcctgtgaccgtgtcctggaatagcggagcactgacaagcggcgtgcacacctttccagccgtgctgcaaagcagcggcctgtactctctgagcagcgtggtcacagtgcctagctctagcctgggcacccagacctacatctgcaatgtgaaccacaagcctagcaacaccaaggtggacaagagagtggaacccaagagctgtgaagtgaaaaccgactccaccgaccacgtgaagcccaaagagacagagaacaccaagcagcccagcaagagctgccacaagcccaaggccatcgtgcacaccgagaaagtgaacatgatgagcctgaccgtgctgggcttcagaatcctgctgctgaaagtggccggctttaacctgctgatgaccctgcggctgtggtccagc

SEQ ID NO: 40335 - DNA, 1954 bp, synthetic construct
  source 1..1954: mol_type = other DNA
atggccttaccagtgaccgccttgctcctgccgctggccttgctgctccacgccgccaggccggacatccagatgacacagagccctagcagcctgtctgccagcgtgggagacagagtgaccatcacctgtagagccagccagagcatcagcagctacctgaactggtatcagcagaagcccggcaaggcccctaaactgctgatctatgccgccagctctctccagagcggagtgcctagcagattttctggcagcggctccggcaccgatttcaccctgacaatatccagcctccagcctgaggacttcgccacctactactgccagcagagctacagcacccctctgacctttggacagggcaccaaggtggaaatcaagctcgaggagggacagcctaaggccaatcctaccgtgacactgttccctccaagcagcgaagaactccaggccaacaaggccacacttgtgtgcctgatctccgacttctaccctggggctgtgacagtggcttggaaggccgatggatctcctgtgaaagccggcgtggaaaccaccaagccatccaagcagagcaacaacaaatacgccgccagctcctacctgagcctgacacctgagcagtggaagtcccacagatcctacagctgccaagtgacccacgaaggcagcaccgtggaaaagacagtggcccctacagagtgcagccccatcaagaccgatgtgattacaatggaccccaaggacaactgctccaaggacgccaacgataccctgctgctccagctgaccaacaccagcgccaccatcctgtacgagatcctgctgggcaaggccaccctgtacgccgtgctggtgtctgccctggtgctgatggctatggtcaagcggaaggacagccggggaccgcgccaagagaagcggatctggcgtgaagcagaccctgaatttcgacctgctgaagctggctggcgacgtggaatccaacccaggccctactagtatggactggatttggcgcatccttttccttgtcggcgctgctaccggcgcgcattccttcgaagaggtgcagctggttgaatctggcggaggactggttcagcctggcggatctctgagactgtcttgtgctgccagcggcttcaccttcagctcctacgccatgagctgggtccgacaggctcctggcaaaggactggaatgggtgtccgccatctctggctcaggcggcagcacatattacgccgactctgtgaagggcagattcaccatcagccgggacaacagcaagaacaccctgtacctccagatgaactccctgagagccgaggacaccgccgtgtactattgtgccagactgggctaccccaccaccacactgctgccctttgattattggggccagggcaccctggtcaccgtttcttctacgcgtgcctctacaaagggaccctccgtgtttcctctggctcccagcagcaagtctacaagcggaggaacagccgctctgggctgcctggtcaaggattactttcccgagcctgtgaccgtgtcctggaatagcggagcactgacaagcggcgtgcacacctttccagccgtgctgcaaagcagcggcctgtactctctgagcagcgtggtcacagtgcctagctctagcctgggcacccagacctacatctgcaatgtgaaccacaagcctagcaacaccaaggtggacaagagagtggaacccaagagctgtgaagtgaaaaccgactccaccgaccacgtgaagcccaaagagacagagaacaccaagcagcccagcaagagctgccacaagcccaaggccatcgtgcacaccgagaaagtgaacatgatgagcctgaccgtgctgggcttcagaatcctgctgctgaaagtggccggctttaacctgctgatgaccctgcggctgtggtccagc

SEQ ID NO: 40336 - DNA, 1957 bp, synthetic construct
  source 1..1957: mol_type = other DNA
atggccttaccagtgaccgccttgctcctgccgctggccttgctgctccacgccgccaggccggacatccagatgacacagagccctagcagcctgtctgccagcgtgggagacagagtgaccatcacctgtagagccagccaggacatcaacacagccgtggcttggtatcagcagaagcctggcaaggcccctaagctgctgatctacagcgcctacttcctgtacagcggcgtgcccagcagattcagcggaagcagaagcggcaccgacttcaccctgacaatatccagcctccagcctgaggacttcgccacctactactgccagcagtacagcagatacagccccgtgacctttggacagggcaccaaggtggaaatcaagagactcgaggagggacagcctaaggccaatcctaccgtgacactgttccctccaagcagcgaagaactccaggccaacaaggccacacttgtgtgcctgatctccgacttctaccctggggctgtgacagtggcttggaaggccgatggatctcctgtgaaagccggcgtggaaaccaccaagccatccaagcagagcaacaacaaatacgccgccagctcctacctgagcctgacacctgagcagtggaagtcccacagatcctacagctgccaagtgacccacgaaggcagcaccgtggaaaagacagtggcccctacagagtgcagccccatcaagaccgatgtgattacaatggaccccaaggacaactgctccaaggacgccaacgataccctgctgctccagctgaccaacaccagcgccaccatcctgtacgagatcctgctgggcaaggccaccctgtacgccgtgctggtgtctgccctggtgctgatggctatggtcaagcggaaggacagccggggaccgcgccaagagaagcggatctggcgtgaagcagaccctgaatttcgacctgctgaagctggctggcgacgtggaatccaacccaggccctactagtatggactggatttggcgcatccttttccttgtcggcgctgctaccggcgcgcattccttcgaagaagttcagctggttgaaagtggtggcggcctggttcaacctggcggatctctgagactgagctgtgccgccagcggcttcaatgtgtacgcctctggaatgcactgggtccgacaggcccctggcaaaggacttgagtgggtcgccaaaatctaccccgacagcgactacacctattacgccgacagcgtgaagggcagattcaccatcagcgccgacaccagcaagaacaccgcctacctccagatgaactccctgagagccgaggacaccgccgtgtactactgtagcagagacagcagcttctactacgtgtacgctatggactactggggccagggcacactggtcacagtctcttctacgcgtgcctctacaaagggaccctccgtgtttcctctggctcccagcagcaagtctacaagcggaggaacagccgctctgggctgcctggtcaaggattactttcccgagcctgtgaccgtgtcctggaatagcggagcactgacaagcggcgtgcacacctttccagccgtgctgcaaagcagcggcctgtactctctgagcagcgtggtcacagtgcctagctctagcctgggcacccagacctacatctgcaatgtgaaccacaagcctagcaacaccaaggtggacaagagagtggaacccaagagctgtgaagtgaaaaccgactccaccgaccacgtgaagcccaaagagacagagaacaccaagcagcccagcaagagctgccacaagcccaaggccatcgtgcacaccgagaaagtgaacatgatgagcctgaccgtgctgggcttcagaatcctgctgctgaaagtggccggctttaacctgctgatgaccctgcggctgtggtccagc

SEQ ID NO: 40337 - DNA, 1957 bp, synthetic construct
  source 1..1957: mol_type = other DNA
atggccttaccagtgaccgccttgctcctgccgctggccttgctgctccacgccgccaggccggacatccagatgacacagagccctagcagcctgtctgccagcgtgggagacagagtgaccatcacctgtagagccagccaggacgtgaacacagccgtggcttggtatcagcagaagcctggcaaggcccctaagctgctgatctacagcgcctacttcctgtacagcggcgtgcccagcagattcagcggaagcagaagcggcaccgacttcaccctgacaatatccagcctccagcctgaggacttcgccacctactactgccagcagtacagcagatacagccccgtgacctttggacagggcaccaaggtggaaatcaagagactcgaggagggacagcctaaggccaatcctaccgtgacactgttccctccaagcagcgaagaactccaggccaacaaggccacacttgtgtgcctgatctccgacttctaccctggggctgtgacagtggcttggaaggccgatggatctcctgtgaaagccggcgtggaaaccaccaagccatccaagcagagcaacaacaaatacgccgccagctcctacctgagcctgacacctgagcagtggaagtcccacagatcctacagctgccaagtgacccacgaaggcagcaccgtggaaaagacagtggcccctacagagtgcagccccatcaagaccgatgtgattacaatggaccccaaggacaactgctccaaggacgccaacgataccctgctgctccagctgaccaacaccagcgccaccatcctgtacgagatcctgctgggcaaggccaccctgtacgccgtgctggtgtctgccctggtgctgatggctatggtcaagcggaaggacagccggggaccgcgccaagagaagcggatctggcgtgaagcagaccctgaatttcgacctgctgaagctggctggcgacgtggaatccaacccaggccctactagtatggactggatttggcgcatccttttccttgtcggcgctgctaccggcgcgcattccttcgaagaagttcagctggttgaaagtggtggcggcctggttcaacctggcggatctctgagactgagctgtgccgccagcggcttcaatgtgtacgcctctggaatgcactgggtccgacaggcccctggcaaaggacttgagtgggtcgccaaaatctaccccgacagcgactacacctattacgccgacagcgtgaagggcagattcaccatcagcgccgacaccagcaagaacaccgcctacctccagatgaactccctgagagccgaggacaccgccgtgtactactgtagcagagacagcagcttctactacgtgtacgctatggactactggggccagggcacactggtcacagtctcttctacgcgtgcctctacaaagggaccctccgtgtttcctctggctcccagcagcaagtctacaagcggaggaacagccgctctgggctgcctggtcaaggattactttcccgagcctgtgaccgtgtcctggaatagcggagcactgacaagcggcgtgcacacctttccagccgtgctgcaaagcagcggcctgtactctctgagcagcgtggtcacagtgcctagctctagcctgggcacccagacctacatctgcaatgtgaaccacaagcctagcaacaccaaggtggacaagagagtggaacccaagagctgtgaagtgaaaaccgactccaccgaccacgtgaagcccaaagagacagagaacaccaagcagcccagcaagagctgccacaagcccaaggccatcgtgcacaccgagaaagtgaacatgatgagcctgaccgtgctgggcttcagaatcctgctgctgaaagtggccggctttaacctgctgatgaccctgcggctgtggtccagc

SEQ ID NO: 40338 - DNA, 1942 bp, synthetic construct
  source 1..1942: mol_type = other DNA
atggccttaccagtgaccgccttgctcctgccgctggccttgctgctccacgccgccaggccggacatccagatgacacagagccctagcagcctgtctgccagcgtgggagacagagtgaccatcacctgtagagccagccaggatgtgtctacagccgtggcctggtatcagcagaagcctggaaaggcccctaagctgctgatctacagcgccagctttctgtactccggcgtgcccagcagattcagcggaagcagaagcggcaccgacttcaccctgacaatatccagcctccagcctgaggacttcgccacctactactgccagcagtacctgtaccagccttggacattcggccagggcaccaaggtggaaatcaagagactcgaggagggacagcctaaggccaatcctaccgtgacactgttccctccaagcagcgaagaactccaggccaacaaggccacacttgtgtgcctgatctccgacttctaccctggggctgtgacagtggcttggaaggccgatggatctcctgtgaaagccggcgtggaaaccaccaagccatccaagcagagcaacaacaaatacgccgccagctcctacctgagcctgacacctgagcagtggaagtcccacagatcctacagctgccaagtgacccacgaaggcagcaccgtggaaaagacagtggcccctacagagtgcagccccatcaagaccgatgtgattacaatggaccccaaggacaactgctccaaggacgccaacgataccctgctgctccagctgaccaacaccagcgccaccatcctgtacgagatcctgctgggcaaggccaccctgtacgccgtgctggtgtctgccctggtgctgatggctatggtcaagcggaaggacagccggggaccgcgccaagagaagcggatctggcgtgaagcagaccctgaatttcgacctgctgaagctggctggcgacgtggaatccaacccaggccctactagtatggactggatttggcgcatccttttccttgtcggcgctgctaccggcgcgcattccttcgaagaagttcagctggttgagtctggcggaggactggttcaacctggcggaagcctgagactgtcttgtgccgccagcggcttcaacatcgactactacggaatgcactgggtccgacaggcccctggcaaaggacttgaatgggtcgcctctctgtacggcggcagcgatagcacagattacgccgactctgtgaagggcagattcaccatcagcgccgacaccagcaagaacaccgcctacctccagatgaactccctgagagccgaagataccgccgtgtactactgctccagacagtacagcgcctacttcgactattggggccagggaaccctggtcaccgttagctctacgcgtgcctctacaaagggaccctccgtgtttcctctggctcccagcagcaagtctacaagcggaggaacagccgctctgggctgcctggtcaaggattactttcccgagcctgtgaccgtgtcctggaatagcggagcactgacaagcggcgtgcacacctttccagccgtgctgcaaagcagcggcctgtactctctgagcagcgtggtcacagtgcctagctctagcctgggcacccagacctacatctgcaatgtgaaccacaagcctagcaacaccaaggtggacaagagagtggaacccaagagctgtgaagtgaaaaccgactccaccgaccacgtgaagcccaaagagacagagaacaccaagcagcccagcaagagctgccacaagcccaaggccatcgtgcacaccgagaaagtgaacatgatgagcctgaccgtgctgggcttcagaatcctgctgctgaaagtggccggctttaacctgctgatgaccctgcggctgtggtccagc

SEQ ID NO: 40339 - DNA, 1948 bp, synthetic construct
  source 1..1948: mol_type = other DNA
atggccttaccagtgaccgccttgctcctgccgctggccttgctgctccacgccgccaggccggagatcgtgctgacacagtctcccgccacactgtcactgtctccaggcgaaagagccacactgagctgtagagccagccagagcgtgtcctcttacctggcctggtatcagcagaagcctggacaggctccccggctgctgatctacgatgccagcaatagagccacaggcatccccgccagattttctggctctggcagcggcaccgatttcaccctgaccataagcagcctggaacctgaggacttcgccgtgtactactgccagcagagaagcgactggcccctgacatttggcggcggaacaaaggtggaaatcaaactcgaggagggacagcctaaggccaatcctaccgtgacactgttccctccaagcagcgaagaactccaggccaacaaggccacacttgtgtgcctgatctccgacttctaccctggggctgtgacagtggcttggaaggccgatggatctcctgtgaaagccggcgtggaaaccaccaagccatccaagcagagcaacaacaaatacgccgccagctcctacctgagcctgacacctgagcagtggaagtcccacagatcctacagctgccaagtgacccacgaaggcagcaccgtggaaaagacagtggcccctacagagtgcagccccatcaagaccgatgtgattacaatggaccccaaggacaactgctccaaggacgccaacgataccctgctgctccagctgaccaacaccagcgccaccatcctgtacgagatcctgctgggcaaggccaccctgtacgccgtgctggtgtctgccctggtgctgatggctatggtcaagcggaaggacagccggggaccgcgccaagagaagcggatctggcgtgaagcagaccctgaatttcgacctgctgaagctggctggcgacgtggaatccaacccaggccctactagtatggactggatttggcgcatccttttccttgtcggcgctgctaccggcgcgcattccttcgaacaagttcagctggttcagagcggagccgaagtgaagaaacctggcagcagcgtgaaggtgtcctgcaaagcaagcggcggcacctttagctcctacgccatccactgggttcgacaggcaccaggacaaggactggaatggatgggcagaatcatccccatcgagggcagagcctactacgcccagaaattccagggcagagtgaccatcaccgccgacgagtctacaagcaccgcctacatggaactgagcagcctgagaagcgaggataccgctgtgtactattgcgccagaggccggtacagctacagatattggttcgactactggggccagggcaccctggttacagtctcttctacgcgtgcctctacaaagggaccctccgtgtttcctctggctcccagcagcaagtctacaagcggaggaacagccgctctgggctgcctggtcaaggattactttcccgagcctgtgaccgtgtcctggaatagcggagcactgacaagcggcgtgcacacctttccagccgtgctgcaaagcagcggcctgtactctctgagcagcgtggtcacagtgcctagctctagcctgggcacccagacctacatctgcaatgtgaaccacaagcctagcaacaccaaggtggacaagagagtggaacccaagagctgtgaagtgaaaaccgactccaccgaccacgtgaagcccaaagagacagagaacaccaagcagcccagcaagagctgccacaagcccaaggccatcgtgcacaccgagaaagtgaacatgatgagcctgaccgtgctgggcttcagaatcctgctgctgaaagtggccggctttaacctgctgatgaccctgcggctgtggtccagc

SEQ ID NO: 40340 - DNA, 1948 bp, synthetic construct
  source 1..1948: mol_type = other DNA
atggccttaccagtgaccgccttgctcctgccgctggccttgctgctccacgccgccaggccggagatcgtgctgacacagtctcccgccacactgtcactgtctccaggcgaaagagccacactgagctgtagagccagccagagcgtgtcctcttacctggcctggtatcagcagaagcctggacaggctccccggctgctgatctacgatgccagcaatagagccacaggcatccccgccagattttctggctctggcagcggcaccgatttcaccctgaccataagcagcctggaacctgaggacttcgccgtgtactactgccagcagagaagcaactggcccctgacctttggacagggcaccaaggtggaaatcaaactcgaggagggacagcctaaggccaatcctaccgtgacactgttccctccaagcagcgaagaactccaggccaacaaggccacacttgtgtgcctgatctccgacttctaccctggggctgtgacagtggcttggaaggccgatggatctcctgtgaaagccggcgtggaaaccaccaagccatccaagcagagcaacaacaaatacgccgccagctcctacctgagcctgacacctgagcagtggaagtcccacagatcctacagctgccaagtgacccacgaaggcagcaccgtggaaaagacagtggcccctacagagtgcagccccatcaagaccgatgtgattacaatggaccccaaggacaactgctccaaggacgccaacgataccctgctgctccagctgaccaacaccagcgccaccatcctgtacgagatcctgctgggcaaggccaccctgtacgccgtgctggtgtctgccctggtgctgatggctatggtcaagcggaaggacagccggggaccgcgccaagagaagcggatctggcgtgaagcagaccctgaatttcgacctgctgaagctggctggcgacgtggaatccaacccaggccctactagtatggactggatttggcgcatccttttccttgtcggcgctgctaccggcgcgcattccttcgaacaagttcagctggttcagagcggagccgaagtgaagaaacctggcagcagcgtgaaggtgtcctgcaaagcaagcggcggcacctttagcacctacgccatccactgggttcgacaggcaccaggacaaggactggaatggatgggcagaatcatccccatcgagggcagagcctactacgcccagaaattccagggcagagtgaccatcaccgccgacgagtctacaagcaccgcctacatggaactgagcagcctgagaagcgaggataccgctgtgtactattgcgccagaggccggtacagctacagatattggttcgactactggggccagggcaccctggttacagtctcttctacgcgtgcctctacaaagggaccctccgtgtttcctctggctcccagcagcaagtctacaagcggaggaacagccgctctgggctgcctggtcaaggattactttcccgagcctgtgaccgtgtcctggaatagcggagcactgacaagcggcgtgcacacctttccagccgtgctgcaaagcagcggcctgtactctctgagcagcgtggtcacagtgcctagctctagcctgggcacccagacctacatctgcaatgtgaaccacaagcctagcaacaccaaggtggacaagagagtggaacccaagagctgtgaagtgaaaaccgactccaccgaccacgtgaagcccaaagagacagagaacaccaagcagcccagcaagagctgccacaagcccaaggccatcgtgcacaccgagaaagtgaacatgatgagcctgaccgtgctgggcttcagaatcctgctgctgaaagtggccggctttaacctgctgatgaccctgcggctgtggtccagc

SEQ ID NO: 40341 - DNA, 1990 bp, synthetic construct
  source 1..1990: mol_type = other DNA
atggccttaccagtgaccgccttgctcctgccgctggccttgctgctccacgccgccaggccggacatccagatgacacagagcccctctagcctgtctgccagcgtgggagacagagtgaccatcacctgtagagccagccagagcatcagaaactacctgaactggtatcagcaaaagcccggcaaggcccctgagctgctgattcatgctgcaagcagcctccagagcggcgtgccaagcagattttctggcagcggcagcggaaccgacttcaccctgacaatatctagcctccagcctgaggacttcgccagctactactgccagcagagctacagcgcccctcctatcacctttggacagggcaccagactggaaatcaagctcgaggagggacagcctaaggccaatcctaccgtgacactgttccctccaagcagcgaagaactccaggccaacaaggccacacttgtgtgcctgatctccgacttctaccctggggctgtgacagtggcttggaaggccgatggatctcctgtgaaagccggcgtggaaaccaccaagccatccaagcagagcaacaacaaatacgccgccagctcctacctgagcctgacacctgagcagtggaagtcccacagatcctacagctgccaagtgacccacgaaggcagcaccgtggaaaagacagtggcccctacagagtgcagccccatcaagaccgatgtgattacaatggaccccaaggacaactgctccaaggacgccaacgataccctgctgctccagctgaccaacaccagcgccaccatcctgtacgagatcctgctgggcaaggccaccctgtacgccgtgctggtgtctgccctggtgctgatggctatggtcaagcggaaggacagccggggaccgcgccaagagaagcggatctggcgtgaagcagaccctgaatttcgacctgctgaagctggctggcgacgtggaatccaacccaggccctactagtatggactggatttggcgcatccttttccttgtcggcgctgctaccggcgcgcattccttcgaacaggttcagctccagcagtctggacctggcctggtcaagcctagccagacactgtctctgacctgtgccatcagcggcgatagcgtgtcctctaatagagccgcctggaactggatcagacagagccctagcagaggactccagtggctgggcagaacctactaccgcagcaagtggtacaacgactacgccgtgtctctgcggagccggatcaccatcaatcccgtgaccagcaagaaccaggtggccctgcacatgaacagcgtgacccctgaagataccgccgtgtactactgtgccagagccggaattgtggtggtgcccggacctgagacattctactactacgaccacggcctggacgtgtggggccagggaacaacagtgactgtctcttctacgcgtgcctctacaaagggaccctccgtgtttcctctggctcccagcagcaagtctacaagcggaggaacagccgctctgggctgcctggtcaaggattactttcccgagcctgtgaccgtgtcctggaatagcggagcactgacaagcggcgtgcacacctttccagccgtgctgcaaagcagcggcctgtactctctgagcagcgtggtcacagtgcctagctctagcctgggcacccagacctacatctgcaatgtgaaccacaagcctagcaacaccaaggtggacaagagagtggaacccaagagctgtgaagtgaaaaccgactccaccgaccacgtgaagcccaaagagacagagaacaccaagcagcccagcaagagctgccacaagcccaaggccatcgtgcacaccgagaaagtgaacatgatgagcctgaccgtgctgggcttcagaatcctgctgctgaaagtggccggctttaacctgctgatgaccctgcggctgtggtccagc

SEQ ID NO: 40342 - DNA, 1921 bp, synthetic construct
  source 1..1921: mol_type = other DNA
atggccttaccagtgaccgccttgctcctgccgctggccttgctgctccacgccgccaggccggacatccagctgacacagagccctagcacactgagcgccagcatgggcgacagagtgaccatcacatgtagcgcctctagcagcgtgcggttcatccactggtatcagcagaagcctggcaaggcccctaagcggctgatctacgataccagcaaactggcctctggcgtgcccagcagattttctggctctggcagcggcaccgacttcaccctgacaatatctagcctccagcctgaggacttcgccacctactactgtcagcagtggggcagcagccctttcacctttggacagggcaccaaggtggaaatcaagctcgaggagggacagcctaaggccaatcctaccgtgacactgttccctccaagcagcgaagaactccaggccaacaaggccacacttgtgtgcctgatctccgacttctaccctggggctgtgacagtggcttggaaggccgatggatctcctgtgaaagccggcgtggaaaccaccaagccatccaagcagagcaacaacaaatacgccgccagctcctacctgagcctgacacctgagcagtggaagtcccacagatcctacagctgccaagtgacccacgaaggcagcaccgtggaaaagacagtggcccctacagagtgcagccccatcaagaccgatgtgattacaatggaccccaaggacaactgctccaaggacgccaacgataccctgctgctccagctgaccaacaccagcgccaccatcctgtacgagatcctgctgggcaaggccaccctgtacgccgtgctggtgtctgccctggtgctgatggctatggtcaagcggaaggacagccggggaccgcgccaagagaagcggatctggcgtgaagcagaccctgaatttcgacctgctgaagctggctggcgacgtggaatccaacccaggccctactagtatggactggatttggcgcatccttttccttgtcggcgctgctaccggcgcgcattccttcgaagtgcagctggttgagtacggtggcggactggttcaacctggcggtagcctgagactgtcttgtgccgccagcggcttcaacatcaaggactactatatccactgggtccgacaggccccaggcaaaggacttgaatgggttgcctggatcgaccccgagaacggcgataccgagttcgtgcccaagtttcagggcagagccaccatgagcgccgacacctctaagaacacagcctacctccagatgaacagcctgagagccgaggacaccgccgtgtactactgtaaaaccggcggcttttggggccagggcacactggtcacagtcagctctacgcgtgcctctacaaagggaccctccgtgtttcctctggctcccagcagcaagtctacaagcggaggaacagccgctctgggctgcctggtcaaggattactttcccgagcctgtgaccgtgtcctggaatagcggagcactgacaagcggcgtgcacacctttccagccgtgctgcaaagcagcggcctgtactctctgagcagcgtggtcacagtgcctagctctagcctgggcacccagacctacatctgcaatgtgaaccacaagcctagcaacaccaaggtggacaagagagtggaacccaagagctgtgaagtgaaaaccgactccaccgaccacgtgaagcccaaagagacagagaacaccaagcagcccagcaagagctgccacaagcccaaggccatcgtgcacaccgagaaagtgaacatgatgagcctgaccgtgctgggcttcagaatcctgctgctgaaagtggccggctttaacctgctgatgaccctgcggctgtggtccagctaa

SEQ ID NO: 40343 - DNA, 1936 bp, synthetic construct
  source 1..1936: mol_type = other DNA
atggccttaccagtgaccgccttgctcctgccgctggccttgctgctccacgccgccaggccggacatccagatgacacagagccctagcagcctgtctgccagcgtgggagacagagtgaccatcacatgcaaggccagccaggatgtgggcacagccgtggattggtatcagcagaagcctggcaaggcccctaagctgctgatctactgggccagcacaagacacacaggcgtgcccagcagattttctggcagcggctctggcaccgacttcaccctgacaatatccagcctccagcctgaggacttcgccacctactactgccagcagtacaacagctaccctctgaccttcggccagggcaccaaggtggaaatcaaaagactcgaggagggacagcctaaggccaatcctaccgtgacactgttccctccaagcagcgaagaactccaggccaacaaggccacacttgtgtgcctgatctccgacttctaccctggggctgtgacagtggcttggaaggccgatggatctcctgtgaaagccggcgtggaaaccaccaagccatccaagcagagcaacaacaaatacgccgccagctcctacctgagcctgacacctgagcagtggaagtcccacagatcctacagctgccaagtgacccacgaaggcagcaccgtggaaaagacagtggcccctacagagtgcagccccatcaagaccgatgtgattacaatggaccccaaggacaactgctccaaggacgccaacgataccctgctgctccagctgaccaacaccagcgccaccatcctgtacgagatcctgctgggcaaggccaccctgtacgccgtgctggtgtctgccctggtgctgatggctatggtcaagcggaaggacagccggggaccgcgccaagagaagcggatctggcgtgaagcagaccctgaatttcgacctgctgaagctggctggcgacgtggaatccaacccaggccctactagtatggactggatttggcgcatccttttccttgtcggcgctgctaccggcgcgcattccttcgaagtgcagctggttgaatcaggtggcggcctggttcaacctggcggatctctgagactgagctgtgccgccagcggctacacctttaccgagtacacaatccactgggtccgacaggcccctggcaaaggacttgagtgggtcgccaacatcaaccccaacaatggcggcaccacctacaaccagaagttcgaggacagattcaccatcagccgggacaacagcaagaacaccctgtacctccagatgaactccctgagagccgaggacaccgccgtgtactattgtgccagaggctggaacttcgactactggggccagggaacactggtcaccgttagctctacgcgtgcctctacaaagggaccctccgtgtttcctctggctcccagcagcaagtctacaagcggaggaacagccgctctgggctgcctggtcaaggattactttcccgagcctgtgaccgtgtcctggaatagcggagcactgacaagcggcgtgcacacctttccagccgtgctgcaaagcagcggcctgtactctctgagcagcgtggtcacagtgcctagctctagcctgggcacccagacctacatctgcaatgtgaaccacaagcctagcaacaccaaggtggacaagagagtggaacccaagagctgtgaagtgaaaaccgactccaccgaccacgtgaagcccaaagagacagagaacaccaagcagcccagcaagagctgccacaagcccaaggccatcgtgcacaccgagaaagtgaacatgatgagcctgaccgtgctgggcttcagaatcctgctgctgaaagtggccggctttaacctgctgatgaccctgcggctgtggtccagctaa

SEQ ID NO: 40344 - DNA, 1896 bp, synthetic construct
  source 1..1896: mol_type = other DNA
atggccttaccagtgaccgccttgctcctgccgctggccttgctgctccacgccgccaggccgagctacgtgctgacacagcctccatccgtgtctgtggctccaggacagaccgccagaatcacatgcggcggcaacaacatcggcggcaagagcgtgcactggtatcagcagccacctggacaggctccagtggtggtggtgtacgacgacagcgatagacctagcggcatccccgagagattcagcggcagcaattccggcaataccgccacactgaccatcagcagagtggaagctggcgacgaggccgtgtactactgccaagtgtgggacagcagcagcgatcacgtggtgtttggcggcggaacaaagctgacagtgcttctcgaggagggacagcctaaggccaatcctaccgtgacactgttccctccaagcagcgaagaactccaggccaacaaggccacacttgtgtgcctgatctccgacttctaccctggggctgtgacagtggcttggaaggccgatggatctcctgtgaaagccggcgtggaaaccaccaagccatccaagcagagcaacaacaaatacgccgccagctcctacctgagcctgacacctgagcagtggaagtcccacagatcctacagctgccaagtgacccacgaaggcagcaccgtggaaaagacagtggcccctacagagtgcagcggcagagccgattgcggctttaccagcgagagctaccagcagggcgtgctgagcgcctactacatgtacttgttgctgctgctgaagtccgtggtgtacttcgccatcatcacatgctgcctgctgcggagaaccgccttctgctgcaacggcgagaagtctcgcgccaagagaagcggatctggcgtgaagcagaccctgaatttcgacctgctgaagctggctggcgacgtggaatccaacccaggccctactagtatggactggatttggcgcatccttttccttgtcggcgctgctaccggcgcgcattccttcgaacaactccagctgcaagagtctggccctggcctggtcaagcctagcgaaacactgagcctgacctgtaccgtgtctggcggctctatcagctccagcagctatttctggggctggatcagacaacctcctggcaaaggactggaatggatcggctccatctactacagcggcatcacctactacaaccccagcctgaagtccagagtgaccatctccgtggacaccagcaagaaccagttctccctgaagctgagcagcgtgacagccgccgataccgccgtgtattattgtgccagacatgacggcgctgtggccggcctgtttgattattggggacagggcaccctggtcaccgtgtcatctgctacgcgtgcctctacaaagggaccctccgtgtttcctctggctcccagcagcaagtctacaagcggaggaacagccgctctgggctgcctggtcaaggattactttcccgagcctgtgaccgtgtcctggaatagcggagcactgacaagcggcgtgcacacctttccagccgtgctgcaaagcagcggcctgtactctctgagcagcgtggtcacagtgcctagctctagcctgggcacccagacctacatctgcaatgtgaaccacaagcctagcaacaccaaggtggacaagagagtggaacccaagagctgtatccccgaggacacattcttcccaagccccgagagcagctgcgacgtgaagctggtggaaaagagcttcgagacagacaccaacctgaacttccagaacctgagcgtgatcggcctgcggatgctgttcgccaaaaccgtggccgtgaacttcctgctgaccgccaagctgttcttcctc

SEQ ID NO: 40345 - DNA, 1893 bp, synthetic construct
  source 1..1893: mol_type = other DNA
atggccttaccagtgaccgccttgctcctgccgctggccttgctgctccacgccgccaggccggacatccagatgacacagagccctagcagcctgtctgccagcgtgggagacagagtgaccatcacatgcaaggccagcgaccacatcaacaactggctggcctggtatcagcagaagcctggacaggcccctaagctgctgatctacggcgctaccacactggaaacaggcgtgcccagcagattttctggcagcggctctggcaccgactacaccctgacaatatccagcctccagcctgaggacttcgccacctactactgtcagcagagctggaacaccccttggacattcggccagggcaccaagctggaaatcaagagactcgaggagggacagcctaaggccaatcctaccgtgacactgttccctccaagcagcgaagaactccaggccaacaaggccacacttgtgtgcctgatctccgacttctaccctggggctgtgacagtggcttggaaggccgatggatctcctgtgaaagccggcgtggaaaccaccaagccatccaagcagagcaacaacaaatacgccgccagctcctacctgagcctgacacctgagcagtggaagtcccacagatcctacagctgccaagtgacccacgaaggcagcaccgtggaaaagacagtggcccctacagagtgcagcggcagagccgattgcggctttaccagcgagagctaccagcagggcgtgctgagcgcctactacatgtacttgttgctgctgctgaagtccgtggtgtacttcgccatcatcacatgctgcctgctgcggagaaccgccttctgctgcaacggcgagaagtctcgcgccaagagaagcggatctggcgtgaagcagaccctgaatttcgacctgctgaagctggctggcgacgtggaatccaacccaggccctactagtatggactggatttggcgcatccttttccttgtcggcgctgctaccggcgcgcattccttcgaacaagttcagcttcaacagcctggcgctgagctggtcaaacctggcgcttctgtgaagatgagctgcaaagccagcggctacaccttcagcagctactggatcaactggatgaagcagaaacccggccagggactcgaatggatcggccaaatctatcccggcgacggcgacaccaactacaacggcaagttcaagggcagagccacactgaccgccgatacctctagcagcacagcctacatgcagctgagcagcctgaccagcgaagatagcgccgtgtacttctgtgcccggtccatcacaacagtcgtgggctgcgctatggactattggggccagggaacaagcgtgaccgtgtctagtacgcgtgcctctacaaagggaccctccgtgtttcctctggctcccagcagcaagtctacaagcggaggaacagccgctctgggctgcctggtcaaggattactttcccgagcctgtgaccgtgtcctggaatagcggagcactgacaagcggcgtgcacacctttccagccgtgctgcaaagcagcggcctgtactctctgagcagcgtggtcacagtgcctagctctagcctgggcacccagacctacatctgcaatgtgaaccacaagcctagcaacaccaaggtggacaagagagtggaacccaagagctgtatccccgaggacacattcttcccaagccccgagagcagctgcgacgtgaagctggtggaaaagagcttcgagacagacaccaacctgaacttccagaacctgagcgtgatcggcctgcggatgctgttcgccaaaaccgtggccgtgaacttcctgctgaccgccaagctgttcttcctc

SEQ ID NO: 40346 - DNA, 1893 bp, synthetic construct
  source 1..1893: mol_type = other DNA
atggccttaccagtgaccgccttgctcctgccgctggccttgctgctccacgccgccaggccggacatccagatgacacagagccctagcagcctgtctgccagcgtgggagacagagtgaccatcacatgcaaggccagcgaccacatcaacaactggctggcctggtatcagcagaagcctggacaggcccctaagctgctgatctacggcgctaccacactggaaacaggcgtgcccagcagattttctggcagcggctctggcaccgactacaccctgacaatatccagcctccagcctgaggacttcgccacctactactgtcagcagagctggaacaccccttggacattcggccagggcaccaagctggaaatcaagagactcgaggagggacagcctaaggccaatcctaccgtgacactgttccctccaagcagcgaagaactccaggccaacaaggccacacttgtgtgcctgatctccgacttctaccctggggctgtgacagtggcttggaaggccgatggatctcctgtgaaagccggcgtggaaaccaccaagccatccaagcagagcaacaacaaatacgccgccagctcctacctgagcctgacacctgagcagtggaagtcccacagatcctacagctgccaagtgacccacgaaggcagcaccgtggaaaagacagtggcccctacagagtgcagcggcagagccgattgcggctttaccagcgagagctaccagcagggcgtgctgagcgcctactacatgtacttgttgctgctgctgaagtccgtggtgtacttcgccatcatcacatgctgcctgctgcggagaaccgccttctgctgcaacggcgagaagtctcgcgccaagagaagcggatctggcgtgaagcagaccctgaatttcgacctgctgaagctggctggcgacgtggaatccaacccaggccctactagtatggactggatttggcgcatccttttccttgtcggcgctgctaccggcgcgcattccttcgaacaagttcagcttcaacagcctggcgctgagctggtcaaacctggcgcttctgtgaagatgagctgcaaagccagcggctacgccttcagcagctcttggatcaactggatgaagcagaaacccggccagggactcgaatggatcggccaaatctatcccggcgacggcgacaccaactacaacggcaagttcaagggcagagccacactgaccgccgatacctctagcagcacagcctacatgcagctgagcagcctgaccagcgaagatagcgccgtgtacttctgtgcccggtccatcacaacagtcgtgggctgcgctatggactattggggccagggaacaagcgtgaccgtgtctagtacgcgtgcctctacaaagggaccctccgtgtttcctctggctcccagcagcaagtctacaagcggaggaacagccgctctgggctgcctggtcaaggattactttcccgagcctgtgaccgtgtcctggaatagcggagcactgacaagcggcgtgcacacctttccagccgtgctgcaaagcagcggcctgtactctctgagcagcgtggtcacagtgcctagctctagcctgggcacccagacctacatctgcaatgtgaaccacaagcctagcaacaccaaggtggacaagagagtggaacccaagagctgtatccccgaggacacattcttcccaagccccgagagcagctgcgacgtgaagctggtggaaaagagcttcgagacagacaccaacctgaacttccagaacctgagcgtgatcggcctgcggatgctgttcgccaaaaccgtggccgtgaacttcctgctgaccgccaagctgttcttcctc

SEQ ID NO: 40347 - DNA, 1893 bp, synthetic construct
  source 1..1893: mol_type = other DNA
atggccttaccagtgaccgccttgctcctgccgctggccttgctgctccacgccgccaggccggagatcgtgctgacacagagccctgccaccctgtctctgagccctggcgaaagagccaccctgagctgtagagccagccagagcgtgtccagctacctggcctggtatcagcagaagcccggccaggctccccggctgctgatctacgatgccagcaatagagccaccggcatccccgccagattttccggctctggcagcggcaccgacttcaccctgaccatcagctccctggaacccgaggacttcgccgtgtactactgccagcagcggagcaactggcccatcacattcggccagggcacccggctggaaatcaaactcgaggagggacagcctaaggccaatcctaccgtgacactgttccctccaagcagcgaagaactccaggccaacaaggccacacttgtgtgcctgatctccgacttctaccctggggctgtgacagtggcttggaaggccgatggatctcctgtgaaagccggcgtggaaaccaccaagccatccaagcagagcaacaacaaatacgccgccagctcctacctgagcctgacacctgagcagtggaagtcccacagatcctacagctgccaagtgacccacgaaggcagcaccgtggaaaagacagtggcccctacagagtgcagcggcagagccgattgcggctttaccagcgagagctaccagcagggcgtgctgagcgcctactacatgtacttgttgctgctgctgaagtccgtggtgtacttcgccatcatcacatgctgcctgctgcggagaaccgccttctgctgcaacggcgagaagtctcgcgccaagagaagcggatctggcgtgaagcagaccctgaatttcgacctgctgaagctggctggcgacgtggaatccaacccaggccctactagtatggactggatttggcgcatccttttccttgtcggcgctgctaccggcgcgcattccttcgaagaagtgcagctggtggaatcaggcggcggactggtgcagcctggcagaagcctgagactgagctgtgccgccagcggcttcaccttcaacgactacgccatgcactgggtgcgccaggcccctggaaaaggactggaatgggtgtccacaatcagctggaacagcggcagcatcggctacgccgatagcgtgaagggccggttcaccatcagccgggacaacgccaagaagtccctgtacctccagatgaacagcctgcgggccgaggacacagccctgtactattgcgccaaggacatccagtacggcaactactactacggcatggacgtgtggggccagggaaccaccgtgaccgtgtcatctacgcgtgcctctacaaagggaccctccgtgtttcctctggctcccagcagcaagtctacaagcggaggaacagccgctctgggctgcctggtcaaggattactttcccgagcctgtgaccgtgtcctggaatagcggagcactgacaagcggcgtgcacacctttccagccgtgctgcaaagcagcggcctgtactctctgagcagcgtggtcacagtgcctagctctagcctgggcacccagacctacatctgcaatgtgaaccacaagcctagcaacaccaaggtggacaagagagtggaacccaagagctgtatccccgaggacacattcttcccaagccccgagagcagctgcgacgtgaagctggtggaaaagagcttcgagacagacaccaacctgaacttccagaacctgagcgtgatcggcctgcggatgctgttcgccaaaaccgtggccgtgaacttcctgctgaccgccaagctgttcttcctc

SEQ ID NO: 40348 - DNA, 1902 bp, synthetic construct
  source 1..1902: mol_type = other DNA
atggccttaccagtgaccgccttgctcctgccgctggccttgctgctccacgccgccaggccgatccagatgacccagagccccagcagcctgtctgccagcgtgggcgacagagtgaccatcacctgtcggagcagccagagcatcgtgcactccgtgggcaacaccttcctggaatggtatcagcagaagcccggcaaggcccccaagctgctgatctacaaggtgtccaacagattcagcggcgtgcccagcaggtttagcggctctggcagcggcaccgacttcaccctgaccatctctagcctccagcccgaggacttcgccacctactactgttttcaaggcagccagttcccctacaccttcggccagggaacaaaggtggaaatcaagcggctcgaggagggacagcctaaggccaatcctaccgtgacactgttccctccaagcagcgaagaactccaggccaacaaggccacacttgtgtgcctgatctccgacttctaccctggggctgtgacagtggcttggaaggccgatggatctcctgtgaaagccggcgtggaaaccaccaagccatccaagcagagcaacaacaaatacgccgccagctcctacctgagcctgacacctgagcagtggaagtcccacagatcctacagctgccaagtgacccacgaaggcagcaccgtggaaaagacagtggcccctacagagtgcagcggcagagccgattgcggctttaccagcgagagctaccagcagggcgtgctgagcgcctactacatgtacttgttgctgctgctgaagtccgtggtgtacttcgccatcatcacatgctgcctgctgcggagaaccgccttctgctgcaacggcgagaagtctcgcgccaagagaagcggatctggcgtgaagcagaccctgaatttcgacctgctgaagctggctggcgacgtggaatccaacccaggccctactagtatggactggatttggcgcatccttttccttgtcggcgctgctaccggcgcgcattccttcgaagaagtgcaactggtggaaagcggaggcggcctggtgcagcctggcggatctctgagactgagctgtgccgccagcggctacgagttcagccggtcctggatgaactgggtgcgccaggcccctggcaagggactggaatgggtgggaagaatctaccccggcgacggcgacaccaactacagcggcaagttcaagggccggttcaccatcagcgccgacaccagcaagaacaccgcctacctccagatgaacagcctgcgggccgaggataccgccgtgtactactgtgccagagatggcagctcctgggactggtacttcgacgtgtggggacagggaacccttgtgaccgtgtccagcacgcgtgcctctacaaagggaccctccgtgtttcctctggctcccagcagcaagtctacaagcggaggaacagccgctctgggctgcctggtcaaggattactttcccgagcctgtgaccgtgtcctggaatagcggagcactgacaagcggcgtgcacacctttccagccgtgctgcaaagcagcggcctgtactctctgagcagcgtggtcacagtgcctagctctagcctgggcacccagacctacatctgcaatgtgaaccacaagcctagcaacaccaaggtggacaagagagtggaacccaagagctgtatccccgaggacacattcttcccaagccccgagagcagctgcgacgtgaagctggtggaaaagagcttcgagacagacaccaacctgaacttccagaacctgagcgtgatcggcctgcggatgctgttcgccaaaaccgtggccgtgaacttcctgctgaccgccaagctgttcttcctc

SEQ ID NO: 40349 - DNA, 1914 bp, synthetic construct
  source 1..1914: mol_type = other DNA
atggccttaccagtgaccgccttgctcctgccgctggccttgctgctccacgccgccaggccggaactgcaaagcgtgctgacacagcctcctagcgcctctggaacacctggacagagagtgacaatcagctgctccggcagctccagcaacatcggcagcaactacgtgaactggtatcagcagctgcctggcacagcccctaaactgctgatctacggcgactaccagaggccaagcggcgtgccagatagattcagcggcagcaagtctggcacaagcgccagcctggctatctctggactgagaagcgaggacgaggccgactactactgtgccaccagagatgatagcctgagcggcagcgtggtgtttggcacaggcacaaagctgacagtgctgggcctcgaggagggacagcctaaggccaatcctaccgtgacactgttccctccaagcagcgaagaactccaggccaacaaggccacacttgtgtgcctgatctccgacttctaccctggggctgtgacagtggcttggaaggccgatggatctcctgtgaaagccggcgtggaaaccaccaagccatccaagcagagcaacaacaaatacgccgccagctcctacctgagcctgacacctgagcagtggaagtcccacagatcctacagctgccaagtgacccacgaaggcagcaccgtggaaaagacagtggcccctacagagtgcagcggcagagccgattgcggctttaccagcgagagctaccagcagggcgtgctgagcgcctactacatgtacttgttgctgctgctgaagtccgtggtgtacttcgccatcatcacatgctgcctgctgcggagaaccgccttctgctgcaacggcgagaagtctcgcgccaagagaagcggatctggcgtgaagcagaccctgaatttcgacctgctgaagctggctggcgacgtggaatccaacccaggccctactagtatggactggatttggcgcatccttttccttgtcggcgctgctaccggcgcgcattccttcgaagaagttcagctggttcagagcggagccgaagtgaagaagcctggcgagagcctgaagattagctgcaaaggcagcggctacggcttcaccagctattggatcggctgggtccgacagatgcctggcaaaggactggaatggatgggcatcattcaccccgacgacagcgacaccaagtacagccctagcttccagggccaagtgaccatcagcgccgacaagagcatcagcacagcctacctccagtggtcctctctgaaggccagcgataccgccatgtactactgcgccagcagctacctgagaggactgtggggcggctacttcgatttttggggccagggcacactggtcaccgttagttctacgcgtgcctctacaaagggaccctccgtgtttcctctggctcccagcagcaagtctacaagcggaggaacagccgctctgggctgcctggtcaaggattactttcccgagcctgtgaccgtgtcctggaatagcggagcactgacaagcggcgtgcacacctttccagccgtgctgcaaagcagcggcctgtactctctgagcagcgtggtcacagtgcctagctctagcctgggcacccagacctacatctgcaatgtgaaccacaagcctagcaacaccaaggtggacaagagagtggaacccaagagctgtatccccgaggacacattcttcccaagccccgagagcagctgcgacgtgaagctggtggaaaagagcttcgagacagacaccaacctgaacttccagaacctgagcgtgatcggcctgcggatgctgttcgccaaaaccgtggccgtgaacttcctgctgaccgccaagctgttcttcctc

SEQ ID NO: 40350 - DNA, 1905 bp, synthetic construct
  source 1..1905: mol_type = other DNA
atggccttaccagtgaccgccttgctcctgccgctggccttgctgctccacgccgccaggccggacttcgtgatgacacagagccctgatagcctggccgtgtctctcggcgagcgagtgaccatgagctgcaagtctagccagagcctgctgaacagcggcaaccagaagaactacctgacctggtatcagcagaagcccggccagcctcctaagctgctgatctactgggccagcaccagagaaagcggcgtgcccgatagattttctggctctggcagcggcaccgacttcaccctgacaatttctagcctgcaagccgaggacgtggccgtgtactactgccagaacgactacagctacccctacaccttcggccagggcaccaagctggaaatcaaactcgaggagggacagcctaaggccaatcctaccgtgacactgttccctccaagcagcgaagaactccaggccaacaaggccacacttgtgtgcctgatctccgacttctaccctggggctgtgacagtggcttggaaggccgatggatctcctgtgaaagccggcgtggaaaccaccaagccatccaagcagagcaacaacaaatacgccgccagctcctacctgagcctgacacctgagcagtggaagtcccacagatcctacagctgccaagtgacccacgaaggcagcaccgtggaaaagacagtggcccctacagagtgcagcggcagagccgattgcggctttaccagcgagagctaccagcagggcgtgctgagcgcctactacatgtacttgttgctgctgctgaagtccgtggtgtacttcgccatcatcacatgctgcctgctgcggagaaccgccttctgctgcaacggcgagaagtctcgcgccaagagaagcggatctggcgtgaagcagaccctgaatttcgacctgctgaagctggctggcgacgtggaatccaacccaggccctactagtatggactggatttggcgcatccttttccttgtcggcgctgctaccggcgcgcattccttcgaagaagtgcaactggttcagagcggagccgagctgaagaaacctggggccagcgtgaaggtgtcctgtaaagccagcggctacacctttaccgactactacatgaaatgggtccgacaggccccaggccagggactcgaatggatcggcgatattatccccagcaacggggccaccttctacaaccagaaattcaagggccgcgtgaccatcaccgtggacaagagcacaagcaccgcctacatggaactgagcagcctgagaagcgaggacaccgccgtgtattattgcgccagaagccatctgctgcgggccagttggttcgcctattggggacagggaaccctggtcaccgttagctctacgcgtgcctctacaaagggaccctccgtgtttcctctggctcccagcagcaagtctacaagcggaggaacagccgctctgggctgcctggtcaaggattactttcccgagcctgtgaccgtgtcctggaatagcggagcactgacaagcggcgtgcacacctttccagccgtgctgcaaagcagcggcctgtactctctgagcagcgtggtcacagtgcctagctctagcctgggcacccagacctacatctgcaatgtgaaccacaagcctagcaacaccaaggtggacaagagagtggaacccaagagctgtatccccgaggacacattcttcccaagccccgagagcagctgcgacgtgaagctggtggaaaagagcttcgagacagacaccaacctgaacttccagaacctgagcgtgatcggcctgcggatgctgttcgccaaaaccgtggccgtgaacttcctgctgaccgccaagctgttcttcctc

SEQ ID NO: 40351 - DNA, 1911 bp, synthetic construct
  source 1..1911: mol_type = other DNA
atggccttaccagtgaccgccttgctcctgccgctggccttgctgctccacgccgccaggccggagatcgtgctgacacagtctcccgccacactgtcactgtctccaggcgaaagagccacactgagctgtagcgtgtccagcagcatcagcagcagcaacctgcactggtatcagcagaagcctggacaggcccctcggctgctgatctacgccacatctaatctggcctctggcatccccgccagattttctggctctggaagcggcaccgacttcaccctgaccataagcagcctggaacctgaggacttcgccgtgtactactgccagcagtggtccagctatccccacacatttggcggaggcaccaaggtggaaatcaagagactcgaggagggacagcctaaggccaatcctaccgtgacactgttccctccaagcagcgaagaactccaggccaacaaggccacacttgtgtgcctgatctccgacttctaccctggggctgtgacagtggcttggaaggccgatggatctcctgtgaaagccggcgtggaaaccaccaagccatccaagcagagcaacaacaaatacgccgccagctcctacctgagcctgacacctgagcagtggaagtcccacagatcctacagctgccaagtgacccacgaaggcagcaccgtggaaaagacagtggcccctacagagtgcagcggcagagccgattgcggctttaccagcgagagctaccagcagggcgtgctgagcgcctactacatgtacttgttgctgctgctgaagtccgtggtgtacttcgccatcatcacatgctgcctgctgcggagaaccgccttctgctgcaacggcgagaagtctcgcgccaagagaagcggatctggcgtgaagcagaccctgaatttcgacctgctgaagctggctggcgacgtggaatccaacccaggccctactagtatggactggatttggcgcatccttttccttgtcggcgctgctaccggcgcgcattccttcgaacaggttcagctggttcagagcggagccgaagtgaagaaacctggggcctctgtgaaggtgtcctgcaaggcttccggctacacctttaccaactacctgatcgagtgggtccgacaggctccaggacaaggactggaatggatgggcctgattaaccctggcagcggcggcaccaactacaacgagaagttcaagggcagagtgaccatgaccaccgacaccagcacaagcaccgcctacatggaactgcggagcctgagaagcgacgacaccgccgtgtattattgcgccagaagaagccctctcggctcttggatctactacgcctatgacggcgtggcctattggggccagggaacactggttacagtgtcctctacgcgtgcctctacaaagggaccctccgtgtttcctctggctcccagcagcaagtctacaagcggaggaacagccgctctgggctgcctggtcaaggattactttcccgagcctgtgaccgtgtcctggaatagcggagcactgacaagcggcgtgcacacctttccagccgtgctgcaaagcagcggcctgtactctctgagcagcgtggtcacagtgcctagctctagcctgggcacccagacctacatctgcaatgtgaaccacaagcctagcaacaccaaggtggacaagagagtggaacccaagagctgtatccccgaggacacattcttcccaagccccgagagcagctgcgacgtgaagctggtggaaaagagcttcgagacagacaccaacctgaacttccagaacctgagcgtgatcggcctgcggatgctgttcgccaaaaccgtggccgtgaacttcctgctgaccgccaagctgttcttcctc

SEQ ID NO: 40352 - DNA, 1878 bp, synthetic construct
  source 1..1878: mol_type = other DNA
atggccttaccagtgaccgccttgctcctgccgctggccttgctgctccacgccgccaggccgcagatcgtgctgacacagagccccgccatcatgtctgttagccctggcgagaaagtgaccatgacctgtagcgccagcagcagcgtgaactacatgcactggttccagcagaagcccggcacaagccctaagctgtgggtgtacagcaccagcaatctggcctctggcgtgccagccagattttctggctctggcagcggcaccagctacagcctgacaatcagcagcatggaagccgaggatgccgccacctactattgtcagcagcggagcatctacccaccttggacatttggcggaggcaccaagctggaaatcaaactcgaggagggacagcctaaggccaatcctaccgtgacactgttccctccaagcagcgaagaactccaggccaacaaggccacacttgtgtgcctgatctccgacttctaccctggggctgtgacagtggcttggaaggccgatggatctcctgtgaaagccggcgtggaaaccaccaagccatccaagcagagcaacaacaaatacgccgccagctcctacctgagcctgacacctgagcagtggaagtcccacagatcctacagctgccaagtgacccacgaaggcagcaccgtggaaaagacagtggcccctacagagtgcagcggcagagccgattgcggctttaccagcgagagctaccagcagggcgtgctgagcgcctactacatgtacttgttgctgctgctgaagtccgtggtgtacttcgccatcatcacatgctgcctgctgcggagaaccgccttctgctgcaacggcgagaagtctcgcgccaagagaagcggatctggcgtgaagcagaccctgaatttcgacctgctgaagctggctggcgacgtggaatccaacccaggccctactagtatggactggatttggcgcatccttttccttgtcggcgctgctaccggcgcgcattccttcgaagaagttcagctccagcagagcggccctgagcttgtgaaacctggcgcttccgtgaagatcagctgcaaggccagcggctacagcttcaccggctacaccatgaactgggtcaagcagtcccacggcaagaacctggaatggatcggcctgattaacccctacaacggcggcacctcctacaaccagaagttcaaggccaaggccacactgaccgtggacaagagcagcagcacagcctacatgcagctgaagtccctgaccagcgaggacagcgccgtgtactactgcgccagagattacggctacgtgctggactattggggccagggcacaagcgtgacagtgtctagtacgcgtgcctctacaaagggaccctccgtgtttcctctggctcccagcagcaagtctacaagcggaggaacagccgctctgggctgcctggtcaaggattactttcccgagcctgtgaccgtgtcctggaatagcggagcactgacaagcggcgtgcacacctttccagccgtgctgcaaagcagcggcctgtactctctgagcagcgtggtcacagtgcctagctctagcctgggcacccagacctacatctgcaatgtgaaccacaagcctagcaacaccaaggtggacaagagagtggaacccaagagctgtatccccgaggacacattcttcccaagccccgagagcagctgcgacgtgaagctggtggaaaagagcttcgagacagacaccaacctgaacttccagaacctgagcgtgatcggcctgcggatgctgttcgccaaaaccgtggccgtgaacttcctgctgaccgccaagctgttcttcctc

SEQ ID NO: 40353 - DNA, 1884 bp, synthetic construct
  source 1..1884: mol_type = other DNA
atggccttaccagtgaccgccttgctcctgccgctggccttgctgctccacgccgccaggccggacatcgtgatgacccagagccctgccaccctgtccgtgtctccaggcgaaagagccaccctgagctgcagagcttcccagagcgtgtccaacgacgtcgtgtggtatcagcagaagcccggccaggcccccagactgctgatctactacgccagcaacagatacaccggcatccccgccagattcagcggctctggcagcggcaccgagttcaccctgacaatcagcagcctccagagcgaggacttcgccgtgtactactgtcagcaggactacaccagcccctggaccttcggccagggcaccaagctggaaatcaagagactcgaggagggacagcctaaggccaatcctaccgtgacactgttccctccaagcagcgaagaactccaggccaacaaggccacacttgtgtgcctgatctccgacttctaccctggggctgtgacagtggcttggaaggccgatggatctcctgtgaaagccggcgtggaaaccaccaagccatccaagcagagcaacaacaaatacgccgccagctcctacctgagcctgacacctgagcagtggaagtcccacagatcctacagctgccaagtgacccacgaaggcagcaccgtggaaaagacagtggcccctacagagtgcagcggcagagccgattgcggctttaccagcgagagctaccagcagggcgtgctgagcgcctactacatgtacttgttgctgctgctgaagtccgtggtgtacttcgccatcatcacatgctgcctgctgcggagaaccgccttctgctgcaacggcgagaagtctcgcgccaagagaagcggatctggcgtgaagcagaccctgaatttcgacctgctgaagctggctggcgacgtggaatccaacccaggccctactagtatggactggatttggcgcatccttttccttgtcggcgctgctaccggcgcgcattccttcgaagaggtgcaactggtgcagagcggagccgaagtgaagaaacctggggccagcgtgcgggtgtcctgcaaggccagcggctacacctttaccaactacggcatgaactgggtgcgccaggctcctggacagggcctggaatggatgggctggatcaacacctacaccggcgagcccacctacgccgacgacttcaagggcagagtgaccatgaccaccgacaccagcacctccaccgcctacatggaactgcggagcctgagaagcgacgacaccgccgtgtattattgcgcccggatcggcgacagcagccccagcgattattggggccagggaaccctcgtgaccgtgtcctctacgcgtgcctctacaaagggaccctccgtgtttcctctggctcccagcagcaagtctacaagcggaggaacagccgctctgggctgcctggtcaaggattactttcccgagcctgtgaccgtgtcctggaatagcggagcactgacaagcggcgtgcacacctttccagccgtgctgcaaagcagcggcctgtactctctgagcagcgtggtcacagtgcctagctctagcctgggcacccagacctacatctgcaatgtgaaccacaagcctagcaacaccaaggtggacaagagagtggaacccaagagctgtatccccgaggacacattcttcccaagccccgagagcagctgcgacgtgaagctggtggaaaagagcttcgagacagacaccaacctgaacttccagaacctgagcgtgatcggcctgcggatgctgttcgccaaaaccgtggccgtgaacttcctgctgaccgccaagctgttcttcctc

SEQ ID NO: 40354 - DNA, 1890 bp, synthetic construct
  source 1..1890: mol_type = other DNA
atggccttaccagtgaccgccttgctcctgccgctggccttgctgctccacgccgccaggccggacatccagatgacacagagccctagcagcctgtctgccagcgtgggagacagagtgaccatcacctgtagagccagccaggacgtgcggaacatcgtcgtgtggttccagcagaagcctggcaaggcccctaagctgctgatctacagcggcagctacagatacagcggcgtgcccagcagattttccggctctggctctggcaccgacttcaccctgacaatatccagcctccagcctgaggacttcgccacctactactgccagcagcactacagccctccatacacattcggccagggcaccaaggtggaaatcaagagactcgaggagggacagcctaaggccaatcctaccgtgacactgttccctccaagcagcgaagaactccaggccaacaaggccacacttgtgtgcctgatctccgacttctaccctggggctgtgacagtggcttggaaggccgatggatctcctgtgaaagccggcgtggaaaccaccaagccatccaagcagagcaacaacaaatacgccgccagctcctacctgagcctgacacctgagcagtggaagtcccacagatcctacagctgccaagtgacccacgaaggcagcaccgtggaaaagacagtggcccctacagagtgcagcggcagagccgattgcggctttaccagcgagagctaccagcagggcgtgctgagcgcctactacatgtacttgttgctgctgctgaagtccgtggtgtacttcgccatcatcacatgctgcctgctgcggagaaccgccttctgctgcaacggcgagaagtctcgcgccaagagaagcggatctggcgtgaagcagaccctgaatttcgacctgctgaagctggctggcgacgtggaatccaacccaggccctactagtatggactggatttggcgcatccttttccttgtcggcgctgctaccggcgcgcattccttcgaagaagttcagctggtggaatctggccctggcctggtcaagcctagcgagacactgagcctgacctgtaccgtgtccggcttcagcctgaccagatttggcgtgcactgggtccgacagccacctggcaaaggactggaatggctgggagtgatttggagaggcggcagcaccgattacaacgccgccttcatgagccggctgaccatcagcaaggacaacagcaagaaccaggtgtccctgaagctgagcagcgtgacagccgctgataccgccgtgtactactgctccaaccactactacggcagctccgactacgccctggataattggggccagggaaccctggtcaccgtgtcatctacgcgtgcctctacaaagggaccctccgtgtttcctctggctcccagcagcaagtctacaagcggaggaacagccgctctgggctgcctggtcaaggattactttcccgagcctgtgaccgtgtcctggaatagcggagcactgacaagcggcgtgcacacctttccagccgtgctgcaaagcagcggcctgtactctctgagcagcgtggtcacagtgcctagctctagcctgggcacccagacctacatctgcaatgtgaaccacaagcctagcaacaccaaggtggacaagagagtggaacccaagagctgtatccccgaggacacattcttcccaagccccgagagcagctgcgacgtgaagctggtggaaaagagcttcgagacagacaccaacctgaacttccagaacctgagcgtgatcggcctgcggatgctgttcgccaaaaccgtggccgtgaacttcctgctgaccgccaagctgttcttcctc

SEQ ID NO: 40355 - DNA, 1896 bp, synthetic construct
  source 1..1896: mol_type = other DNA
atggccttaccagtgaccgccttgctcctgccgctggccttgctgctccacgccgccaggccggacatcgtgctgacccagagccctctgagcctggccgtgtctctgggacagcctgccatcatcagctgtagggccagccagagcgtgtcctttgccggcacctctctgatgcactggtatcaccagaagcccggccagcagcccagactgctgatctacagagccagcaacctggaagccggcgtgcccgatagattttccggcagcggcagcaagaccgacttcaccctgaccatcagccccgtggaagccgaagatgccgccacctactactgccagcagagcagagagtacccctacaccttcggcggaggcaccaagctggaaatcaagaggctcgaggagggacagcctaaggccaatcctaccgtgacactgttccctccaagcagcgaagaactccaggccaacaaggccacacttgtgtgcctgatctccgacttctaccctggggctgtgacagtggcttggaaggccgatggatctcctgtgaaagccggcgtggaaaccaccaagccatccaagcagagcaacaacaaatacgccgccagctcctacctgagcctgacacctgagcagtggaagtcccacagatcctacagctgccaagtgacccacgaaggcagcaccgtggaaaagacagtggcccctacagagtgcagcggcagagccgattgcggctttaccagcgagagctaccagcagggcgtgctgagcgcctactacatgtacttgttgctgctgctgaagtccgtggtgtacttcgccatcatcacatgctgcctgctgcggagaaccgccttctgctgcaacggcgagaagtctcgcgccaagagaagcggatctggcgtgaagcagaccctgaatttcgacctgctgaagctggctggcgacgtggaatccaacccaggccctactagtatggactggatttggcgcatccttttccttgtcggcgctgctaccggcgcgcattccttcgaacaggtccaactggtgcagagcggagccgaggtcgtgaagcctggcgcttccgtgaagattagctgcaaagccagcggctacacctttaccggctactttatgcactgggtcaagcagagccctggccagagcctggaatggatcggcagaatccacccctacgacggcgacaccttctacaaccagaagttccagggcaaggccaccctgacagtggacaagagcagcaacaccgcccacatggaactgctgagcctgaccagcgaggacttcgccgtgtactactgcaccagatacgacggcagccgggctatggactattggggccagggcaccaccgtgaccgtgtctagtacgcgtgcctctacaaagggaccctccgtgtttcctctggctcccagcagcaagtctacaagcggaggaacagccgctctgggctgcctggtcaaggattactttcccgagcctgtgaccgtgtcctggaatagcggagcactgacaagcggcgtgcacacctttccagccgtgctgcaaagcagcggcctgtactctctgagcagcgtggtcacagtgcctagctctagcctgggcacccagacctacatctgcaatgtgaaccacaagcctagcaacaccaaggtggacaagagagtggaacccaagagctgtatccccgaggacacattcttcccaagccccgagagcagctgcgacgtgaagctggtggaaaagagcttcgagacagacaccaacctgaacttccagaacctgagcgtgatcggcctgcggatgctgttcgccaaaaccgtggccgtgaacttcctgctgaccgccaagctgttcttcctc

SEQ ID NO: 40356 - DNA, 1878 bp, synthetic construct
  source 1..1878: mol_type = other DNA
atggccttaccagtgaccgccttgctcctgccgctggccttgctgctccacgccgccaggccggacatccagatgacacagagccctagcagcctgtctgccagcgtgggagacagagtgaccatcacatgcaaggccagccagagcgtgtccaacgacgtgacctggtatcagcagaagcctggacaggcccctaagctgctgatctacagcgccagcaacagatacagcggagtgcccgccagattttccggctctggctacggcaccgagttcacctttaccatcagcagcgtgcagagcgaggacttcgccgtgtacttctgccagcaagactacagcagcttcggccagggcaccaagctggaaatcaagagactcgaggagggacagcctaaggccaatcctaccgtgacactgttccctccaagcagcgaagaactccaggccaacaaggccacacttgtgtgcctgatctccgacttctaccctggggctgtgacagtggcttggaaggccgatggatctcctgtgaaagccggcgtggaaaccaccaagccatccaagcagagcaacaacaaatacgccgccagctcctacctgagcctgacacctgagcagtggaagtcccacagatcctacagctgccaagtgacccacgaaggcagcaccgtggaaaagacagtggcccctacagagtgcagcggcagagccgattgcggctttaccagcgagagctaccagcagggcgtgctgagcgcctactacatgtacttgttgctgctgctgaagtccgtggtgtacttcgccatcatcacatgctgcctgctgcggagaaccgccttctgctgcaacggcgagaagtctcgcgccaagagaagcggatctggcgtgaagcagaccctgaatttcgacctgctgaagctggctggcgacgtggaatccaacccaggccctactagtatggactggatttggcgcatccttttccttgtcggcgctgctaccggcgcgcattccttcgaacaggtgcagctggtggaatctggacctggcgtggtgcagcctggcagaagcctgagaatcagctgtgccgtgtccggcttcagcgtgaccaactacggcgtgcactgggtgcgccagccacctggaaaaggactggaatggctgggcgtgatctgggctggcggcatcaccaactacaacagcgccttcatgtcccggctgaccatctccaaggacaacagcaagaacaccgtgtacctccagatgaacagcctgcgggccgaggacaccgccatgtactactgtgcttccagaggcggccactacggctacgccctggattattggggccagggaaccctcgtgaccgtgtcctctacgcgtgcctctacaaagggaccctccgtgtttcctctggctcccagcagcaagtctacaagcggaggaacagccgctctgggctgcctggtcaaggattactttcccgagcctgtgaccgtgtcctggaatagcggagcactgacaagcggcgtgcacacctttccagccgtgctgcaaagcagcggcctgtactctctgagcagcgtggtcacagtgcctagctctagcctgggcacccagacctacatctgcaatgtgaaccacaagcctagcaacaccaaggtggacaagagagtggaacccaagagctgtatccccgaggacacattcttcccaagccccgagagcagctgcgacgtgaagctggtggaaaagagcttcgagacagacaccaacctgaacttccagaacctgagcgtgatcggcctgcggatgctgttcgccaaaaccgtggccgtgaacttcctgctgaccgccaagctgttcttcctc

SEQ ID NO: 40357 - DNA, 1890 bp, synthetic construct
  source 1..1890: mol_type = other DNA
atggccttaccagtgaccgccttgctcctgccgctggccttgctgctccacgccgccaggccggagaacgtgctgacacagagccctgccatcatgagtgcctctccaggcgagaaagtgaccatgacctgtagagccagcagcagcgtgtccagcagctacctgcactggtatcagcagaagtccggcgcaagccccaaagtgtggatctacagcaccagcaatctggcctctggcgtgccaggcagattttctggctctggcagcggcacaagctacagcctgacaatcagctccgtggaagccgaagatgccgccacctactactgccagcagtacagcggctaccccatcacatttggagccggcaccaaggtggaagtgaagagactcgaggagggacagcctaaggccaatcctaccgtgacactgttccctccaagcagcgaagaactccaggccaacaaggccacacttgtgtgcctgatctccgacttctaccctggggctgtgacagtggcttggaaggccgatggatctcctgtgaaagccggcgtggaaaccaccaagccatccaagcagagcaacaacaaatacgccgccagctcctacctgagcctgacacctgagcagtggaagtcccacagatcctacagctgccaagtgacccacgaaggcagcaccgtggaaaagacagtggcccctacagagtgcagcggcagagccgattgcggctttaccagcgagagctaccagcagggcgtgctgagcgcctactacatgtacttgttgctgctgctgaagtccgtggtgtacttcgccatcatcacatgctgcctgctgcggagaaccgccttctgctgcaacggcgagaagtctcgcgccaagagaagcggatctggcgtgaagcagaccctgaatttcgacctgctgaagctggctggcgacgtggaatccaacccaggccctactagtatggactggatttggcgcatccttttccttgtcggcgctgctaccggcgcgcattccttcgaacaggttcagctcaaagaatctggccccgtgctggtggccccaagccagacactgtctatcacctgtaccgtgtccggcttcagcctggcctcctacaacatccactgggtccgacagcctccaggcaaaggactggaatggctgggagtgatttgggctggcggcagcaccaactacaacagcgcactgatgagccggctgagcatcagcaaggacaacagcaagagccaggtgttcctccagatgaactccctccagaccgacgacaccgccatgtactactgcgccaagagaagcgacgactacagttggttcgcctactggggccagggcacactggttactgtgtctgcttctacgcgtgcctctacaaagggaccctccgtgtttcctctggctcccagcagcaagtctacaagcggaggaacagccgctctgggctgcctggtcaaggattactttcccgagcctgtgaccgtgtcctggaatagcggagcactgacaagcggcgtgcacacctttccagccgtgctgcaaagcagcggcctgtactctctgagcagcgtggtcacagtgcctagctctagcctgggcacccagacctacatctgcaatgtgaaccacaagcctagcaacaccaaggtggacaagagagtggaacccaagagctgtatccccgaggacacattcttcccaagccccgagagcagctgcgacgtgaagctggtggaaaagagcttcgagacagacaccaacctgaacttccagaacctgagcgtgatcggcctgcggatgctgttcgccaaaaccgtggccgtgaacttcctgctgaccgccaagctgttcttcctc

SEQ ID NO: 40358 - DNA, 1902 bp, synthetic construct
  source 1..1902: mol_type = other DNA
atggccttaccagtgaccgccttgctcctgccgctggccttgctgctccacgccgccaggccggagatcgtgctgacacagtctcccgccacactgtcactgtctccaggcgaaagagccacactgagctgtagagccagccagagcgtgtcctcttacctggcctggtatcagcagaagcctggacaggctccccggctgctgatctacgatgccagcaatagagccacaggcatccccgccagattttctggctctggcagcggcaccgatttcaccctgaccataagcagcctggaacctgaggacttcgccgtgtactactgccagcagagaagcaactggcctcctacattcggccagggcaccaaggtggaaatcaaactcgaggagggacagcctaaggccaatcctaccgtgacactgttccctccaagcagcgaagaactccaggccaacaaggccacacttgtgtgcctgatctccgacttctaccctggggctgtgacagtggcttggaaggccgatggatctcctgtgaaagccggcgtggaaaccaccaagccatccaagcagagcaacaacaaatacgccgccagctcctacctgagcctgacacctgagcagtggaagtcccacagatcctacagctgccaagtgacccacgaaggcagcaccgtggaaaagacagtggcccctacagagtgcagcggcagagccgattgcggctttaccagcgagagctaccagcagggcgtgctgagcgcctactacatgtacttgttgctgctgctgaagtccgtggtgtacttcgccatcatcacatgctgcctgctgcggagaaccgccttctgctgcaacggcgagaagtctcgcgccaagagaagcggatctggcgtgaagcagaccctgaatttcgacctgctgaagctggctggcgacgtggaatccaacccaggccctactagtatggactggatttggcgcatccttttccttgtcggcgctgctaccggcgcgcattccttcgaacaactccagctgcaagagtctggccccggactggtcaagcctagcgaaacactgagcctgacctgtaccgtgtctggcggcagcatcagcagcagctcttattggtggggctggaccagacagcctcctggcagaggactggaatggatcggcaccatgtactacagcggcaacatctactacaaccccagcctccagagccgggccaccatctctgtggacaccagcaagaaccagttcagcctgaagctgagcagcgtgacagccgccgataccgccgtgtattattgcgccagacatgtgggctacagctacggcagacggttctggtacttcgacctgtggggcagaggcaccctggtcacagtttcttctacgcgtgcctctacaaagggaccctccgtgtttcctctggctcccagcagcaagtctacaagcggaggaacagccgctctgggctgcctggtcaaggattactttcccgagcctgtgaccgtgtcctggaatagcggagcactgacaagcggcgtgcacacctttccagccgtgctgcaaagcagcggcctgtactctctgagcagcgtggtcacagtgcctagctctagcctgggcacccagacctacatctgcaatgtgaaccacaagcctagcaacaccaaggtggacaagagagtggaacccaagagctgtatccccgaggacacattcttcccaagccccgagagcagctgcgacgtgaagctggtggaaaagagcttcgagacagacaccaacctgaacttccagaacctgagcgtgatcggcctgcggatgctgttcgccaaaaccgtggccgtgaacttcctgctgaccgccaagctgttcttcctc

SEQ ID NO: 40359 - DNA, 1893 bp, synthetic construct
  source 1..1893: mol_type = other DNA
atggccttaccagtgaccgccttgctcctgccgctggccttgctgctccacgccgccaggccggacatccagatgacacagagccctagcagcctgtctgccagcgtgggagacagagtgaccatcacatgcaaggccagcgaccacatcaacaactggctggcctggtatcagcagaagcctggcaaggcccctaagctgctgatctacggcgctaccacactggaaacaggcgtgcccagcagattttctggcagcggctctggcaccgacttcaccctgacaatatccagcctccagcctgaggacttcgccacctactactgtcagcagagctggaacaccccttggacattcggccagggcaccaaggtggaaatcaagagactcgaggagggacagcctaaggccaatcctaccgtgacactgttccctccaagcagcgaagaactccaggccaacaaggccacacttgtgtgcctgatctccgacttctaccctggggctgtgacagtggcttggaaggccgatggatctcctgtgaaagccggcgtggaaaccaccaagccatccaagcagagcaacaacaaatacgccgccagctcctacctgagcctgacacctgagcagtggaagtcccacagatcctacagctgccaagtgacccacgaaggcagcaccgtggaaaagacagtggcccctacagagtgcagcggcagagccgattgcggctttaccagcgagagctaccagcagggcgtgctgagcgcctactacatgtacttgttgctgctgctgaagtccgtggtgtacttcgccatcatcacatgctgcctgctgcggagaaccgccttctgctgcaacggcgagaagtctcgcgccaagagaagcggatctggcgtgaagcagaccctgaatttcgacctgctgaagctggctggcgacgtggaatccaacccaggccctactagtatggactggatttggcgcatccttttccttgtcggcgctgctaccggcgcgcattccttcgaagaagttcagctggttgaatctggcggcggactggttcaacctggcggatctctgagactgagctgtgccgcctctggctacacctttagcagctactgggtcaactgggttcgacaggcccctggcaaaggactggaatgggtcgcccaaatctatcccggcgacggcgacaccaactacaacggcaagttcaagggcagattcaccatcagccgggacaacagcaagaacaccctgtacctccagatgaactccctgagagccgaggacaccgccgtgtactattgtgccagatccatcaccaccgtcgtgggctgcgctatggattattggggccagggaaccctggtcaccgtgtcctctacgcgtgcctctacaaagggaccctccgtgtttcctctggctcccagcagcaagtctacaagcggaggaacagccgctctgggctgcctggtcaaggattactttcccgagcctgtgaccgtgtcctggaatagcggagcactgacaagcggcgtgcacacctttccagccgtgctgcaaagcagcggcctgtactctctgagcagcgtggtcacagtgcctagctctagcctgggcacccagacctacatctgcaatgtgaaccacaagcctagcaacaccaaggtggacaagagagtggaacccaagagctgtatccccgaggacacattcttcccaagccccgagagcagctgcgacgtgaagctggtggaaaagagcttcgagacagacaccaacctgaacttccagaacctgagcgtgatcggcctgcggatgctgttcgccaaaaccgtggccgtgaacttcctgctgaccgccaagctgttcttcctc

SEQ ID NO: 40360 - DNA, 1893 bp, synthetic construct
  source 1..1893: mol_type = other DNA
atggccttaccagtgaccgccttgctcctgccgctggccttgctgctccacgccgccaggccggacatccagatgacacagagccctagcagcctgtctgccagcgtgggagacagagtgaccatcacatgcaaggccagcgaccacatcaacaactggctggcctggtatcagcagaagcctggcaaggcccctaagctgctgatctacggcgctaccacactggaaacaggcgtgcccagcagattttctggcagcggctctggcaccgacttcaccctgacaatatccagcctccagcctgaggacttcgccacctactactgtcagcagagctggaacaccccttggacattcggccagggcaccaaggtggaaatcaagagactcgaggagggacagcctaaggccaatcctaccgtgacactgttccctccaagcagcgaagaactccaggccaacaaggccacacttgtgtgcctgatctccgacttctaccctggggctgtgacagtggcttggaaggccgatggatctcctgtgaaagccggcgtggaaaccaccaagccatccaagcagagcaacaacaaatacgccgccagctcctacctgagcctgacacctgagcagtggaagtcccacagatcctacagctgccaagtgacccacgaaggcagcaccgtggaaaagacagtggcccctacagagtgcagcggcagagccgattgcggctttaccagcgagagctaccagcagggcgtgctgagcgcctactacatgtacttgttgctgctgctgaagtccgtggtgtacttcgccatcatcacatgctgcctgctgcggagaaccgccttctgctgcaacggcgagaagtctcgcgccaagagaagcggatctggcgtgaagcagaccctgaatttcgacctgctgaagctggctggcgacgtggaatccaacccaggccctactagtatggactggatttggcgcatccttttccttgtcggcgctgctaccggcgcgcattccttcgaagaagttcagctggttgaatctggcggcggactggttcaacctggcggatctctgagactgagctgtgccgcctctggctacgcctttagcaactactgggtcaactgggttcgacaggcccctggcaaaggactggaatgggtcgcccaaatctatcccggcgacggcgacaccaactacaacggcaagttcaagggcagattcaccatcagccgggacaacagcaagaacaccctgtacctccagatgaactccctgagagccgaggacaccgccgtgtactattgtgccagatccatcaccaccgtcgtgggctgcgctatggattattggggccagggaaccctggtcaccgtgtcctctacgcgtgcctctacaaagggaccctccgtgtttcctctggctcccagcagcaagtctacaagcggaggaacagccgctctgggctgcctggtcaaggattactttcccgagcctgtgaccgtgtcctggaatagcggagcactgacaagcggcgtgcacacctttccagccgtgctgcaaagcagcggcctgtactctctgagcagcgtggtcacagtgcctagctctagcctgggcacccagacctacatctgcaatgtgaaccacaagcctagcaacaccaaggtggacaagagagtggaacccaagagctgtatccccgaggacacattcttcccaagccccgagagcagctgcgacgtgaagctggtggaaaagagcttcgagacagacaccaacctgaacttccagaacctgagcgtgatcggcctgcggatgctgttcgccaaaaccgtggccgtgaacttcctgctgaccgccaagctgttcttcctc

SEQ ID NO: 40361 - DNA, 1884 bp, synthetic construct
  source 1..1884: mol_type = other DNA
atggccttaccagtgaccgccttgctcctgccgctggccttgctgctccacgccgccaggccggacatccagatgacacagagccctagcagcctgtctgccagcgtgggagacagagtgaccatcacatgcaagagcagccagagcctgctggactccgatggcaagacctacctgaactggtatcagcagaagcccggcaaggcccctaagctgctgatctacctggtgtccaagctggatagcggcgtgcccagcagattttctggcagcggcagcggaaccgacttcaccctgacaatatccagcctccagcctgaggacttcgccacctactactgcttccaaggcacccactttccattcaccttcggccagggcaccaaggtggaaatcaaaagactcgaggagggacagcctaaggccaatcctaccgtgacactgttccctccaagcagcgaagaactccaggccaacaaggccacacttgtgtgcctgatctccgacttctaccctggggctgtgacagtggcttggaaggccgatggatctcctgtgaaagccggcgtggaaaccaccaagccatccaagcagagcaacaacaaatacgccgccagctcctacctgagcctgacacctgagcagtggaagtcccacagatcctacagctgccaagtgacccacgaaggcagcaccgtggaaaagacagtggcccctacagagtgcagcggcagagccgattgcggctttaccagcgagagctaccagcagggcgtgctgagcgcctactacatgtacttgttgctgctgctgaagtccgtggtgtacttcgccatcatcacatgctgcctgctgcggagaaccgccttctgctgcaacggcgagaagtctcgcgccaagagaagcggatctggcgtgaagcagaccctgaatttcgacctgctgaagctggctggcgacgtggaatccaacccaggccctactagtatggactggatttggcgcatccttttccttgtcggcgctgctaccggcgcgcattccttcgaagaagtgcagctggttgaatcaggcggaggactggttcagcctggcggatctctgagactgtcttgtgccgccagcggctacaccttcaccagctactggatgaactgggtccgacaggcccctggcaaaggactggaatgggtcggaatgatcgaccccagcgacagcgagacacactacaaccacatcttcaaggaccgcttcaccatcagcgccgacaccagcaagaataccgcctacctccagatgaactccctgagagccgaggacaccgccgtgtactactgcgccagaaacctgtatctgttcggccagggaaccctggtcacagtgtcatctacgcgtgcctctacaaagggaccctccgtgtttcctctggctcccagcagcaagtctacaagcggaggaacagccgctctgggctgcctggtcaaggattactttcccgagcctgtgaccgtgtcctggaatagcggagcactgacaagcggcgtgcacacctttccagccgtgctgcaaagcagcggcctgtactctctgagcagcgtggtcacagtgcctagctctagcctgggcacccagacctacatctgcaatgtgaaccacaagcctagcaacaccaaggtggacaagagagtggaacccaagagctgtatccccgaggacacattcttcccaagccccgagagcagctgcgacgtgaagctggtggaaaagagcttcgagacagacaccaacctgaacttccagaacctgagcgtgatcggcctgcggatgctgttcgccaaaaccgtggccgtgaacttcctgctgaccgccaagctgttcttcctc

SEQ ID NO: 40362 - DNA, 1884 bp, synthetic construct
  source 1..1884: mol_type = other DNA
atggccttaccagtgaccgccttgctcctgccgctggccttgctgctccacgccgccaggccggacatccagatgacacagagccctagcagcctgtctgccagcgtgggagacagagtgaccatcacatgcaagagcagccagagcctgctggactccgatggcaagacctacctgaactggtatcagcagaagcccggcaaggcccctaagctgctgatctacctggtgtccaagctggatagcggcgtgcccagcagattttctggcagcggcagcggaaccgacttcaccctgacaatatccagcctccagcctgaggacttcgccacctactactgcttccaaggcacccactttccattcaccttcggccagggcaccaaggtggaaatcaaaagactcgaggagggacagcctaaggccaatcctaccgtgacactgttccctccaagcagcgaagaactccaggccaacaaggccacacttgtgtgcctgatctccgacttctaccctggggctgtgacagtggcttggaaggccgatggatctcctgtgaaagccggcgtggaaaccaccaagccatccaagcagagcaacaacaaatacgccgccagctcctacctgagcctgacacctgagcagtggaagtcccacagatcctacagctgccaagtgacccacgaaggcagcaccgtggaaaagacagtggcccctacagagtgcagcggcagagccgattgcggctttaccagcgagagctaccagcagggcgtgctgagcgcctactacatgtacttgttgctgctgctgaagtccgtggtgtacttcgccatcatcacatgctgcctgctgcggagaaccgccttctgctgcaacggcgagaagtctcgcgccaagagaagcggatctggcgtgaagcagaccctgaatttcgacctgctgaagctggctggcgacgtggaatccaacccaggccctactagtatggactggatttggcgcatccttttccttgtcggcgctgctaccggcgcgcattccttcgaagaagtgcagctggttgaatcaggcggaggactggttcagcctggcggatctctgagactgtcttgtgccgccagcggctacaccttcagcagctactggatgaactgggtccgacaggcccctggcaaaggactggaatgggtcggaatgatcgaccccagcgacagcgagacacactacaaccacatcttcaaggaccgcttcaccatcagcgccgacaccagcaagaataccgcctacctccagatgaactccctgagagccgaggacaccgccgtgtactactgcgccagaaacctgtatctgtggggccagggaaccctggtcacagtgtcatctacgcgtgcctctacaaagggaccctccgtgtttcctctggctcccagcagcaagtctacaagcggaggaacagccgctctgggctgcctggtcaaggattactttcccgagcctgtgaccgtgtcctggaatagcggagcactgacaagcggcgtgcacacctttccagccgtgctgcaaagcagcggcctgtactctctgagcagcgtggtcacagtgcctagctctagcctgggcacccagacctacatctgcaatgtgaaccacaagcctagcaacaccaaggtggacaagagagtggaacccaagagctgtatccccgaggacacattcttcccaagccccgagagcagctgcgacgtgaagctggtggaaaagagcttcgagacagacaccaacctgaacttccagaacctgagcgtgatcggcctgcggatgctgttcgccaaaaccgtggccgtgaacttcctgctgaccgccaagctgttcttcctc

SEQ ID NO: 40363 - DNA, 1884 bp, synthetic construct
  source 1..1884: mol_type = other DNA
atggccttaccagtgaccgccttgctcctgccgctggccttgctgctccacgccgccaggccggacatccagatgacacagagccctagcagcctgtctgccagcgtgggagacagagtgaccatcacatgcaagagcagccagagcctgctggactccgatggcaagacctacctgaactggtatcagcagaagcccggcaaggcccctaagctgctgatctacctggtgtccaagctggatagcggcgtgcccagcagattttctggcagcggcagcggaaccgacttcaccctgacaatatccagcctccagcctgaggacttcgccacctactactgctggcaaggcacccactttccattcaccttcggccagggcaccaaggtggaaatcaaaagactcgaggagggacagcctaaggccaatcctaccgtgacactgttccctccaagcagcgaagaactccaggccaacaaggccacacttgtgtgcctgatctccgacttctaccctggggctgtgacagtggcttggaaggccgatggatctcctgtgaaagccggcgtggaaaccaccaagccatccaagcagagcaacaacaaatacgccgccagctcctacctgagcctgacacctgagcagtggaagtcccacagatcctacagctgccaagtgacccacgaaggcagcaccgtggaaaagacagtggcccctacagagtgcagcggcagagccgattgcggctttaccagcgagagctaccagcagggcgtgctgagcgcctactacatgtacttgttgctgctgctgaagtccgtggtgtacttcgccatcatcacatgctgcctgctgcggagaaccgccttctgctgcaacggcgagaagtctcgcgccaagagaagcggatctggcgtgaagcagaccctgaatttcgacctgctgaagctggctggcgacgtggaatccaacccaggccctactagtatggactggatttggcgcatccttttccttgtcggcgctgctaccggcgcgcattccttcgaagaagtgcagctggttgaatcaggcggaggactggttcagcctggcggatctctgagactgtcttgtgccgccagcggctacaccttcaccagctactggatgaactgggtccgacaggcccctggcaaaggactggaatgggtcggaatgatcgaccccagcgacagcgagacacactacaaccacatcttcaaggaccgcttcaccatcagcgccgacaccagcaagaataccgcctacctccagatgaactccctgagagccgaggacaccgccgtgtactactgcgccagaaacctgtatctgttcggccagggaaccctggtcacagtgtcatctacgcgtgcctctacaaagggaccctccgtgtttcctctggctcccagcagcaagtctacaagcggaggaacagccgctctgggctgcctggtcaaggattactttcccgagcctgtgaccgtgtcctggaatagcggagcactgacaagcggcgtgcacacctttccagccgtgctgcaaagcagcggcctgtactctctgagcagcgtggtcacagtgcctagctctagcctgggcacccagacctacatctgcaatgtgaaccacaagcctagcaacaccaaggtggacaagagagtggaacccaagagctgtatccccgaggacacattcttcccaagccccgagagcagctgcgacgtgaagctggtggaaaagagcttcgagacagacaccaacctgaacttccagaacctgagcgtgatcggcctgcggatgctgttcgccaaaaccgtggccgtgaacttcctgctgaccgccaagctgttcttcctc

SEQ ID NO: 40364 - DNA, 1884 bp, synthetic construct
  source 1..1884: mol_type = other DNA
atggccttaccagtgaccgccttgctcctgccgctggccttgctgctccacgccgccaggccggacatccagatgacacagagccctagcagcctgtctgccagcgtgggagacagagtgaccatcacatgcaagagcagccagagcctgctggactccgatggcaagacctacctgaactggtatcagcagaagcccggcaaggcccctaagctgctgatctacctggtgtccaagctggatagcggcgtgcccagcagattttctggcagcggcagcggaaccgacttcaccctgacaatatccagcctccagcctgaggacttcgccacctactactgctggcaaggcacccactttccattcaccttcggccagggcaccaaggtggaaatcaaaagactcgaggagggacagcctaaggccaatcctaccgtgacactgttccctccaagcagcgaagaactccaggccaacaaggccacacttgtgtgcctgatctccgacttctaccctggggctgtgacagtggcttggaaggccgatggatctcctgtgaaagccggcgtggaaaccaccaagccatccaagcagagcaacaacaaatacgccgccagctcctacctgagcctgacacctgagcagtggaagtcccacagatcctacagctgccaagtgacccacgaaggcagcaccgtggaaaagacagtggcccctacagagtgcagcggcagagccgattgcggctttaccagcgagagctaccagcagggcgtgctgagcgcctactacatgtacttgttgctgctgctgaagtccgtggtgtacttcgccatcatcacatgctgcctgctgcggagaaccgccttctgctgcaacggcgagaagtctcgcgccaagagaagcggatctggcgtgaagcagaccctgaatttcgacctgctgaagctggctggcgacgtggaatccaacccaggccctactagtatggactggatttggcgcatccttttccttgtcggcgctgctaccggcgcgcattccttcgaagaagtgcagctggttgaatcaggcggaggactggttcagcctggcggatctctgagactgtcttgtgccgccagcggctacaccttcagcagctactggatgaactgggtccgacaggcccctggcaaaggactggaatgggtcggaatgatcgaccccagcgacagcgagacacactacaaccacatcttcaaggaccgcttcaccatcagcgccgacaccagcaagaataccgcctacctccagatgaactccctgagagccgaggacaccgccgtgtactactgcgccagaaacctgtatctgtggggccagggaaccctggtcacagtgtcatctacgcgtgcctctacaaagggaccctccgtgtttcctctggctcccagcagcaagtctacaagcggaggaacagccgctctgggctgcctggtcaaggattactttcccgagcctgtgaccgtgtcctggaatagcggagcactgacaagcggcgtgcacacctttccagccgtgctgcaaagcagcggcctgtactctctgagcagcgtggtcacagtgcctagctctagcctgggcacccagacctacatctgcaatgtgaaccacaagcctagcaacaccaaggtggacaagagagtggaacccaagagctgtatccccgaggacacattcttcccaagccccgagagcagctgcgacgtgaagctggtggaaaagagcttcgagacagacaccaacctgaacttccagaacctgagcgtgatcggcctgcggatgctgttcgccaaaaccgtggccgtgaacttcctgctgaccgccaagctgttcttcctc

SEQ ID NO: 40365 - DNA, 1884 bp, synthetic construct
  source 1..1884: mol_type = other DNA
atggccttaccagtgaccgccttgctcctgccgctggccttgctgctccacgccgccaggccggacatccagatgacacagagccctagcagcctgtctgccagcgtgggagacagagtgaccatcacatgcaagagcagccagagcctgctggactccgatggcaagacctacctgaactggtatcagcagaagcccggcaaggcccctaagctgctgatctacctggtgtccaagctggatagcggcgtgcccagcagattttctggcagcggcagcggaaccgacttcaccctgacaatatccagcctccagcctgaggacttcgccacctactactgcttccaaggcacccactttccatacaccttcggccagggcaccaaggtggaaatcaaaagactcgaggagggacagcctaaggccaatcctaccgtgacactgttccctccaagcagcgaagaactccaggccaacaaggccacacttgtgtgcctgatctccgacttctaccctggggctgtgacagtggcttggaaggccgatggatctcctgtgaaagccggcgtggaaaccaccaagccatccaagcagagcaacaacaaatacgccgccagctcctacctgagcctgacacctgagcagtggaagtcccacagatcctacagctgccaagtgacccacgaaggcagcaccgtggaaaagacagtggcccctacagagtgcagcggcagagccgattgcggctttaccagcgagagctaccagcagggcgtgctgagcgcctactacatgtacttgttgctgctgctgaagtccgtggtgtacttcgccatcatcacatgctgcctgctgcggagaaccgccttctgctgcaacggcgagaagtctcgcgccaagagaagcggatctggcgtgaagcagaccctgaatttcgacctgctgaagctggctggcgacgtggaatccaacccaggccctactagtatggactggatttggcgcatccttttccttgtcggcgctgctaccggcgcgcattccttcgaagaagtgcagctggttgaatcaggcggaggactggttcagcctggcggatctctgagactgtcttgtgccgccagcggctacaccttcaccagctactggatgaactgggtccgacaggcccctggcaaaggactggaatgggtcggaatgatcgaccccagcgacagcgagacacactacaaccacatcttcaaggaccgcttcaccatcagcgccgacaccagcaagaataccgcctacctccagatgaactccctgagagccgaggacaccgccgtgtactactgcgccagaaacctgtatctgttcggccagggaaccctggtcacagtgtcatctacgcgtgcctctacaaagggaccctccgtgtttcctctggctcccagcagcaagtctacaagcggaggaacagccgctctgggctgcctggtcaaggattactttcccgagcctgtgaccgtgtcctggaatagcggagcactgacaagcggcgtgcacacctttccagccgtgctgcaaagcagcggcctgtactctctgagcagcgtggtcacagtgcctagctctagcctgggcacccagacctacatctgcaatgtgaaccacaagcctagcaacaccaaggtggacaagagagtggaacccaagagctgtatccccgaggacacattcttcccaagccccgagagcagctgcgacgtgaagctggtggaaaagagcttcgagacagacaccaacctgaacttccagaacctgagcgtgatcggcctgcggatgctgttcgccaaaaccgtggccgtgaacttcctgctgaccgccaagctgttcttcctc

SEQ ID NO: 40366 - DNA, 1884 bp, synthetic construct
  source 1..1884: mol_type = other DNA
atggccttaccagtgaccgccttgctcctgccgctggccttgctgctccacgccgccaggccggacatccagatgacacagagccctagcagcctgtctgccagcgtgggagacagagtgaccatcacatgcaagagcagccagagcctgctggactccgatggcaagacctacctgaactggtatcagcagaagcccggcaaggcccctaagctgctgatctacctggtgtccaagctggatagcggcgtgcccagcagattttctggcagcggcagcggaaccgacttcaccctgacaatatccagcctccagcctgaggacttcgccacctactactgcttccaaggcacccactttccatacaccttcggccagggcaccaaggtggaaatcaaaagactcgaggagggacagcctaaggccaatcctaccgtgacactgttccctccaagcagcgaagaactccaggccaacaaggccacacttgtgtgcctgatctccgacttctaccctggggctgtgacagtggcttggaaggccgatggatctcctgtgaaagccggcgtggaaaccaccaagccatccaagcagagcaacaacaaatacgccgccagctcctacctgagcctgacacctgagcagtggaagtcccacagatcctacagctgccaagtgacccacgaaggcagcaccgtggaaaagacagtggcccctacagagtgcagcggcagagccgattgcggctttaccagcgagagctaccagcagggcgtgctgagcgcctactacatgtacttgttgctgctgctgaagtccgtggtgtacttcgccatcatcacatgctgcctgctgcggagaaccgccttctgctgcaacggcgagaagtctcgcgccaagagaagcggatctggcgtgaagcagaccctgaatttcgacctgctgaagctggctggcgacgtggaatccaacccaggccctactagtatggactggatttggcgcatccttttccttgtcggcgctgctaccggcgcgcattccttcgaagaagtgcagctggttgaatcaggcggaggactggttcagcctggcggatctctgagactgtcttgtgccgccagcggctacaccttcaccaactactggatgaactgggtccgacaggcccctggcaaaggactggaatgggtcggaatgatcgaccccagcgacagcgagacacactacaaccacatcttcaaggaccgcttcaccatcagcgccgacaccagcaagaataccgcctacctccagatgaactccctgagagccgaggacaccgccgtgtactactgcgccagaaacctgtatctgtggggccagggaaccctggtcacagtgtcatctacgcgtgcctctacaaagggaccctccgtgtttcctctggctcccagcagcaagtctacaagcggaggaacagccgctctgggctgcctggtcaaggattactttcccgagcctgtgaccgtgtcctggaatagcggagcactgacaagcggcgtgcacacctttccagccgtgctgcaaagcagcggcctgtactctctgagcagcgtggtcacagtgcctagctctagcctgggcacccagacctacatctgcaatgtgaaccacaagcctagcaacaccaaggtggacaagagagtggaacccaagagctgtatccccgaggacacattcttcccaagccccgagagcagctgcgacgtgaagctggtggaaaagagcttcgagacagacaccaacctgaacttccagaacctgagcgtgatcggcctgcggatgctgttcgccaaaaccgtggccgtgaacttcctgctgaccgccaagctgttcttcctc

SEQ ID NO: 40367 - DNA, 1884 bp, synthetic construct
  source 1..1884: mol_type = other DNA
atggccttaccagtgaccgccttgctcctgccgctggccttgctgctccacgccgccaggccggacatccagatgacacagagccctagcagcctgtctgccagcgtgggagacagagtgaccatcacatgcaagagcagccagagcctgctggactccgatggcaagacctacctgaactggtatcagcagaagcccggcaaggcccctaagctgctgatctacctggtgtccaagctggatagcggcgtgcccagcagattttctggcagcggcagcggaaccgacttcaccctgacaatatccagcctccagcctgaggacttcgccacctactactgcttccaaggcacccactttccattcaccttcggccagggcaccaaggtggaaatcaaaagactcgaggagggacagcctaaggccaatcctaccgtgacactgttccctccaagcagcgaagaactccaggccaacaaggccacacttgtgtgcctgatctccgacttctaccctggggctgtgacagtggcttggaaggccgatggatctcctgtgaaagccggcgtggaaaccaccaagccatccaagcagagcaacaacaaatacgccgccagctcctacctgagcctgacacctgagcagtggaagtcccacagatcctacagctgccaagtgacccacgaaggcagcaccgtggaaaagacagtggcccctacagagtgcagcggcagagccgattgcggctttaccagcgagagctaccagcagggcgtgctgagcgcctactacatgtacttgttgctgctgctgaagtccgtggtgtacttcgccatcatcacatgctgcctgctgcggagaaccgccttctgctgcaacggcgagaagtctcgcgccaagagaagcggatctggcgtgaagcagaccctgaatttcgacctgctgaagctggctggcgacgtggaatccaacccaggccctactagtatggactggatttggcgcatccttttccttgtcggcgctgctaccggcgcgcattccttcgaagaagtgcagctggttgaatcaggcggaggactggttcagcctggcggatctctgagactgtcttgtgccgccagcggctacaccttcaccaactactggatgaactgggtccgacaggcccctggcaaaggactggaatgggtcggaatgatcgaccccagcgacagcgagacacactacaaccacatcttcaaggaccgcttcaccatcagcgccgacaccagcaagaataccgcctacctccagatgaactccctgagagccgaggacaccgccgtgtactactgcgccagaaacctgtatctgtggggccagggaaccctggtcacagtgtcatctacgcgtgcctctacaaagggaccctccgtgtttcctctggctcccagcagcaagtctacaagcggaggaacagccgctctgggctgcctggtcaaggattactttcccgagcctgtgaccgtgtcctggaatagcggagcactgacaagcggcgtgcacacctttccagccgtgctgcaaagcagcggcctgtactctctgagcagcgtggtcacagtgcctagctctagcctgggcacccagacctacatctgcaatgtgaaccacaagcctagcaacaccaaggtggacaagagagtggaacccaagagctgtatccccgaggacacattcttcccaagccccgagagcagctgcgacgtgaagctggtggaaaagagcttcgagacagacaccaacctgaacttccagaacctgagcgtgatcggcctgcggatgctgttcgccaaaaccgtggccgtgaacttcctgctgaccgccaagctgttcttcctc

SEQ ID NO: 40368 - DNA, 1893 bp, synthetic construct
  source 1..1893: mol_type = other DNA
atggccttaccagtgaccgccttgctcctgccgctggccttgctgctccacgccgccaggccggacatccagttgacccagtcccccagctcactcagcgccagtgtgggggaccgggtgaccattacctgtaaagccagtcagagtgtggactatgacggggatagcttcctgaattggtatcagcagaagcctggcaaagccccaaagctgctgatctacgctgcatctaatctggagtcaggcgtgccttccaggttctccggtagtgggtctgggaccgatttcacattgaccatttcatccctccaacccgaggatttcgctacatattactgtcagcagtccaatgaggaccctctcacctttggccagggcaccaaagttgaaattaagagactcgaggagggacagcctaaggccaatcctaccgtgacactgttccctccaagcagcgaagaactccaggccaacaaggccacacttgtgtgcctgatctccgacttctaccctggggctgtgacagtggcttggaaggccgatggatctcctgtgaaagccggcgtggaaaccaccaagccatccaagcagagcaacaacaaatacgccgccagctcctacctgagcctgacacctgagcagtggaagtcccacagatcctacagctgccaagtgacccacgaaggcagcaccgtggaaaagacagtggcccctacagagtgcagcggcagagccgattgcggctttaccagcgagagctaccagcagggcgtgctgagcgcctactacatgtacttgttgctgctgctgaagtccgtggtgtacttcgccatcatcacatgctgcctgctgcggagaaccgccttctgctgcaacggcgagaagtctcgcgccaagagaagcggatctggcgtgaagcagaccctgaatttcgacctgctgaagctggctggcgacgtggaatccaacccaggccctactagtatggactggatttggcgcatccttttccttgtcggcgctgctaccggcgcgcattccttcgaagaagtccaacttgtggagtctggagggggcctggtgcagcccggcggctctctcagactgtcttgtgcggcaagcggctacaccttcacctcttactggatagaatgggtgaggcaggcacctggaaagggactggagtggattggagagattctgccaggagggggagatacaaattacaatgaaatcttcaaggggcgggccaccttttcagcggataccagcaagaatacagcttacctgcagatgaatagcctccgggcagaagataccgctgtttattattgcacgagacgggtgccaataagactggactattgggggcaagggactcttgtcaccgtcagttcaacgcgtgcctctacaaagggaccctccgtgtttcctctggctcccagcagcaagtctacaagcggaggaacagccgctctgggctgcctggtcaaggattactttcccgagcctgtgaccgtgtcctggaatagcggagcactgacaagcggcgtgcacacctttccagccgtgctgcaaagcagcggcctgtactctctgagcagcgtggtcacagtgcctagctctagcctgggcacccagacctacatctgcaatgtgaaccacaagcctagcaacaccaaggtggacaagagagtggaacccaagagctgtatccccgaggacacattcttcccaagccccgagagcagctgcgacgtgaagctggtggaaaagagcttcgagacagacaccaacctgaacttccagaacctgagcgtgatcggcctgcggatgctgttcgccaaaaccgtggccgtgaacttcctgctgaccgccaagctgttcttcctc

SEQ ID NO: 40369 - DNA, 1893 bp, synthetic construct
  source 1..1893: mol_type = other DNA
atggccttaccagtgaccgccttgctcctgccgctggccttgctgctccacgccgccaggccggacatccagttgacccagtcccccagctcactcagcgccagtgtgggggaccgggtgaccattacctgtaaagccagtcagagtgtggactatgagggggatagcttcctgaattggtatcagcagaagcctggcaaagccccaaagctgctgatctacgctgcatctaatctggagtcaggcgtgccttctaggttctccggtagtgggtctgggaccgatttcacattgaccatttcatccctccaacccgaggatttcgctacatattactgtcagcagtccaatgaggaccctctcacctttggccagggcaccaaagttgaaattaagagactcgaggagggacagcctaaggccaatcctaccgtgacactgttccctccaagcagcgaagaactccaggccaacaaggccacacttgtgtgcctgatctccgacttctaccctggggctgtgacagtggcttggaaggccgatggatctcctgtgaaagccggcgtggaaaccaccaagccatccaagcagagcaacaacaaatacgccgccagctcctacctgagcctgacacctgagcagtggaagtcccacagatcctacagctgccaagtgacccacgaaggcagcaccgtggaaaagacagtggcccctacagagtgcagcggcagagccgattgcggctttaccagcgagagctaccagcagggcgtgctgagcgcctactacatgtacttgttgctgctgctgaagtccgtggtgtacttcgccatcatcacatgctgcctgctgcggagaaccgccttctgctgcaacggcgagaagtctcgcgccaagagaagcggatctggcgtgaagcagaccctgaatttcgacctgctgaagctggctggcgacgtggaatccaacccaggccctactagtatggactggatttggcgcatccttttccttgtcggcgctgctaccggcgcgcattccttcgaagaagtccaacttgtggagtctggagggggcctggtgcagcccggcggctctctcagactgtcttgtgcggcaagcggctacaccttcacctcttactggatagaatgggtgaggcaggcacctggaaagggactggagtggattggagagattctgccaggagggggagatacaaattacaatgaaatcttcaaggggcgggccaccttttcagcggataccagcaagaatacagcttacctgcagatgaatagcctccgggcagaagataccgctgtttattattgcacgagacgggtgccaataagactggactattgggggcaagggactcttgtcaccgtcagttcaacgcgtgcctctacaaagggaccctccgtgtttcctctggctcccagcagcaagtctacaagcggaggaacagccgctctgggctgcctggtcaaggattactttcccgagcctgtgaccgtgtcctggaatagcggagcactgacaagcggcgtgcacacctttccagccgtgctgcaaagcagcggcctgtactctctgagcagcgtggtcacagtgcctagctctagcctgggcacccagacctacatctgcaatgtgaaccacaagcctagcaacaccaaggtggacaagagagtggaacccaagagctgtatccccgaggacacattcttcccaagccccgagagcagctgcgacgtgaagctggtggaaaagagcttcgagacagacaccaacctgaacttccagaacctgagcgtgatcggcctgcggatgctgttcgccaaaaccgtggccgtgaacttcctgctgaccgccaagctgttcttcctc

SEQ ID NO: 40370 - DNA, 1890 bp, synthetic construct
  source 1..1890: mol_type = other DNA
atggccttaccagtgaccgccttgctcctgccgctggccttgctgctccacgccgccaggccggacatcgtgatgacacagagccctgatagcctggccgtgtctctgggagagagagccaccattaactgcaaggccagccagagcgtggactacgacggcgacagcttcctgaactggtatcagcagaagcccggccagcctcctaagctgctgatctacgccgccagcaatctggaaagcggcgtgccaagcagattttccggctctggcagcggcaccgatttcaccctgacaatatccagcctccagcctgaggacgtggccgtgtactactgccagcagagcaacgacgaccctctgacctttggacagggcaccaaggtggaaatcaaactcgaggagggacagcctaaggccaatcctaccgtgacactgttccctccaagcagcgaagaactccaggccaacaaggccacacttgtgtgcctgatctccgacttctaccctggggctgtgacagtggcttggaaggccgatggatctcctgtgaaagccggcgtggaaaccaccaagccatccaagcagagcaacaacaaatacgccgccagctcctacctgagcctgacacctgagcagtggaagtcccacagatcctacagctgccaagtgacccacgaaggcagcaccgtggaaaagacagtggcccctacagagtgcagcggcagagccgattgcggctttaccagcgagagctaccagcagggcgtgctgagcgcctactacatgtacttgttgctgctgctgaagtccgtggtgtacttcgccatcatcacatgctgcctgctgcggagaaccgccttctgctgcaacggcgagaagtctcgcgccaagagaagcggatctggcgtgaagcagaccctgaatttcgacctgctgaagctggctggcgacgtggaatccaacccaggccctactagtatggactggatttggcgcatccttttccttgtcggcgctgctaccggcgcgcattccttcgaacaagttcagctggttcagagcggagccgaagtgaagaaacctggggcctctgtgaaggtgtcctgcaaagccagcggctacacctttaccagctactggatcaactgggtccgacaggcccctggacaaggactggaatggatgggacagatccttccaggcggaggggacaccaactacaacggcaagttcaagggcagagtgaccatcaccgccgacaccagcacaagcaccgcctacatggaactgagcagcctgagaagcgaggacaccgccgtgtattattgcaccagacgggtgcccatccggctggattattggggacagggaaccctggtcaccgtgtctagtacgcgtgcctctacaaagggaccctccgtgtttcctctggctcccagcagcaagtctacaagcggaggaacagccgctctgggctgcctggtcaaggattactttcccgagcctgtgaccgtgtcctggaatagcggagcactgacaagcggcgtgcacacctttccagccgtgctgcaaagcagcggcctgtactctctgagcagcgtggtcacagtgcctagctctagcctgggcacccagacctacatctgcaatgtgaaccacaagcctagcaacaccaaggtggacaagagagtggaacccaagagctgtatccccgaggacacattcttcccaagccccgagagcagctgcgacgtgaagctggtggaaaagagcttcgagacagacaccaacctgaacttccagaacctgagcgtgatcggcctgcggatgctgttcgccaaaaccgtggccgtgaacttcctgctgaccgccaagctgttcttcctc

SEQ ID NO: 40371 - DNA, 1890 bp, synthetic construct
  source 1..1890: mol_type = other DNA
atggccttaccagtgaccgccttgctcctgccgctggccttgctgctccacgccgccaggccggacatcgtgatgacacagagccctgatagcctggccgtgtctctgggagagagagccaccattaactgcaaggccagccagagcgtggactacgacggcgacagcttcctgaactggtatcagcagaagcccggccagcctcctaagctgctgatctacgccgccagcaatctggaaagcggcgtgccaagcagattttccggctctggcagcggcaccgatttcaccctgacaatatccagcctccagcctgaggacgtggccgtgtactactgccagcagagcaacgacgaccctctgacctttggacagggcaccaaggtggaaatcaaactcgaggagggacagcctaaggccaatcctaccgtgacactgttccctccaagcagcgaagaactccaggccaacaaggccacacttgtgtgcctgatctccgacttctaccctggggctgtgacagtggcttggaaggccgatggatctcctgtgaaagccggcgtggaaaccaccaagccatccaagcagagcaacaacaaatacgccgccagctcctacctgagcctgacacctgagcagtggaagtcccacagatcctacagctgccaagtgacccacgaaggcagcaccgtggaaaagacagtggcccctacagagtgcagcggcagagccgattgcggctttaccagcgagagctaccagcagggcgtgctgagcgcctactacatgtacttgttgctgctgctgaagtccgtggtgtacttcgccatcatcacatgctgcctgctgcggagaaccgccttctgctgcaacggcgagaagtctcgcgccaagagaagcggatctggcgtgaagcagaccctgaatttcgacctgctgaagctggctggcgacgtggaatccaacccaggccctactagtatggactggatttggcgcatccttttccttgtcggcgctgctaccggcgcgcattccttcgaagaagtccaacttgtggagtctggagggggcctggtgcagcccggcggctctctcagactgtcttgtgcggcaagcggctacaccttcacctcttactggatagaatgggtgaggcaggcacctggaaagggactggagtggattggagagattctgccaggagggggagatacaaattacaatgaaatcttcaaggggcgggccaccttttcagcggataccagcaagaatacagcttacctgcagatgaatagcctccgggcagaagataccgctgtttattattgcacgagacgggtgccaataagactggactattgggggcaagggactcttgtcaccgtcagttcaacgcgtgcctctacaaagggaccctccgtgtttcctctggctcccagcagcaagtctacaagcggaggaacagccgctctgggctgcctggtcaaggattactttcccgagcctgtgaccgtgtcctggaatagcggagcactgacaagcggcgtgcacacctttccagccgtgctgcaaagcagcggcctgtactctctgagcagcgtggtcacagtgcctagctctagcctgggcacccagacctacatctgcaatgtgaaccacaagcctagcaacaccaaggtggacaagagagtggaacccaagagctgtatccccgaggacacattcttcccaagccccgagagcagctgcgacgtgaagctggtggaaaagagcttcgagacagacaccaacctgaacttccagaacctgagcgtgatcggcctgcggatgctgttcgccaaaaccgtggccgtgaacttcctgctgaccgccaagctgttcttcctc

SEQ ID NO: 40372 - DNA, 1890 bp, synthetic construct
  source 1..1890: mol_type = other DNA
atggccttaccagtgaccgccttgctcctgccgctggccttgctgctccacgccgccaggccggacatcgtgatgacacagagccctgatagcctggccgtgtctctgggagagagagccaccattaactgcaaggccagccagagcgtggactacgacggcgacagcttcctgaactggtatcagcagaagcccggccagcctcctaagctgctgatctacgccgccagcaatctggaaagcggcgtgccaagcagattttccggctctggcagcggcaccgatttcaccctgacaatatccagcctccagcctgaggacgtggccgtgtactactgccagcagagcaacgacgaccctctgacctttggacagggcaccaaggtggaaatcaaactcgaggagggacagcctaaggccaatcctaccgtgacactgttccctccaagcagcgaagaactccaggccaacaaggccacacttgtgtgcctgatctccgacttctaccctggggctgtgacagtggcttggaaggccgatggatctcctgtgaaagccggcgtggaaaccaccaagccatccaagcagagcaacaacaaatacgccgccagctcctacctgagcctgacacctgagcagtggaagtcccacagatcctacagctgccaagtgacccacgaaggcagcaccgtggaaaagacagtggcccctacagagtgcagcggcagagccgattgcggctttaccagcgagagctaccagcagggcgtgctgagcgcctactacatgtacttgttgctgctgctgaagtccgtggtgtacttcgccatcatcacatgctgcctgctgcggagaaccgccttctgctgcaacggcgagaagtctcgcgccaagagaagcggatctggcgtgaagcagaccctgaatttcgacctgctgaagctggctggcgacgtggaatccaacccaggccctactagtatggactggatttggcgcatccttttccttgtcggcgctgctaccggcgcgcattccttcgaagaagtccaacttgtggagtctggagggggcctggtgcagcccggcggctctctcagactgtcttgtgcggcaagcggctacaccttcagctcttactggatagaatgggtgaggcaggcacctggaaagggactggagtggattggagagattctgccaggagggggagatacaaattacaatgaaatcttcaaggggcgggccaccttttcagcggataccagcaagaatacagcttacctgcagatgaatagcctccgggcagaagataccgctgtttattattgcacgagacgggtgccaataagactggactattgggggcaagggactcttgtcaccgtcagttcaacgcgtgcctctacaaagggaccctccgtgtttcctctggctcccagcagcaagtctacaagcggaggaacagccgctctgggctgcctggtcaaggattactttcccgagcctgtgaccgtgtcctggaatagcggagcactgacaagcggcgtgcacacctttccagccgtgctgcaaagcagcggcctgtactctctgagcagcgtggtcacagtgcctagctctagcctgggcacccagacctacatctgcaatgtgaaccacaagcctagcaacaccaaggtggacaagagagtggaacccaagagctgtatccccgaggacacattcttcccaagccccgagagcagctgcgacgtgaagctggtggaaaagagcttcgagacagacaccaacctgaacttccagaacctgagcgtgatcggcctgcggatgctgttcgccaaaaccgtggccgtgaacttcctgctgaccgccaagctgttcttcctc

SEQ ID NO: 40373 - DNA, 1881 bp, synthetic construct
  source 1..1881: mol_type = other DNA
atggccttaccagtgaccgccttgctcctgccgctggccttgctgctccacgccgccaggccggacgtggtcatgacacagagcccttctagcctgtctgccagcgtgggcgacagagtgaccatcacctgtatggcctccgaggacatctacatccggctggcctggtatcagcagaagcctggaaacgcccctaagctgctgatctacgccgccacctctctggaaacaggcgtgccaagcagattttccggcagcggctctggcaccgatttcaccctgacaatatccagcctccagcctgaggacttcgccacctactactgccagcagtattggagcagcccctggacatttggcggaggcaccaaggtggaaatcaaactcgaggagggacagcctaaggccaatcctaccgtgacactgttccctccaagcagcgaagaactccaggccaacaaggccacacttgtgtgcctgatctccgacttctaccctggggctgtgacagtggcttggaaggccgatggatctcctgtgaaagccggcgtggaaaccaccaagccatccaagcagagcaacaacaaatacgccgccagctcctacctgagcctgacacctgagcagtggaagtcccacagatcctacagctgccaagtgacccacgaaggcagcaccgtggaaaagacagtggcccctacagagtgcagcggcagagccgattgcggctttaccagcgagagctaccagcagggcgtgctgagcgcctactacatgtacttgttgctgctgctgaagtccgtggtgtacttcgccatcatcacatgctgcctgctgcggagaaccgccttctgctgcaacggcgagaagtctcgcgccaagagaagcggatctggcgtgaagcagaccctgaatttcgacctgctgaagctggctggcgacgtggaatccaacccaggccctactagtatggactggatttggcgcatccttttccttgtcggcgctgctaccggcgcgcattccttcgaacaggttcagctgcaagagtctggccccggactggtcaagcctagccaaacactgagcctgacctgtaccgtgtccggctacagcatcaccagcgactacacctggaactggatcagacagcctcctggcaacggactggaatggatcggctacatcacctacagcggcagcaccagctacaaccccagcctgaaaagccgggtgctgatctccgtggacaccagcaagaatcaggtgtccctgaagctgagcagcgtgacagccgctgataccgccgtgtactactgtgccagactggggagaagatacacaatggactactggggccagggcaccaccgtgacagtttcttctacgcgtgcctctacaaagggaccctccgtgtttcctctggctcccagcagcaagtctacaagcggaggaacagccgctctgggctgcctggtcaaggattactttcccgagcctgtgaccgtgtcctggaatagcggagcactgacaagcggcgtgcacacctttccagccgtgctgcaaagcagcggcctgtactctctgagcagcgtggtcacagtgcctagctctagcctgggcacccagacctacatctgcaatgtgaaccacaagcctagcaacaccaaggtggacaagagagtggaacccaagagctgtatccccgaggacacattcttcccaagccccgagagcagctgcgacgtgaagctggtggaaaagagcttcgagacagacaccaacctgaacttccagaacctgagcgtgatcggcctgcggatgctgttcgccaaaaccgtggccgtgaacttcctgctgaccgccaagctgttcttcctc

SEQ ID NO: 40374 - DNA, 1878 bp, synthetic construct
  source 1..1878: mol_type = other DNA
atggccttaccagtgaccgccttgctcctgccgctggccttgctgctccacgccgccaggccggacatccagatgacacagagccctagcagcctgtctgccagcgtgggagacagagtgaccatcacatgcaaggccagcgacctgatccacaactggctggcctggtatcagcagaagcctggcaaggcccctaagctgctgatctacggcgctacctctctggaaacaggcgtgcccagcagattttctggcagcggctctggcaccgacttcaccctgacaatatccagcctccagcctgaggacttcgccacctactactgccagcagtactggaccacacctttcaccttcggccagggcaccaaggtggaaatcaaaagactcgaggagggacagcctaaggccaatcctaccgtgacactgttccctccaagcagcgaagaactccaggccaacaaggccacacttgtgtgcctgatctccgacttctaccctggggctgtgacagtggcttggaaggccgatggatctcctgtgaaagccggcgtggaaaccaccaagccatccaagcagagcaacaacaaatacgccgccagctcctacctgagcctgacacctgagcagtggaagtcccacagatcctacagctgccaagtgacccacgaaggcagcaccgtggaaaagacagtggcccctacagagtgcagcggcagagccgattgcggctttaccagcgagagctaccagcagggcgtgctgagcgcctactacatgtacttgttgctgctgctgaagtccgtggtgtacttcgccatcatcacatgctgcctgctgcggagaaccgccttctgctgcaacggcgagaagtctcgcgccaagagaagcggatctggcgtgaagcagaccctgaatttcgacctgctgaagctggctggcgacgtggaatccaacccaggccctactagtatggactggatttggcgcatccttttccttgtcggcgctgctaccggcgcgcattccttcgaagaagtgcagctggttgaatcaggtggcggcctggttcaacctggcggatctctgagactgagctgtgccgccagcggctacagcatcaccaatgactacgcctggaactgggtccgacaggcccctggaaaaggactggaatgggtcggatatatcagctactccggctacaccacctacaatcccagcatcaagagccggttcaccatcagcagagacaccagcaagaacaccctgtacctccagatgaactccctgagagccgaggacaccgccgtgtactattgtgccagatggaccagcggcctggactattggggacagggaacactggtcaccgtgtcctctacgcgtgcctctacaaagggaccctccgtgtttcctctggctcccagcagcaagtctacaagcggaggaacagccgctctgggctgcctggtcaaggattactttcccgagcctgtgaccgtgtcctggaatagcggagcactgacaagcggcgtgcacacctttccagccgtgctgcaaagcagcggcctgtactctctgagcagcgtggtcacagtgcctagctctagcctgggcacccagacctacatctgcaatgtgaaccacaagcctagcaacaccaaggtggacaagagagtggaacccaagagctgtatccccgaggacacattcttcccaagccccgagagcagctgcgacgtgaagctggtggaaaagagcttcgagacagacaccaacctgaacttccagaacctgagcgtgatcggcctgcggatgctgttcgccaaaaccgtggccgtgaacttcctgctgaccgccaagctgttcttcctc

SEQ ID NO: 40375 - DNA, 1899 bp, synthetic construct
  source 1..1899: mol_type = other DNA
atggccttaccagtgaccgccttgctcctgccgctggccttgctgctccacgccgccaggccggacatcgtgatgacacagagccctgatagcctggccgtgtctctgggagagagagccaccatcaactgcaagagcagccagagcctgctgaacagcggcaaccagaagaactacctggcctggtatcagcagaagcccggccagcctcctaagctgctgatctactggggcagcaccagatccacaggcgtgcccgatagattttctggctctggcagcggcaccgacttcaccctgacaatttctagcctgcaagccgaggacgtggccgtgtactactgccagaacgactacacataccccttcaccttcggccagggcaccaagctggaaatcaaactcgaggagggacagcctaaggccaatcctaccgtgacactgttccctccaagcagcgaagaactccaggccaacaaggccacacttgtgtgcctgatctccgacttctaccctggggctgtgacagtggcttggaaggccgatggatctcctgtgaaagccggcgtggaaaccaccaagccatccaagcagagcaacaacaaatacgccgccagctcctacctgagcctgacacctgagcagtggaagtcccacagatcctacagctgccaagtgacccacgaaggcagcaccgtggaaaagacagtggcccctacagagtgcagcggcagagccgattgcggctttaccagcgagagctaccagcagggcgtgctgagcgcctactacatgtacttgttgctgctgctgaagtccgtggtgtacttcgccatcatcacatgctgcctgctgcggagaaccgccttctgctgcaacggcgagaagtctcgcgccaagagaagcggatctggcgtgaagcagaccctgaatttcgacctgctgaagctggctggcgacgtggaatccaacccaggccctactagtatggactggatttggcgcatccttttccttgtcggcgctgctaccggcgcgcattccttcgaacaagttcagctggttcagagcggagccgaagtgaagaaacctggggcctctgtgaaggtgtcctgcaaggcttccggctataccttcaccagcttttggctgaactgggtccgacaggcccctggacaaggactggaatggatgggcaacatctaccccagcaccagctacaccgtgtacaaccagaaattcaaggaccgcgtgaccatgaccagggacaccagcacaagcacagtgtacatggaactgagcagcctgcggagcgaggataccgccgtgtattattgcgccagaacctggcggggcaacagcttcgattattggggccagggaaccaccgtgaccgtgtcatctacgcgtgcctctacaaagggaccctccgtgtttcctctggctcccagcagcaagtctacaagcggaggaacagccgctctgggctgcctggtcaaggattactttcccgagcctgtgaccgtgtcctggaatagcggagcactgacaagcggcgtgcacacctttccagccgtgctgcaaagcagcggcctgtactctctgagcagcgtggtcacagtgcctagctctagcctgggcacccagacctacatctgcaatgtgaaccacaagcctagcaacaccaaggtggacaagagagtggaacccaagagctgtatccccgaggacacattcttcccaagccccgagagcagctgcgacgtgaagctggtggaaaagagcttcgagacagacaccaacctgaacttccagaacctgagcgtgatcggcctgcggatgctgttcgccaaaaccgtggccgtgaacttcctgctgaccgccaagctgttcttcctc

SEQ ID NO: 40376 - DNA, 1899 bp, synthetic construct
  source 1..1899: mol_type = other DNA
atggccttaccagtgaccgccttgctcctgccgctggccttgctgctccacgccgccaggccggacatcgtgatgacacagagccctgatagcctggccgtgtctctgggagagagagccaccatcaactgcaagagcagccagagcctgctgaacagcggcaacaacaagaactacgtgacatggtatcagcagaagcccggccagcctcctaagctgctgatctactggggcagcaccagatccacaggcgtgcccgatagattttctggctctggcagcggcaccgacttcaccctgacaatttctagcctgcaagccgaggacgtggccgtgtactactgccagaacgactacacataccccttcaccttcggccagggcaccaagctggaaatcaaactcgaggagggacagcctaaggccaatcctaccgtgacactgttccctccaagcagcgaagaactccaggccaacaaggccacacttgtgtgcctgatctccgacttctaccctggggctgtgacagtggcttggaaggccgatggatctcctgtgaaagccggcgtggaaaccaccaagccatccaagcagagcaacaacaaatacgccgccagctcctacctgagcctgacacctgagcagtggaagtcccacagatcctacagctgccaagtgacccacgaaggcagcaccgtggaaaagacagtggcccctacagagtgcagcggcagagccgattgcggctttaccagcgagagctaccagcagggcgtgctgagcgcctactacatgtacttgttgctgctgctgaagtccgtggtgtacttcgccatcatcacatgctgcctgctgcggagaaccgccttctgctgcaacggcgagaagtctcgcgccaagagaagcggatctggcgtgaagcagaccctgaatttcgacctgctgaagctggctggcgacgtggaatccaacccaggccctactagtatggactggatttggcgcatccttttccttgtcggcgctgctaccggcgcgcattccttcgaacaagttcagctggttcagagcggagccgaagtgaagaaacctggggcctctgtgaaggtgtcctgcaaggcttccggctataccttcaccagcttttggctgaactgggtccgacaggcccctggacaaggactggaatggatgggcaacatctaccccagcgacagctacaccgtgtacaaccagaaattcaaggaccgcgtgaccatgaccagggacaccagcacaagcacagtgtacatggaactgagcagcctgcggagcgaggataccgccgtgtattattgcgccagaacctggcggggcaacagcttcgattattggggccagggaaccaccgtgaccgtgtcatctacgcgtgcctctacaaagggaccctccgtgtttcctctggctcccagcagcaagtctacaagcggaggaacagccgctctgggctgcctggtcaaggattactttcccgagcctgtgaccgtgtcctggaatagcggagcactgacaagcggcgtgcacacctttccagccgtgctgcaaagcagcggcctgtactctctgagcagcgtggtcacagtgcctagctctagcctgggcacccagacctacatctgcaatgtgaaccacaagcctagcaacaccaaggtggacaagagagtggaacccaagagctgtatccccgaggacacattcttcccaagccccgagagcagctgcgacgtgaagctggtggaaaagagcttcgagacagacaccaacctgaacttccagaacctgagcgtgatcggcctgcggatgctgttcgccaaaaccgtggccgtgaacttcctgctgaccgccaagctgttcttcctc

SEQ ID NO: 40377 - DNA, 1875 bp, synthetic construct
  source 1..1875: mol_type = other DNA
atggccttaccagtgaccgccttgctcctgccgctggccttgctgctccacgccgccaggccgcagatcgtgctgacacagagccctgccatcatgtccgcttctcccggcgagaaagtgaccatgacatgtagcgccagcagcagcgtgtccttcatgcactggtatcagcagaagtccggcacaagccccaagcggtggatctacgataccagcacactggcctctggcgtgccagccagatttggcggatctggcagcggcacatcttacagcctgaccatcagcagcatggaagccgaagatgccgccacctactactgccagcagtggtccagcaatcccctgacatttggagccggcaccaagctggaactgaagagactcgaggagggacagcctaaggccaatcctaccgtgacactgttccctccaagcagcgaagaactccaggccaacaaggccacacttgtgtgcctgatctccgacttctaccctggggctgtgacagtggcttggaaggccgatggatctcctgtgaaagccggcgtggaaaccaccaagccatccaagcagagcaacaacaaatacgccgccagctcctacctgagcctgacacctgagcagtggaagtcccacagatcctacagctgccaagtgacccacgaaggcagcaccgtggaaaagacagtggcccctacagagtgcagcggcagagccgattgcggctttaccagcgagagctaccagcagggcgtgctgagcgcctactacatgtacttgttgctgctgctgaagtccgtggtgtacttcgccatcatcacatgctgcctgctgcggagaaccgccttctgctgcaacggcgagaagtctcgcgccaagagaagcggatctggcgtgaagcagaccctgaatttcgacctgctgaagctggctggcgacgtggaatccaacccaggccctactagtatggactggatttggcgcatccttttccttgtcggcgctgctaccggcgcgcattccttcgaacaagttcagctgcaacagagcggccctgagctggttaagcctggcgcttctgtgcggatctcttgcaaggccagcggctacaccttcaccagctactacatccactgggtcaagcagcggcctggacagggactcgaatggatcggctggatctaccccggcaacctgaacaccaagtacaacgagaagttcaagggcaaagccacactgaccgccgacaagagcagcagcacagcctacatgcagctgagcagcctgacaagcgaggacagcgccgtgtacttctgcgccagatacgactggtacttcgacgtgtggggagccggaaccaccgtgacagtttcttctacgcgtgcctctacaaagggaccctccgtgtttcctctggctcccagcagcaagtctacaagcggaggaacagccgctctgggctgcctggtcaaggattactttcccgagcctgtgaccgtgtcctggaatagcggagcactgacaagcggcgtgcacacctttccagccgtgctgcaaagcagcggcctgtactctctgagcagcgtggtcacagtgcctagctctagcctgggcacccagacctacatctgcaatgtgaaccacaagcctagcaacaccaaggtggacaagagagtggaacccaagagctgtatccccgaggacacattcttcccaagccccgagagcagctgcgacgtgaagctggtggaaaagagcttcgagacagacaccaacctgaacttccagaacctgagcgtgatcggcctgcggatgctgttcgccaaaaccgtggccgtgaacttcctgctgaccgccaagctgttcttcctc

SEQ ID NO: 40378 - DNA, 1893 bp, synthetic construct
  source 1..1893: mol_type = other DNA
atggccttaccagtgaccgccttgctcctgccgctggccttgctgctccacgccgccaggccggacatccagatgacacagagccctagcagcctgtctgccagcgtgggagacagagtgaccatcacctgtagagccagccagagcatcagcagctacctgaactggtatcagcagaagcccggcaaggcccctaaactgctgatctatgccgccagctctctccagagcggagtgcctagcagattttctggcagcggctccggcaccgatttcaccctgacaatatccagcctccagcctgaggacttcgccacctactactgccagcagagctacagcacccctctgacctttggacagggcaccaaggtggaaatcaagctcgaggagggacagcctaaggccaatcctaccgtgacactgttccctccaagcagcgaagaactccaggccaacaaggccacacttgtgtgcctgatctccgacttctaccctggggctgtgacagtggcttggaaggccgatggatctcctgtgaaagccggcgtggaaaccaccaagccatccaagcagagcaacaacaaatacgccgccagctcctacctgagcctgacacctgagcagtggaagtcccacagatcctacagctgccaagtgacccacgaaggcagcaccgtggaaaagacagtggcccctacagagtgcagcggcagagccgattgcggctttaccagcgagagctaccagcagggcgtgctgagcgcctactacatgtacttgttgctgctgctgaagtccgtggtgtacttcgccatcatcacatgctgcctgctgcggagaaccgccttctgctgcaacggcgagaagtctcgcgccaagagaagcggatctggcgtgaagcagaccctgaatttcgacctgctgaagctggctggcgacgtggaatccaacccaggccctactagtatggactggatttggcgcatccttttccttgtcggcgctgctaccggcgcgcattccttcgaagaggtgcagctggttgaatctggcggaggactggttcagcctggcggatctctgagactgtcttgtgctgccagcggcttcaccttcagctcctacgccatgagctgggtccgacaggctcctggcaaaggactggaatgggtgtccgccatctctggctcaggcggcagcacatattacgccgactctgtgaagggcagattcaccatcagccgggacaacagcaagaacaccctgtacctccagatgaactccctgagagccgaggacaccgccgtgtactattgtgccagactgggctaccccaccaccacactgctgccctttgattattggggccagggcaccctggtcaccgtttcttctacgcgtgcctctacaaagggaccctccgtgtttcctctggctcccagcagcaagtctacaagcggaggaacagccgctctgggctgcctggtcaaggattactttcccgagcctgtgaccgtgtcctggaatagcggagcactgacaagcggcgtgcacacctttccagccgtgctgcaaagcagcggcctgtactctctgagcagcgtggtcacagtgcctagctctagcctgggcacccagacctacatctgcaatgtgaaccacaagcctagcaacaccaaggtggacaagagagtggaacccaagagctgtatccccgaggacacattcttcccaagccccgagagcagctgcgacgtgaagctggtggaaaagagcttcgagacagacaccaacctgaacttccagaacctgagcgtgatcggcctgcggatgctgttcgccaaaaccgtggccgtgaacttcctgctgaccgccaagctgttcttcctc

SEQ ID NO: 40379 - DNA, 1896 bp, synthetic construct
  source 1..1896: mol_type = other DNA
atggccttaccagtgaccgccttgctcctgccgctggccttgctgctccacgccgccaggccggacatccagatgacacagagccctagcagcctgtctgccagcgtgggagacagagtgaccatcacctgtagagccagccaggacatcaacacagccgtggcttggtatcagcagaagcctggcaaggcccctaagctgctgatctacagcgcctacttcctgtacagcggcgtgcccagcagattcagcggaagcagaagcggcaccgacttcaccctgacaatatccagcctccagcctgaggacttcgccacctactactgccagcagtacagcagatacagccccgtgacctttggacagggcaccaaggtggaaatcaagagactcgaggagggacagcctaaggccaatcctaccgtgacactgttccctccaagcagcgaagaactccaggccaacaaggccacacttgtgtgcctgatctccgacttctaccctggggctgtgacagtggcttggaaggccgatggatctcctgtgaaagccggcgtggaaaccaccaagccatccaagcagagcaacaacaaatacgccgccagctcctacctgagcctgacacctgagcagtggaagtcccacagatcctacagctgccaagtgacccacgaaggcagcaccgtggaaaagacagtggcccctacagagtgcagcggcagagccgattgcggctttaccagcgagagctaccagcagggcgtgctgagcgcctactacatgtacttgttgctgctgctgaagtccgtggtgtacttcgccatcatcacatgctgcctgctgcggagaaccgccttctgctgcaacggcgagaagtctcgcgccaagagaagcggatctggcgtgaagcagaccctgaatttcgacctgctgaagctggctggcgacgtggaatccaacccaggccctactagtatggactggatttggcgcatccttttccttgtcggcgctgctaccggcgcgcattccttcgaagaagttcagctggttgaaagtggtggcggcctggttcaacctggcggatctctgagactgagctgtgccgccagcggcttcaatgtgtacgcctctggaatgcactgggtccgacaggcccctggcaaaggacttgagtgggtcgccaaaatctaccccgacagcgactacacctattacgccgacagcgtgaagggcagattcaccatcagcgccgacaccagcaagaacaccgcctacctccagatgaactccctgagagccgaggacaccgccgtgtactactgtagcagagacagcagcttctactacgtgtacgctatggactactggggccagggcacactggtcacagtctcttctacgcgtgcctctacaaagggaccctccgtgtttcctctggctcccagcagcaagtctacaagcggaggaacagccgctctgggctgcctggtcaaggattactttcccgagcctgtgaccgtgtcctggaatagcggagcactgacaagcggcgtgcacacctttccagccgtgctgcaaagcagcggcctgtactctctgagcagcgtggtcacagtgcctagctctagcctgggcacccagacctacatctgcaatgtgaaccacaagcctagcaacaccaaggtggacaagagagtggaacccaagagctgtatccccgaggacacattcttcccaagccccgagagcagctgcgacgtgaagctggtggaaaagagcttcgagacagacaccaacctgaacttccagaacctgagcgtgatcggcctgcggatgctgttcgccaaaaccgtggccgtgaacttcctgctgaccgccaagctgttcttcctc

SEQ ID NO: 40380 - DNA, 1896 bp, synthetic construct
  source 1..1896: mol_type = other DNA
atggccttaccagtgaccgccttgctcctgccgctggccttgctgctccacgccgccaggccggacatccagatgacacagagccctagcagcctgtctgccagcgtgggagacagagtgaccatcacctgtagagccagccaggacgtgaacacagccgtggcttggtatcagcagaagcctggcaaggcccctaagctgctgatctacagcgcctacttcctgtacagcggcgtgcccagcagattcagcggaagcagaagcggcaccgacttcaccctgacaatatccagcctccagcctgaggacttcgccacctactactgccagcagtacagcagatacagccccgtgacctttggacagggcaccaaggtggaaatcaagagactcgaggagggacagcctaaggccaatcctaccgtgacactgttccctccaagcagcgaagaactccaggccaacaaggccacacttgtgtgcctgatctccgacttctaccctggggctgtgacagtggcttggaaggccgatggatctcctgtgaaagccggcgtggaaaccaccaagccatccaagcagagcaacaacaaatacgccgccagctcctacctgagcctgacacctgagcagtggaagtcccacagatcctacagctgccaagtgacccacgaaggcagcaccgtggaaaagacagtggcccctacagagtgcagcggcagagccgattgcggctttaccagcgagagctaccagcagggcgtgctgagcgcctactacatgtacttgttgctgctgctgaagtccgtggtgtacttcgccatcatcacatgctgcctgctgcggagaaccgccttctgctgcaacggcgagaagtctcgcgccaagagaagcggatctggcgtgaagcagaccctgaatttcgacctgctgaagctggctggcgacgtggaatccaacccaggccctactagtatggactggatttggcgcatccttttccttgtcggcgctgctaccggcgcgcattccttcgaagaagttcagctggttgaaagtggtggcggcctggttcaacctggcggatctctgagactgagctgtgccgccagcggcttcaatgtgtacgcctctggaatgcactgggtccgacaggcccctggcaaaggacttgagtgggtcgccaaaatctaccccgacagcgactacacctattacgccgacagcgtgaagggcagattcaccatcagcgccgacaccagcaagaacaccgcctacctccagatgaactccctgagagccgaggacaccgccgtgtactactgtagcagagacagcagcttctactacgtgtacgctatggactactggggccagggcacactggtcacagtctcttctacgcgtgcctctacaaagggaccctccgtgtttcctctggctcccagcagcaagtctacaagcggaggaacagccgctctgggctgcctggtcaaggattactttcccgagcctgtgaccgtgtcctggaatagcggagcactgacaagcggcgtgcacacctttccagccgtgctgcaaagcagcggcctgtactctctgagcagcgtggtcacagtgcctagctctagcctgggcacccagacctacatctgcaatgtgaaccacaagcctagcaacaccaaggtggacaagagagtggaacccaagagctgtatccccgaggacacattcttcccaagccccgagagcagctgcgacgtgaagctggtggaaaagagcttcgagacagacaccaacctgaacttccagaacctgagcgtgatcggcctgcggatgctgttcgccaaaaccgtggccgtgaacttcctgctgaccgccaagctgttcttcctc

SEQ ID NO: 40381 - DNA, 1881 bp, synthetic construct
  source 1..1881: mol_type = other DNA
atggccttaccagtgaccgccttgctcctgccgctggccttgctgctccacgccgccaggccggacatccagatgacacagagccctagcagcctgtctgccagcgtgggagacagagtgaccatcacctgtagagccagccaggatgtgtctacagccgtggcctggtatcagcagaagcctggaaaggcccctaagctgctgatctacagcgccagctttctgtactccggcgtgcccagcagattcagcggaagcagaagcggcaccgacttcaccctgacaatatccagcctccagcctgaggacttcgccacctactactgccagcagtacctgtaccagccttggacattcggccagggcaccaaggtggaaatcaagagactcgaggagggacagcctaaggccaatcctaccgtgacactgttccctccaagcagcgaagaactccaggccaacaaggccacacttgtgtgcctgatctccgacttctaccctggggctgtgacagtggcttggaaggccgatggatctcctgtgaaagccggcgtggaaaccaccaagccatccaagcagagcaacaacaaatacgccgccagctcctacctgagcctgacacctgagcagtggaagtcccacagatcctacagctgccaagtgacccacgaaggcagcaccgtggaaaagacagtggcccctacagagtgcagcggcagagccgattgcggctttaccagcgagagctaccagcagggcgtgctgagcgcctactacatgtacttgttgctgctgctgaagtccgtggtgtacttcgccatcatcacatgctgcctgctgcggagaaccgccttctgctgcaacggcgagaagtctcgcgccaagagaagcggatctggcgtgaagcagaccctgaatttcgacctgctgaagctggctggcgacgtggaatccaacccaggccctactagtatggactggatttggcgcatccttttccttgtcggcgctgctaccggcgcgcattccttcgaagaagttcagctggttgagtctggcggaggactggttcaacctggcggaagcctgagactgtcttgtgccgccagcggcttcaacatcgactactacggaatgcactgggtccgacaggcccctggcaaaggacttgaatgggtcgcctctctgtacggcggcagcgatagcacagattacgccgactctgtgaagggcagattcaccatcagcgccgacaccagcaagaacaccgcctacctccagatgaactccctgagagccgaagataccgccgtgtactactgctccagacagtacagcgcctacttcgactattggggccagggaaccctggtcaccgttagctctacgcgtgcctctacaaagggaccctccgtgtttcctctggctcccagcagcaagtctacaagcggaggaacagccgctctgggctgcctggtcaaggattactttcccgagcctgtgaccgtgtcctggaatagcggagcactgacaagcggcgtgcacacctttccagccgtgctgcaaagcagcggcctgtactctctgagcagcgtggtcacagtgcctagctctagcctgggcacccagacctacatctgcaatgtgaaccacaagcctagcaacaccaaggtggacaagagagtggaacccaagagctgtatccccgaggacacattcttcccaagccccgagagcagctgcgacgtgaagctggtggaaaagagcttcgagacagacaccaacctgaacttccagaacctgagcgtgatcggcctgcggatgctgttcgccaaaaccgtggccgtgaacttcctgctgaccgccaagctgttcttcctc

SEQ ID NO: 40382 - DNA, 1887 bp, synthetic construct
  source 1..1887: mol_type = other DNA
atggccttaccagtgaccgccttgctcctgccgctggccttgctgctccacgccgccaggccggagatcgtgctgacacagtctcccgccacactgtcactgtctccaggcgaaagagccacactgagctgtagagccagccagagcgtgtcctcttacctggcctggtatcagcagaagcctggacaggctccccggctgctgatctacgatgccagcaatagagccacaggcatccccgccagattttctggctctggcagcggcaccgatttcaccctgaccataagcagcctggaacctgaggacttcgccgtgtactactgccagcagagaagcgactggcccctgacatttggcggcggaacaaaggtggaaatcaaactcgaggagggacagcctaaggccaatcctaccgtgacactgttccctccaagcagcgaagaactccaggccaacaaggccacacttgtgtgcctgatctccgacttctaccctggggctgtgacagtggcttggaaggccgatggatctcctgtgaaagccggcgtggaaaccaccaagccatccaagcagagcaacaacaaatacgccgccagctcctacctgagcctgacacctgagcagtggaagtcccacagatcctacagctgccaagtgacccacgaaggcagcaccgtggaaaagacagtggcccctacagagtgcagcggcagagccgattgcggctttaccagcgagagctaccagcagggcgtgctgagcgcctactacatgtacttgttgctgctgctgaagtccgtggtgtacttcgccatcatcacatgctgcctgctgcggagaaccgccttctgctgcaacggcgagaagtctcgcgccaagagaagcggatctggcgtgaagcagaccctgaatttcgacctgctgaagctggctggcgacgtggaatccaacccaggccctactagtatggactggatttggcgcatccttttccttgtcggcgctgctaccggcgcgcattccttcgaacaagttcagctggttcagagcggagccgaagtgaagaaacctggcagcagcgtgaaggtgtcctgcaaagcaagcggcggcacctttagctcctacgccatccactgggttcgacaggcaccaggacaaggactggaatggatgggcagaatcatccccatcgagggcagagcctactacgcccagaaattccagggcagagtgaccatcaccgccgacgagtctacaagcaccgcctacatggaactgagcagcctgagaagcgaggataccgctgtgtactattgcgccagaggccggtacagctacagatattggttcgactactggggccagggcaccctggttacagtctcttctacgcgtgcctctacaaagggaccctccgtgtttcctctggctcccagcagcaagtctacaagcggaggaacagccgctctgggctgcctggtcaaggattactttcccgagcctgtgaccgtgtcctggaatagcggagcactgacaagcggcgtgcacacctttccagccgtgctgcaaagcagcggcctgtactctctgagcagcgtggtcacagtgcctagctctagcctgggcacccagacctacatctgcaatgtgaaccacaagcctagcaacaccaaggtggacaagagagtggaacccaagagctgtatccccgaggacacattcttcccaagccccgagagcagctgcgacgtgaagctggtggaaaagagcttcgagacagacaccaacctgaacttccagaacctgagcgtgatcggcctgcggatgctgttcgccaaaaccgtggccgtgaacttcctgctgaccgccaagctgttcttcctc

SEQ ID NO: 40383 - DNA, 1887 bp, synthetic construct
  source 1..1887: mol_type = other DNA
atggccttaccagtgaccgccttgctcctgccgctggccttgctgctccacgccgccaggccggagatcgtgctgacacagtctcccgccacactgtcactgtctccaggcgaaagagccacactgagctgtagagccagccagagcgtgtcctcttacctggcctggtatcagcagaagcctggacaggctccccggctgctgatctacgatgccagcaatagagccacaggcatccccgccagattttctggctctggcagcggcaccgatttcaccctgaccataagcagcctggaacctgaggacttcgccgtgtactactgccagcagagaagcaactggcccctgacctttggacagggcaccaaggtggaaatcaaactcgaggagggacagcctaaggccaatcctaccgtgacactgttccctccaagcagcgaagaactccaggccaacaaggccacacttgtgtgcctgatctccgacttctaccctggggctgtgacagtggcttggaaggccgatggatctcctgtgaaagccggcgtggaaaccaccaagccatccaagcagagcaacaacaaatacgccgccagctcctacctgagcctgacacctgagcagtggaagtcccacagatcctacagctgccaagtgacccacgaaggcagcaccgtggaaaagacagtggcccctacagagtgcagcggcagagccgattgcggctttaccagcgagagctaccagcagggcgtgctgagcgcctactacatgtacttgttgctgctgctgaagtccgtggtgtacttcgccatcatcacatgctgcctgctgcggagaaccgccttctgctgcaacggcgagaagtctcgcgccaagagaagcggatctggcgtgaagcagaccctgaatttcgacctgctgaagctggctggcgacgtggaatccaacccaggccctactagtatggactggatttggcgcatccttttccttgtcggcgctgctaccggcgcgcattccttcgaacaagttcagctggttcagagcggagccgaagtgaagaaacctggcagcagcgtgaaggtgtcctgcaaagcaagcggcggcacctttagcacctacgccatccactgggttcgacaggcaccaggacaaggactggaatggatgggcagaatcatccccatcgagggcagagcctactacgcccagaaattccagggcagagtgaccatcaccgccgacgagtctacaagcaccgcctacatggaactgagcagcctgagaagcgaggataccgctgtgtactattgcgccagaggccggtacagctacagatattggttcgactactggggccagggcaccctggttacagtctcttctacgcgtgcctctacaaagggaccctccgtgtttcctctggctcccagcagcaagtctacaagcggaggaacagccgctctgggctgcctggtcaaggattactttcccgagcctgtgaccgtgtcctggaatagcggagcactgacaagcggcgtgcacacctttccagccgtgctgcaaagcagcggcctgtactctctgagcagcgtggtcacagtgcctagctctagcctgggcacccagacctacatctgcaatgtgaaccacaagcctagcaacaccaaggtggacaagagagtggaacccaagagctgtatccccgaggacacattcttcccaagccccgagagcagctgcgacgtgaagctggtggaaaagagcttcgagacagacaccaacctgaacttccagaacctgagcgtgatcggcctgcggatgctgttcgccaaaaccgtggccgtgaacttcctgctgaccgccaagctgttcttcctc

SEQ ID NO: 40384 - DNA, 1929 bp, synthetic construct
  source 1..1929: mol_type = other DNA
atggccttaccagtgaccgccttgctcctgccgctggccttgctgctccacgccgccaggccggacatccagatgacacagagcccctctagcctgtctgccagcgtgggagacagagtgaccatcacctgtagagccagccagagcatcagaaactacctgaactggtatcagcaaaagcccggcaaggcccctgagctgctgattcatgctgcaagcagcctccagagcggcgtgccaagcagattttctggcagcggcagcggaaccgacttcaccctgacaatatctagcctccagcctgaggacttcgccagctactactgccagcagagctacagcgcccctcctatcacctttggacagggcaccagactggaaatcaagctcgaggagggacagcctaaggccaatcctaccgtgacactgttccctccaagcagcgaagaactccaggccaacaaggccacacttgtgtgcctgatctccgacttctaccctggggctgtgacagtggcttggaaggccgatggatctcctgtgaaagccggcgtggaaaccaccaagccatccaagcagagcaacaacaaatacgccgccagctcctacctgagcctgacacctgagcagtggaagtcccacagatcctacagctgccaagtgacccacgaaggcagcaccgtggaaaagacagtggcccctacagagtgcagcggcagagccgattgcggctttaccagcgagagctaccagcagggcgtgctgagcgcctactacatgtacttgttgctgctgctgaagtccgtggtgtacttcgccatcatcacatgctgcctgctgcggagaaccgccttctgctgcaacggcgagaagtctcgcgccaagagaagcggatctggcgtgaagcagaccctgaatttcgacctgctgaagctggctggcgacgtggaatccaacccaggccctactagtatggactggatttggcgcatccttttccttgtcggcgctgctaccggcgcgcattccttcgaacaggttcagctccagcagtctggacctggcctggtcaagcctagccagacactgtctctgacctgtgccatcagcggcgatagcgtgtcctctaatagagccgcctggaactggatcagacagagccctagcagaggactccagtggctgggcagaacctactaccgcagcaagtggtacaacgactacgccgtgtctctgcggagccggatcaccatcaatcccgtgaccagcaagaaccaggtggccctgcacatgaacagcgtgacccctgaagataccgccgtgtactactgtgccagagccggaattgtggtggtgcccggacctgagacattctactactacgaccacggcctggacgtgtggggccagggaacaacagtgactgtctcttctacgcgtgcctctacaaagggaccctccgtgtttcctctggctcccagcagcaagtctacaagcggaggaacagccgctctgggctgcctggtcaaggattactttcccgagcctgtgaccgtgtcctggaatagcggagcactgacaagcggcgtgcacacctttccagccgtgctgcaaagcagcggcctgtactctctgagcagcgtggtcacagtgcctagctctagcctgggcacccagacctacatctgcaatgtgaaccacaagcctagcaacaccaaggtggacaagagagtggaacccaagagctgtatccccgaggacacattcttcccaagccccgagagcagctgcgacgtgaagctggtggaaaagagcttcgagacagacaccaacctgaacttccagaacctgagcgtgatcggcctgcggatgctgttcgccaaaaccgtggccgtgaacttcctgctgaccgccaagctgttcttcctc

SEQ ID NO: 40385 - DNA, 1860 bp, synthetic construct
  source 1..1860: mol_type = other DNA
atggccttaccagtgaccgccttgctcctgccgctggccttgctgctccacgccgccaggccggacatccagctgacacagagccctagcacactgagcgccagcatgggcgacagagtgaccatcacatgtagcgcctctagcagcgtgcggttcatccactggtatcagcagaagcctggcaaggcccctaagcggctgatctacgataccagcaaactggcctctggcgtgcccagcagattttctggctctggcagcggcaccgacttcaccctgacaatatctagcctccagcctgaggacttcgccacctactactgtcagcagtggggcagcagccctttcacctttggacagggcaccaaggtggaaatcaagctcgaggagggacagcctaaggccaatcctaccgtgacactgttccctccaagcagcgaagaactccaggccaacaaggccacacttgtgtgcctgatctccgacttctaccctggggctgtgacagtggcttggaaggccgatggatctcctgtgaaagccggcgtggaaaccaccaagccatccaagcagagcaacaacaaatacgccgccagctcctacctgagcctgacacctgagcagtggaagtcccacagatcctacagctgccaagtgacccacgaaggcagcaccgtggaaaagacagtggcccctacagagtgcagcggcagagccgattgcggctttaccagcgagagctaccagcagggcgtgctgagcgcctactacatgtacttgttgctgctgctgaagtccgtggtgtacttcgccatcatcacatgctgcctgctgcggagaaccgccttctgctgcaacggcgagaagtctcgcgccaagagaagcggatctggcgtgaagcagaccctgaatttcgacctgctgaagctggctggcgacgtggaatccaacccaggccctactagtatggactggatttggcgcatccttttccttgtcggcgctgctaccggcgcgcattccttcgaagtgcagctggttgagtacggtggcggactggttcaacctggcggtagcctgagactgtcttgtgccgccagcggcttcaacatcaaggactactatatccactgggtccgacaggccccaggcaaaggacttgaatgggttgcctggatcgaccccgagaacggcgataccgagttcgtgcccaagtttcagggcagagccaccatgagcgccgacacctctaagaacacagcctacctccagatgaacagcctgagagccgaggacaccgccgtgtactactgtaaaaccggcggcttttggggccagggcacactggtcacagtcagctctacgcgtgcctctacaaagggaccctccgtgtttcctctggctcccagcagcaagtctacaagcggaggaacagccgctctgggctgcctggtcaaggattactttcccgagcctgtgaccgtgtcctggaatagcggagcactgacaagcggcgtgcacacctttccagccgtgctgcaaagcagcggcctgtactctctgagcagcgtggtcacagtgcctagctctagcctgggcacccagacctacatctgcaatgtgaaccacaagcctagcaacaccaaggtggacaagagagtggaacccaagagctgtatccccgaggacacattcttcccaagccccgagagcagctgcgacgtgaagctggtggaaaagagcttcgagacagacaccaacctgaacttccagaacctgagcgtgatcggcctgcggatgctgttcgccaaaaccgtggccgtgaacttcctgctgaccgccaagctgttcttcctctaa

SEQ ID NO: 40386 - DNA, 1875 bp, synthetic construct
  source 1..1875: mol_type = other DNA
atggccttaccagtgaccgccttgctcctgccgctggccttgctgctccacgccgccaggccggacatccagatgacacagagccctagcagcctgtctgccagcgtgggagacagagtgaccatcacatgcaaggccagccaggatgtgggcacagccgtggattggtatcagcagaagcctggcaaggcccctaagctgctgatctactgggccagcacaagacacacaggcgtgcccagcagattttctggcagcggctctggcaccgacttcaccctgacaatatccagcctccagcctgaggacttcgccacctactactgccagcagtacaacagctaccctctgaccttcggccagggcaccaaggtggaaatcaaaagactcgaggagggacagcctaaggccaatcctaccgtgacactgttccctccaagcagcgaagaactccaggccaacaaggccacacttgtgtgcctgatctccgacttctaccctggggctgtgacagtggcttggaaggccgatggatctcctgtgaaagccggcgtggaaaccaccaagccatccaagcagagcaacaacaaatacgccgccagctcctacctgagcctgacacctgagcagtggaagtcccacagatcctacagctgccaagtgacccacgaaggcagcaccgtggaaaagacagtggcccctacagagtgcagcggcagagccgattgcggctttaccagcgagagctaccagcagggcgtgctgagcgcctactacatgtacttgttgctgctgctgaagtccgtggtgtacttcgccatcatcacatgctgcctgctgcggagaaccgccttctgctgcaacggcgagaagtctcgcgccaagagaagcggatctggcgtgaagcagaccctgaatttcgacctgctgaagctggctggcgacgtggaatccaacccaggccctactagtatggactggatttggcgcatccttttccttgtcggcgctgctaccggcgcgcattccttcgaagtgcagctggttgaatcaggtggcggcctggttcaacctggcggatctctgagactgagctgtgccgccagcggctacacctttaccgagtacacaatccactgggtccgacaggcccctggcaaaggacttgagtgggtcgccaacatcaaccccaacaatggcggcaccacctacaaccagaagttcgaggacagattcaccatcagccgggacaacagcaagaacaccctgtacctccagatgaactccctgagagccgaggacaccgccgtgtactattgtgccagaggctggaacttcgactactggggccagggaacactggtcaccgttagctctacgcgtgcctctacaaagggaccctccgtgtttcctctggctcccagcagcaagtctacaagcggaggaacagccgctctgggctgcctggtcaaggattactttcccgagcctgtgaccgtgtcctggaatagcggagcactgacaagcggcgtgcacacctttccagccgtgctgcaaagcagcggcctgtactctctgagcagcgtggtcacagtgcctagctctagcctgggcacccagacctacatctgcaatgtgaaccacaagcctagcaacaccaaggtggacaagagagtggaacccaagagctgtatccccgaggacacattcttcccaagccccgagagcagctgcgacgtgaagctggtggaaaagagcttcgagacagacaccaacctgaacttccagaacctgagcgtgatcggcctgcggatgctgttcgccaaaaccgtggccgtgaacttcctgctgaccgccaagctgttcttcctctaa

SEQ ID NO: 40387 - DNA, 1920 bp, synthetic construct
  source 1..1920: mol_type = other DNA
atggccttaccagtgaccgccttgctcctgccgctggccttgctgctccacgccgccaggccgagctacgtgctgacacagcctccatccgtgtctgtggctccaggacagaccgccagaatcacatgcggcggcaacaacatcggcggcaagagcgtgcactggtatcagcagccacctggacaggctccagtggtggtggtgtacgacgacagcgatagacctagcggcatccccgagagattcagcggcagcaattccggcaataccgccacactgaccatcagcagagtggaagctggcgacgaggccgtgtactactgccaagtgtgggacagcagcagcgatcacgtggtgtttggcggcggaacaaagctgacagtgcttctcgaggagggacagcctaaggccaatcctaccgtgacactgttccctccaagcagcgaagaactccaggccaacaaggccacacttgtgtgcctgatctccgacttctaccctggggctgtgacagtggcttggaaggccgatggatctcctgtgaaagccggcgtggaaaccaccaagccatccaagcagagcaacaacaaatacgccgccagctcctacctgagcctgacacctgagcagtggaagtcccacagatcctacagctgccaagtgacccacgaaggcagcaccgtggaaaagacagtggcccctacagagtgcagcggcagagccgattgcggctttaccagcgagagctaccagcagggcgtgctgagcgcctactacatgtacttgttgctgctgctgaagtccgtggtgtacttcgccatcatcacatgctgcctgctgcggagaaccgccttctgctgcaacggcgagaagtctcgcgccaagagaagcggatctggcgtgaagcagaccctgaatttcgacctgctgaagctggctggcgacgtggaatccaacccaggccctactagtatggactggatttggcgcatccttttccttgtcggcgctgctaccggcgcgcattccttcgaacaactccagctgcaagagtctggccctggcctggtcaagcctagcgaaacactgagcctgacctgtaccgtgtctggcggctctatcagctccagcagctatttctggggctggatcagacaacctcctggcaaaggactggaatggatcggctccatctactacagcggcatcacctactacaaccccagcctgaagtccagagtgaccatctccgtggacaccagcaagaaccagttctccctgaagctgagcagcgtgacagccgccgataccgccgtgtattattgtgccagacatgacggcgctgtggccggcctgtttgattattggggacagggcaccctggtcaccgtgtcatctgctacgcgtgcctctacaaagggaccctccgtgtttcctctggctcccagcagcaagtctacaagcggaggaacagccgctctgggctgcctggtcaaggattactttcccgagcctgtgaccgtgtcctggaatagcggagcactgacaagcggcgtgcacacctttccagccgtgctgcaaagcagcggcctgtactctctgagcagcgtggtcacagtgcctagctctagcctgggcacccagacctacatctgcaatgtgaaccacaagcctagcaacaccaaggtggacaagagagtggaacccaagagctgtgaagtgaaaaccgactccaccgaccacgtgaagcccaaagagacagagaacaccaagcagcccagcaagagctgccacaagcccaaggccatcgtgcacaccgagaaagtgaacatgatgagcctgaccgtgctgggcttcagaatcctgctgctgaaagtggccggctttaacctgctgatgaccctgcggctgtggtccagc

SEQ ID NO: 40388 - DNA, 1917 bp, synthetic construct
  source 1..1917: mol_type = other DNA
atggccttaccagtgaccgccttgctcctgccgctggccttgctgctccacgccgccaggccggacatccagatgacacagagccctagcagcctgtctgccagcgtgggagacagagtgaccatcacatgcaaggccagcgaccacatcaacaactggctggcctggtatcagcagaagcctggacaggcccctaagctgctgatctacggcgctaccacactggaaacaggcgtgcccagcagattttctggcagcggctctggcaccgactacaccctgacaatatccagcctccagcctgaggacttcgccacctactactgtcagcagagctggaacaccccttggacattcggccagggcaccaagctggaaatcaagagactcgaggagggacagcctaaggccaatcctaccgtgacactgttccctccaagcagcgaagaactccaggccaacaaggccacacttgtgtgcctgatctccgacttctaccctggggctgtgacagtggcttggaaggccgatggatctcctgtgaaagccggcgtggaaaccaccaagccatccaagcagagcaacaacaaatacgccgccagctcctacctgagcctgacacctgagcagtggaagtcccacagatcctacagctgccaagtgacccacgaaggcagcaccgtggaaaagacagtggcccctacagagtgcagcggcagagccgattgcggctttaccagcgagagctaccagcagggcgtgctgagcgcctactacatgtacttgttgctgctgctgaagtccgtggtgtacttcgccatcatcacatgctgcctgctgcggagaaccgccttctgctgcaacggcgagaagtctcgcgccaagagaagcggatctggcgtgaagcagaccctgaatttcgacctgctgaagctggctggcgacgtggaatccaacccaggccctactagtatggactggatttggcgcatccttttccttgtcggcgctgctaccggcgcgcattccttcgaacaagttcagcttcaacagcctggcgctgagctggtcaaacctggcgcttctgtgaagatgagctgcaaagccagcggctacaccttcagcagctactggatcaactggatgaagcagaaacccggccagggactcgaatggatcggccaaatctatcccggcgacggcgacaccaactacaacggcaagttcaagggcagagccacactgaccgccgatacctctagcagcacagcctacatgcagctgagcagcctgaccagcgaagatagcgccgtgtacttctgtgcccggtccatcacaacagtcgtgggctgcgctatggactattggggccagggaacaagcgtgaccgtgtctagtacgcgtgcctctacaaagggaccctccgtgtttcctctggctcccagcagcaagtctacaagcggaggaacagccgctctgggctgcctggtcaaggattactttcccgagcctgtgaccgtgtcctggaatagcggagcactgacaagcggcgtgcacacctttccagccgtgctgcaaagcagcggcctgtactctctgagcagcgtggtcacagtgcctagctctagcctgggcacccagacctacatctgcaatgtgaaccacaagcctagcaacaccaaggtggacaagagagtggaacccaagagctgtgaagtgaaaaccgactccaccgaccacgtgaagcccaaagagacagagaacaccaagcagcccagcaagagctgccacaagcccaaggccatcgtgcacaccgagaaagtgaacatgatgagcctgaccgtgctgggcttcagaatcctgctgctgaaagtggccggctttaacctgctgatgaccctgcggctgtggtccagc

SEQ ID NO: 40389 - DNA, 1917 bp, synthetic construct
  source 1..1917: mol_type = other DNA
atggccttaccagtgaccgccttgctcctgccgctggccttgctgctccacgccgccaggccggacatccagatgacacagagccctagcagcctgtctgccagcgtgggagacagagtgaccatcacatgcaaggccagcgaccacatcaacaactggctggcctggtatcagcagaagcctggacaggcccctaagctgctgatctacggcgctaccacactggaaacaggcgtgcccagcagattttctggcagcggctctggcaccgactacaccctgacaatatccagcctccagcctgaggacttcgccacctactactgtcagcagagctggaacaccccttggacattcggccagggcaccaagctggaaatcaagagactcgaggagggacagcctaaggccaatcctaccgtgacactgttccctccaagcagcgaagaactccaggccaacaaggccacacttgtgtgcctgatctccgacttctaccctggggctgtgacagtggcttggaaggccgatggatctcctgtgaaagccggcgtggaaaccaccaagccatccaagcagagcaacaacaaatacgccgccagctcctacctgagcctgacacctgagcagtggaagtcccacagatcctacagctgccaagtgacccacgaaggcagcaccgtggaaaagacagtggcccctacagagtgcagcggcagagccgattgcggctttaccagcgagagctaccagcagggcgtgctgagcgcctactacatgtacttgttgctgctgctgaagtccgtggtgtacttcgccatcatcacatgctgcctgctgcggagaaccgccttctgctgcaacggcgagaagtctcgcgccaagagaagcggatctggcgtgaagcagaccctgaatttcgacctgctgaagctggctggcgacgtggaatccaacccaggccctactagtatggactggatttggcgcatccttttccttgtcggcgctgctaccggcgcgcattccttcgaacaagttcagcttcaacagcctggcgctgagctggtcaaacctggcgcttctgtgaagatgagctgcaaagccagcggctacgccttcagcagctcttggatcaactggatgaagcagaaacccggccagggactcgaatggatcggccaaatctatcccggcgacggcgacaccaactacaacggcaagttcaagggcagagccacactgaccgccgatacctctagcagcacagcctacatgcagctgagcagcctgaccagcgaagatagcgccgtgtacttctgtgcccggtccatcacaacagtcgtgggctgcgctatggactattggggccagggaacaagcgtgaccgtgtctagtacgcgtgcctctacaaagggaccctccgtgtttcctctggctcccagcagcaagtctacaagcggaggaacagccgctctgggctgcctggtcaaggattactttcccgagcctgtgaccgtgtcctggaatagcggagcactgacaagcggcgtgcacacctttccagccgtgctgcaaagcagcggcctgtactctctgagcagcgtggtcacagtgcctagctctagcctgggcacccagacctacatctgcaatgtgaaccacaagcctagcaacaccaaggtggacaagagagtggaacccaagagctgtgaagtgaaaaccgactccaccgaccacgtgaagcccaaagagacagagaacaccaagcagcccagcaagagctgccacaagcccaaggccatcgtgcacaccgagaaagtgaacatgatgagcctgaccgtgctgggcttcagaatcctgctgctgaaagtggccggctttaacctgctgatgaccctgcggctgtggtccagc

SEQ ID NO: 40390 - DNA, 1917 bp, synthetic construct
  source 1..1917: mol_type = other DNA
atggccttaccagtgaccgccttgctcctgccgctggccttgctgctccacgccgccaggccggagatcgtgctgacacagagccctgccaccctgtctctgagccctggcgaaagagccaccctgagctgtagagccagccagagcgtgtccagctacctggcctggtatcagcagaagcccggccaggctccccggctgctgatctacgatgccagcaatagagccaccggcatccccgccagattttccggctctggcagcggcaccgacttcaccctgaccatcagctccctggaacccgaggacttcgccgtgtactactgccagcagcggagcaactggcccatcacattcggccagggcacccggctggaaatcaaactcgaggagggacagcctaaggccaatcctaccgtgacactgttccctccaagcagcgaagaactccaggccaacaaggccacacttgtgtgcctgatctccgacttctaccctggggctgtgacagtggcttggaaggccgatggatctcctgtgaaagccggcgtggaaaccaccaagccatccaagcagagcaacaacaaatacgccgccagctcctacctgagcctgacacctgagcagtggaagtcccacagatcctacagctgccaagtgacccacgaaggcagcaccgtggaaaagacagtggcccctacagagtgcagcggcagagccgattgcggctttaccagcgagagctaccagcagggcgtgctgagcgcctactacatgtacttgttgctgctgctgaagtccgtggtgtacttcgccatcatcacatgctgcctgctgcggagaaccgccttctgctgcaacggcgagaagtctcgcgccaagagaagcggatctggcgtgaagcagaccctgaatttcgacctgctgaagctggctggcgacgtggaatccaacccaggccctactagtatggactggatttggcgcatccttttccttgtcggcgctgctaccggcgcgcattccttcgaagaagtgcagctggtggaatcaggcggcggactggtgcagcctggcagaagcctgagactgagctgtgccgccagcggcttcaccttcaacgactacgccatgcactgggtgcgccaggcccctggaaaaggactggaatgggtgtccacaatcagctggaacagcggcagcatcggctacgccgatagcgtgaagggccggttcaccatcagccgggacaacgccaagaagtccctgtacctccagatgaacagcctgcgggccgaggacacagccctgtactattgcgccaaggacatccagtacggcaactactactacggcatggacgtgtggggccagggaaccaccgtgaccgtgtcatctacgcgtgcctctacaaagggaccctccgtgtttcctctggctcccagcagcaagtctacaagcggaggaacagccgctctgggctgcctggtcaaggattactttcccgagcctgtgaccgtgtcctggaatagcggagcactgacaagcggcgtgcacacctttccagccgtgctgcaaagcagcggcctgtactctctgagcagcgtggtcacagtgcctagctctagcctgggcacccagacctacatctgcaatgtgaaccacaagcctagcaacaccaaggtggacaagagagtggaacccaagagctgtgaagtgaaaaccgactccaccgaccacgtgaagcccaaagagacagagaacaccaagcagcccagcaagagctgccacaagcccaaggccatcgtgcacaccgagaaagtgaacatgatgagcctgaccgtgctgggcttcagaatcctgctgctgaaagtggccggctttaacctgctgatgaccctgcggctgtggtccagc

SEQ ID NO: 40391 - DNA, 1926 bp, synthetic construct
  source 1..1926: mol_type = other DNA
atggccttaccagtgaccgccttgctcctgccgctggccttgctgctccacgccgccaggccgatccagatgacccagagccccagcagcctgtctgccagcgtgggcgacagagtgaccatcacctgtcggagcagccagagcatcgtgcactccgtgggcaacaccttcctggaatggtatcagcagaagcccggcaaggcccccaagctgctgatctacaaggtgtccaacagattcagcggcgtgcccagcaggtttagcggctctggcagcggcaccgacttcaccctgaccatctctagcctccagcccgaggacttcgccacctactactgttttcaaggcagccagttcccctacaccttcggccagggaacaaaggtggaaatcaagcggctcgaggagggacagcctaaggccaatcctaccgtgacactgttccctccaagcagcgaagaactccaggccaacaaggccacacttgtgtgcctgatctccgacttctaccctggggctgtgacagtggcttggaaggccgatggatctcctgtgaaagccggcgtggaaaccaccaagccatccaagcagagcaacaacaaatacgccgccagctcctacctgagcctgacacctgagcagtggaagtcccacagatcctacagctgccaagtgacccacgaaggcagcaccgtggaaaagacagtggcccctacagagtgcagcggcagagccgattgcggctttaccagcgagagctaccagcagggcgtgctgagcgcctactacatgtacttgttgctgctgctgaagtccgtggtgtacttcgccatcatcacatgctgcctgctgcggagaaccgccttctgctgcaacggcgagaagtctcgcgccaagagaagcggatctggcgtgaagcagaccctgaatttcgacctgctgaagctggctggcgacgtggaatccaacccaggccctactagtatggactggatttggcgcatccttttccttgtcggcgctgctaccggcgcgcattccttcgaagaagtgcaactggtggaaagcggaggcggcctggtgcagcctggcggatctctgagactgagctgtgccgccagcggctacgagttcagccggtcctggatgaactgggtgcgccaggcccctggcaagggactggaatgggtgggaagaatctaccccggcgacggcgacaccaactacagcggcaagttcaagggccggttcaccatcagcgccgacaccagcaagaacaccgcctacctccagatgaacagcctgcgggccgaggataccgccgtgtactactgtgccagagatggcagctcctgggactggtacttcgacgtgtggggacagggaacccttgtgaccgtgtccagcacgcgtgcctctacaaagggaccctccgtgtttcctctggctcccagcagcaagtctacaagcggaggaacagccgctctgggctgcctggtcaaggattactttcccgagcctgtgaccgtgtcctggaatagcggagcactgacaagcggcgtgcacacctttccagccgtgctgcaaagcagcggcctgtactctctgagcagcgtggtcacagtgcctagctctagcctgggcacccagacctacatctgcaatgtgaaccacaagcctagcaacaccaaggtggacaagagagtggaacccaagagctgtgaagtgaaaaccgactccaccgaccacgtgaagcccaaagagacagagaacaccaagcagcccagcaagagctgccacaagcccaaggccatcgtgcacaccgagaaagtgaacatgatgagcctgaccgtgctgggcttcagaatcctgctgctgaaagtggccggctttaacctgctgatgaccctgcggctgtggtccagc

SEQ ID NO: 40392 - DNA, 1938 bp, synthetic construct
  source 1..1938: mol_type = other DNA
atggccttaccagtgaccgccttgctcctgccgctggccttgctgctccacgccgccaggccggaactgcaaagcgtgctgacacagcctcctagcgcctctggaacacctggacagagagtgacaatcagctgctccggcagctccagcaacatcggcagcaactacgtgaactggtatcagcagctgcctggcacagcccctaaactgctgatctacggcgactaccagaggccaagcggcgtgccagatagattcagcggcagcaagtctggcacaagcgccagcctggctatctctggactgagaagcgaggacgaggccgactactactgtgccaccagagatgatagcctgagcggcagcgtggtgtttggcacaggcacaaagctgacagtgctgggcctcgaggagggacagcctaaggccaatcctaccgtgacactgttccctccaagcagcgaagaactccaggccaacaaggccacacttgtgtgcctgatctccgacttctaccctggggctgtgacagtggcttggaaggccgatggatctcctgtgaaagccggcgtggaaaccaccaagccatccaagcagagcaacaacaaatacgccgccagctcctacctgagcctgacacctgagcagtggaagtcccacagatcctacagctgccaagtgacccacgaaggcagcaccgtggaaaagacagtggcccctacagagtgcagcggcagagccgattgcggctttaccagcgagagctaccagcagggcgtgctgagcgcctactacatgtacttgttgctgctgctgaagtccgtggtgtacttcgccatcatcacatgctgcctgctgcggagaaccgccttctgctgcaacggcgagaagtctcgcgccaagagaagcggatctggcgtgaagcagaccctgaatttcgacctgctgaagctggctggcgacgtggaatccaacccaggccctactagtatggactggatttggcgcatccttttccttgtcggcgctgctaccggcgcgcattccttcgaagaagttcagctggttcagagcggagccgaagtgaagaagcctggcgagagcctgaagattagctgcaaaggcagcggctacggcttcaccagctattggatcggctgggtccgacagatgcctggcaaaggactggaatggatgggcatcattcaccccgacgacagcgacaccaagtacagccctagcttccagggccaagtgaccatcagcgccgacaagagcatcagcacagcctacctccagtggtcctctctgaaggccagcgataccgccatgtactactgcgccagcagctacctgagaggactgtggggcggctacttcgatttttggggccagggcacactggtcaccgttagttctacgcgtgcctctacaaagggaccctccgtgtttcctctggctcccagcagcaagtctacaagcggaggaacagccgctctgggctgcctggtcaaggattactttcccgagcctgtgaccgtgtcctggaatagcggagcactgacaagcggcgtgcacacctttccagccgtgctgcaaagcagcggcctgtactctctgagcagcgtggtcacagtgcctagctctagcctgggcacccagacctacatctgcaatgtgaaccacaagcctagcaacaccaaggtggacaagagagtggaacccaagagctgtgaagtgaaaaccgactccaccgaccacgtgaagcccaaagagacagagaacaccaagcagcccagcaagagctgccacaagcccaaggccatcgtgcacaccgagaaagtgaacatgatgagcctgaccgtgctgggcttcagaatcctgctgctgaaagtggccggctttaacctgctgatgaccctgcggctgtggtccagc

SEQ ID NO: 40393 - DNA, 1929 bp, synthetic construct
  source 1..1929: mol_type = other DNA
atggccttaccagtgaccgccttgctcctgccgctggccttgctgctccacgccgccaggccggacttcgtgatgacacagagccctgatagcctggccgtgtctctcggcgagcgagtgaccatgagctgcaagtctagccagagcctgctgaacagcggcaaccagaagaactacctgacctggtatcagcagaagcccggccagcctcctaagctgctgatctactgggccagcaccagagaaagcggcgtgcccgatagattttctggctctggcagcggcaccgacttcaccctgacaatttctagcctgcaagccgaggacgtggccgtgtactactgccagaacgactacagctacccctacaccttcggccagggcaccaagctggaaatcaaactcgaggagggacagcctaaggccaatcctaccgtgacactgttccctccaagcagcgaagaactccaggccaacaaggccacacttgtgtgcctgatctccgacttctaccctggggctgtgacagtggcttggaaggccgatggatctcctgtgaaagccggcgtggaaaccaccaagccatccaagcagagcaacaacaaatacgccgccagctcctacctgagcctgacacctgagcagtggaagtcccacagatcctacagctgccaagtgacccacgaaggcagcaccgtggaaaagacagtggcccctacagagtgcagcggcagagccgattgcggctttaccagcgagagctaccagcagggcgtgctgagcgcctactacatgtacttgttgctgctgctgaagtccgtggtgtacttcgccatcatcacatgctgcctgctgcggagaaccgccttctgctgcaacggcgagaagtctcgcgccaagagaagcggatctggcgtgaagcagaccctgaatttcgacctgctgaagctggctggcgacgtggaatccaacccaggccctactagtatggactggatttggcgcatccttttccttgtcggcgctgctaccggcgcgcattccttcgaagaagtgcaactggttcagagcggagccgagctgaagaaacctggggccagcgtgaaggtgtcctgtaaagccagcggctacacctttaccgactactacatgaaatgggtccgacaggccccaggccagggactcgaatggatcggcgatattatccccagcaacggggccaccttctacaaccagaaattcaagggccgcgtgaccatcaccgtggacaagagcacaagcaccgcctacatggaactgagcagcctgagaagcgaggacaccgccgtgtattattgcgccagaagccatctgctgcgggccagttggttcgcctattggggacagggaaccctggtcaccgttagctctacgcgtgcctctacaaagggaccctccgtgtttcctctggctcccagcagcaagtctacaagcggaggaacagccgctctgggctgcctggtcaaggattactttcccgagcctgtgaccgtgtcctggaatagcggagcactgacaagcggcgtgcacacctttccagccgtgctgcaaagcagcggcctgtactctctgagcagcgtggtcacagtgcctagctctagcctgggcacccagacctacatctgcaatgtgaaccacaagcctagcaacaccaaggtggacaagagagtggaacccaagagctgtgaagtgaaaaccgactccaccgaccacgtgaagcccaaagagacagagaacaccaagcagcccagcaagagctgccacaagcccaaggccatcgtgcacaccgagaaagtgaacatgatgagcctgaccgtgctgggcttcagaatcctgctgctgaaagtggccggctttaacctgctgatgaccctgcggctgtggtccagc

SEQ ID NO: 40394 - DNA, 1935 bp, synthetic construct
  source 1..1935: mol_type = other DNA
atggccttaccagtgaccgccttgctcctgccgctggccttgctgctccacgccgccaggccggagatcgtgctgacacagtctcccgccacactgtcactgtctccaggcgaaagagccacactgagctgtagcgtgtccagcagcatcagcagcagcaacctgcactggtatcagcagaagcctggacaggcccctcggctgctgatctacgccacatctaatctggcctctggcatccccgccagattttctggctctggaagcggcaccgacttcaccctgaccataagcagcctggaacctgaggacttcgccgtgtactactgccagcagtggtccagctatccccacacatttggcggaggcaccaaggtggaaatcaagagactcgaggagggacagcctaaggccaatcctaccgtgacactgttccctccaagcagcgaagaactccaggccaacaaggccacacttgtgtgcctgatctccgacttctaccctggggctgtgacagtggcttggaaggccgatggatctcctgtgaaagccggcgtggaaaccaccaagccatccaagcagagcaacaacaaatacgccgccagctcctacctgagcctgacacctgagcagtggaagtcccacagatcctacagctgccaagtgacccacgaaggcagcaccgtggaaaagacagtggcccctacagagtgcagcggcagagccgattgcggctttaccagcgagagctaccagcagggcgtgctgagcgcctactacatgtacttgttgctgctgctgaagtccgtggtgtacttcgccatcatcacatgctgcctgctgcggagaaccgccttctgctgcaacggcgagaagtctcgcgccaagagaagcggatctggcgtgaagcagaccctgaatttcgacctgctgaagctggctggcgacgtggaatccaacccaggccctactagtatggactggatttggcgcatccttttccttgtcggcgctgctaccggcgcgcattccttcgaacaggttcagctggttcagagcggagccgaagtgaagaaacctggggcctctgtgaaggtgtcctgcaaggcttccggctacacctttaccaactacctgatcgagtgggtccgacaggctccaggacaaggactggaatggatgggcctgattaaccctggcagcggcggcaccaactacaacgagaagttcaagggcagagtgaccatgaccaccgacaccagcacaagcaccgcctacatggaactgcggagcctgagaagcgacgacaccgccgtgtattattgcgccagaagaagccctctcggctcttggatctactacgcctatgacggcgtggcctattggggccagggaacactggttacagtgtcctctacgcgtgcctctacaaagggaccctccgtgtttcctctggctcccagcagcaagtctacaagcggaggaacagccgctctgggctgcctggtcaaggattactttcccgagcctgtgaccgtgtcctggaatagcggagcactgacaagcggcgtgcacacctttccagccgtgctgcaaagcagcggcctgtactctctgagcagcgtggtcacagtgcctagctctagcctgggcacccagacctacatctgcaatgtgaaccacaagcctagcaacaccaaggtggacaagagagtggaacccaagagctgtgaagtgaaaaccgactccaccgaccacgtgaagcccaaagagacagagaacaccaagcagcccagcaagagctgccacaagcccaaggccatcgtgcacaccgagaaagtgaacatgatgagcctgaccgtgctgggcttcagaatcctgctgctgaaagtggccggctttaacctgctgatgaccctgcggctgtggtccagc

SEQ ID NO: 40395 - DNA, 1902 bp, synthetic construct
  source 1..1902: mol_type = other DNA
atggccttaccagtgaccgccttgctcctgccgctggccttgctgctccacgccgccaggccgcagatcgtgctgacacagagccccgccatcatgtctgttagccctggcgagaaagtgaccatgacctgtagcgccagcagcagcgtgaactacatgcactggttccagcagaagcccggcacaagccctaagctgtgggtgtacagcaccagcaatctggcctctggcgtgccagccagattttctggctctggcagcggcaccagctacagcctgacaatcagcagcatggaagccgaggatgccgccacctactattgtcagcagcggagcatctacccaccttggacatttggcggaggcaccaagctggaaatcaaactcgaggagggacagcctaaggccaatcctaccgtgacactgttccctccaagcagcgaagaactccaggccaacaaggccacacttgtgtgcctgatctccgacttctaccctggggctgtgacagtggcttggaaggccgatggatctcctgtgaaagccggcgtggaaaccaccaagccatccaagcagagcaacaacaaatacgccgccagctcctacctgagcctgacacctgagcagtggaagtcccacagatcctacagctgccaagtgacccacgaaggcagcaccgtggaaaagacagtggcccctacagagtgcagcggcagagccgattgcggctttaccagcgagagctaccagcagggcgtgctgagcgcctactacatgtacttgttgctgctgctgaagtccgtggtgtacttcgccatcatcacatgctgcctgctgcggagaaccgccttctgctgcaacggcgagaagtctcgcgccaagagaagcggatctggcgtgaagcagaccctgaatttcgacctgctgaagctggctggcgacgtggaatccaacccaggccctactagtatggactggatttggcgcatccttttccttgtcggcgctgctaccggcgcgcattccttcgaagaagttcagctccagcagagcggccctgagcttgtgaaacctggcgcttccgtgaagatcagctgcaaggccagcggctacagcttcaccggctacaccatgaactgggtcaagcagtcccacggcaagaacctggaatggatcggcctgattaacccctacaacggcggcacctcctacaaccagaagttcaaggccaaggccacactgaccgtggacaagagcagcagcacagcctacatgcagctgaagtccctgaccagcgaggacagcgccgtgtactactgcgccagagattacggctacgtgctggactattggggccagggcacaagcgtgacagtgtctagtacgcgtgcctctacaaagggaccctccgtgtttcctctggctcccagcagcaagtctacaagcggaggaacagccgctctgggctgcctggtcaaggattactttcccgagcctgtgaccgtgtcctggaatagcggagcactgacaagcggcgtgcacacctttccagccgtgctgcaaagcagcggcctgtactctctgagcagcgtggtcacagtgcctagctctagcctgggcacccagacctacatctgcaatgtgaaccacaagcctagcaacaccaaggtggacaagagagtggaacccaagagctgtgaagtgaaaaccgactccaccgaccacgtgaagcccaaagagacagagaacaccaagcagcccagcaagagctgccacaagcccaaggccatcgtgcacaccgagaaagtgaacatgatgagcctgaccgtgctgggcttcagaatcctgctgctgaaagtggccggctttaacctgctgatgaccctgcggctgtggtccagc

SEQ ID NO: 40396 - DNA, 1908 bp, synthetic construct
  source 1..1908: mol_type = other DNA
atggccttaccagtgaccgccttgctcctgccgctggccttgctgctccacgccgccaggccggacatcgtgatgacccagagccctgccaccctgtccgtgtctccaggcgaaagagccaccctgagctgcagagcttcccagagcgtgtccaacgacgtcgtgtggtatcagcagaagcccggccaggcccccagactgctgatctactacgccagcaacagatacaccggcatccccgccagattcagcggctctggcagcggcaccgagttcaccctgacaatcagcagcctccagagcgaggacttcgccgtgtactactgtcagcaggactacaccagcccctggaccttcggccagggcaccaagctggaaatcaagagactcgaggagggacagcctaaggccaatcctaccgtgacactgttccctccaagcagcgaagaactccaggccaacaaggccacacttgtgtgcctgatctccgacttctaccctggggctgtgacagtggcttggaaggccgatggatctcctgtgaaagccggcgtggaaaccaccaagccatccaagcagagcaacaacaaatacgccgccagctcctacctgagcctgacacctgagcagtggaagtcccacagatcctacagctgccaagtgacccacgaaggcagcaccgtggaaaagacagtggcccctacagagtgcagcggcagagccgattgcggctttaccagcgagagctaccagcagggcgtgctgagcgcctactacatgtacttgttgctgctgctgaagtccgtggtgtacttcgccatcatcacatgctgcctgctgcggagaaccgccttctgctgcaacggcgagaagtctcgcgccaagagaagcggatctggcgtgaagcagaccctgaatttcgacctgctgaagctggctggcgacgtggaatccaacccaggccctactagtatggactggatttggcgcatccttttccttgtcggcgctgctaccggcgcgcattccttcgaagaggtgcaactggtgcagagcggagccgaagtgaagaaacctggggccagcgtgcgggtgtcctgcaaggccagcggctacacctttaccaactacggcatgaactgggtgcgccaggctcctggacagggcctggaatggatgggctggatcaacacctacaccggcgagcccacctacgccgacgacttcaagggcagagtgaccatgaccaccgacaccagcacctccaccgcctacatggaactgcggagcctgagaagcgacgacaccgccgtgtattattgcgcccggatcggcgacagcagccccagcgattattggggccagggaaccctcgtgaccgtgtcctctacgcgtgcctctacaaagggaccctccgtgtttcctctggctcccagcagcaagtctacaagcggaggaacagccgctctgggctgcctggtcaaggattactttcccgagcctgtgaccgtgtcctggaatagcggagcactgacaagcggcgtgcacacctttccagccgtgctgcaaagcagcggcctgtactctctgagcagcgtggtcacagtgcctagctctagcctgggcacccagacctacatctgcaatgtgaaccacaagcctagcaacaccaaggtggacaagagagtggaacccaagagctgtgaagtgaaaaccgactccaccgaccacgtgaagcccaaagagacagagaacaccaagcagcccagcaagagctgccacaagcccaaggccatcgtgcacaccgagaaagtgaacatgatgagcctgaccgtgctgggcttcagaatcctgctgctgaaagtggccggctttaacctgctgatgaccctgcggctgtggtccagc

SEQ ID NO: 40397 - DNA, 1914 bp, synthetic construct
  source 1..1914: mol_type = other DNA
atggccttaccagtgaccgccttgctcctgccgctggccttgctgctccacgccgccaggccggacatccagatgacacagagccctagcagcctgtctgccagcgtgggagacagagtgaccatcacctgtagagccagccaggacgtgcggaacatcgtcgtgtggttccagcagaagcctggcaaggcccctaagctgctgatctacagcggcagctacagatacagcggcgtgcccagcagattttccggctctggctctggcaccgacttcaccctgacaatatccagcctccagcctgaggacttcgccacctactactgccagcagcactacagccctccatacacattcggccagggcaccaaggtggaaatcaagagactcgaggagggacagcctaaggccaatcctaccgtgacactgttccctccaagcagcgaagaactccaggccaacaaggccacacttgtgtgcctgatctccgacttctaccctggggctgtgacagtggcttggaaggccgatggatctcctgtgaaagccggcgtggaaaccaccaagccatccaagcagagcaacaacaaatacgccgccagctcctacctgagcctgacacctgagcagtggaagtcccacagatcctacagctgccaagtgacccacgaaggcagcaccgtggaaaagacagtggcccctacagagtgcagcggcagagccgattgcggctttaccagcgagagctaccagcagggcgtgctgagcgcctactacatgtacttgttgctgctgctgaagtccgtggtgtacttcgccatcatcacatgctgcctgctgcggagaaccgccttctgctgcaacggcgagaagtctcgcgccaagagaagcggatctggcgtgaagcagaccctgaatttcgacctgctgaagctggctggcgacgtggaatccaacccaggccctactagtatggactggatttggcgcatccttttccttgtcggcgctgctaccggcgcgcattccttcgaagaagttcagctggtggaatctggccctggcctggtcaagcctagcgagacactgagcctgacctgtaccgtgtccggcttcagcctgaccagatttggcgtgcactgggtccgacagccacctggcaaaggactggaatggctgggagtgatttggagaggcggcagcaccgattacaacgccgccttcatgagccggctgaccatcagcaaggacaacagcaagaaccaggtgtccctgaagctgagcagcgtgacagccgctgataccgccgtgtactactgctccaaccactactacggcagctccgactacgccctggataattggggccagggaaccctggtcaccgtgtcatctacgcgtgcctctacaaagggaccctccgtgtttcctctggctcccagcagcaagtctacaagcggaggaacagccgctctgggctgcctggtcaaggattactttcccgagcctgtgaccgtgtcctggaatagcggagcactgacaagcggcgtgcacacctttccagccgtgctgcaaagcagcggcctgtactctctgagcagcgtggtcacagtgcctagctctagcctgggcacccagacctacatctgcaatgtgaaccacaagcctagcaacaccaaggtggacaagagagtggaacccaagagctgtgaagtgaaaaccgactccaccgaccacgtgaagcccaaagagacagagaacaccaagcagcccagcaagagctgccacaagcccaaggccatcgtgcacaccgagaaagtgaacatgatgagcctgaccgtgctgggcttcagaatcctgctgctgaaagtggccggctttaacctgctgatgaccctgcggctgtggtccagc

SEQ ID NO: 40398 - DNA, 1920 bp, synthetic construct
  source 1..1920: mol_type = other DNA
atggccttaccagtgaccgccttgctcctgccgctggccttgctgctccacgccgccaggccggacatcgtgctgacccagagccctctgagcctggccgtgtctctgggacagcctgccatcatcagctgtagggccagccagagcgtgtcctttgccggcacctctctgatgcactggtatcaccagaagcccggccagcagcccagactgctgatctacagagccagcaacctggaagccggcgtgcccgatagattttccggcagcggcagcaagaccgacttcaccctgaccatcagccccgtggaagccgaagatgccgccacctactactgccagcagagcagagagtacccctacaccttcggcggaggcaccaagctggaaatcaagaggctcgaggagggacagcctaaggccaatcctaccgtgacactgttccctccaagcagcgaagaactccaggccaacaaggccacacttgtgtgcctgatctccgacttctaccctggggctgtgacagtggcttggaaggccgatggatctcctgtgaaagccggcgtggaaaccaccaagccatccaagcagagcaacaacaaatacgccgccagctcctacctgagcctgacacctgagcagtggaagtcccacagatcctacagctgccaagtgacccacgaaggcagcaccgtggaaaagacagtggcccctacagagtgcagcggcagagccgattgcggctttaccagcgagagctaccagcagggcgtgctgagcgcctactacatgtacttgttgctgctgctgaagtccgtggtgtacttcgccatcatcacatgctgcctgctgcggagaaccgccttctgctgcaacggcgagaagtctcgcgccaagagaagcggatctggcgtgaagcagaccctgaatttcgacctgctgaagctggctggcgacgtggaatccaacccaggccctactagtatggactggatttggcgcatccttttccttgtcggcgctgctaccggcgcgcattccttcgaacaggtccaactggtgcagagcggagccgaggtcgtgaagcctggcgcttccgtgaagattagctgcaaagccagcggctacacctttaccggctactttatgcactgggtcaagcagagccctggccagagcctggaatggatcggcagaatccacccctacgacggcgacaccttctacaaccagaagttccagggcaaggccaccctgacagtggacaagagcagcaacaccgcccacatggaactgctgagcctgaccagcgaggacttcgccgtgtactactgcaccagatacgacggcagccgggctatggactattggggccagggcaccaccgtgaccgtgtctagtacgcgtgcctctacaaagggaccctccgtgtttcctctggctcccagcagcaagtctacaagcggaggaacagccgctctgggctgcctggtcaaggattactttcccgagcctgtgaccgtgtcctggaatagcggagcactgacaagcggcgtgcacacctttccagccgtgctgcaaagcagcggcctgtactctctgagcagcgtggtcacagtgcctagctctagcctgggcacccagacctacatctgcaatgtgaaccacaagcctagcaacaccaaggtggacaagagagtggaacccaagagctgtgaagtgaaaaccgactccaccgaccacgtgaagcccaaagagacagagaacaccaagcagcccagcaagagctgccacaagcccaaggccatcgtgcacaccgagaaagtgaacatgatgagcctgaccgtgctgggcttcagaatcctgctgctgaaagtggccggctttaacctgctgatgaccctgcggctgtggtccagc

SEQ ID NO: 40399 - DNA, 1902 bp, synthetic construct
  source 1..1902: mol_type = other DNA
atggccttaccagtgaccgccttgctcctgccgctggccttgctgctccacgccgccaggccggacatccagatgacacagagccctagcagcctgtctgccagcgtgggagacagagtgaccatcacatgcaaggccagccagagcgtgtccaacgacgtgacctggtatcagcagaagcctggacaggcccctaagctgctgatctacagcgccagcaacagatacagcggagtgcccgccagattttccggctctggctacggcaccgagttcacctttaccatcagcagcgtgcagagcgaggacttcgccgtgtacttctgccagcaagactacagcagcttcggccagggcaccaagctggaaatcaagagactcgaggagggacagcctaaggccaatcctaccgtgacactgttccctccaagcagcgaagaactccaggccaacaaggccacacttgtgtgcctgatctccgacttctaccctggggctgtgacagtggcttggaaggccgatggatctcctgtgaaagccggcgtggaaaccaccaagccatccaagcagagcaacaacaaatacgccgccagctcctacctgagcctgacacctgagcagtggaagtcccacagatcctacagctgccaagtgacccacgaaggcagcaccgtggaaaagacagtggcccctacagagtgcagcggcagagccgattgcggctttaccagcgagagctaccagcagggcgtgctgagcgcctactacatgtacttgttgctgctgctgaagtccgtggtgtacttcgccatcatcacatgctgcctgctgcggagaaccgccttctgctgcaacggcgagaagtctcgcgccaagagaagcggatctggcgtgaagcagaccctgaatttcgacctgctgaagctggctggcgacgtggaatccaacccaggccctactagtatggactggatttggcgcatccttttccttgtcggcgctgctaccggcgcgcattccttcgaacaggtgcagctggtggaatctggacctggcgtggtgcagcctggcagaagcctgagaatcagctgtgccgtgtccggcttcagcgtgaccaactacggcgtgcactgggtgcgccagccacctggaaaaggactggaatggctgggcgtgatctgggctggcggcatcaccaactacaacagcgccttcatgtcccggctgaccatctccaaggacaacagcaagaacaccgtgtacctccagatgaacagcctgcgggccgaggacaccgccatgtactactgtgcttccagaggcggccactacggctacgccctggattattggggccagggaaccctcgtgaccgtgtcctctacgcgtgcctctacaaagggaccctccgtgtttcctctggctcccagcagcaagtctacaagcggaggaacagccgctctgggctgcctggtcaaggattactttcccgagcctgtgaccgtgtcctggaatagcggagcactgacaagcggcgtgcacacctttccagccgtgctgcaaagcagcggcctgtactctctgagcagcgtggtcacagtgcctagctctagcctgggcacccagacctacatctgcaatgtgaaccacaagcctagcaacaccaaggtggacaagagagtggaacccaagagctgtgaagtgaaaaccgactccaccgaccacgtgaagcccaaagagacagagaacaccaagcagcccagcaagagctgccacaagcccaaggccatcgtgcacaccgagaaagtgaacatgatgagcctgaccgtgctgggcttcagaatcctgctgctgaaagtggccggctttaacctgctgatgaccctgcggctgtggtccagc

SEQ ID NO: 40400 - DNA, 1914 bp, synthetic construct
  source 1..1914: mol_type = other DNA
atggccttaccagtgaccgccttgctcctgccgctggccttgctgctccacgccgccaggccggagaacgtgctgacacagagccctgccatcatgagtgcctctccaggcgagaaagtgaccatgacctgtagagccagcagcagcgtgtccagcagctacctgcactggtatcagcagaagtccggcgcaagccccaaagtgtggatctacagcaccagcaatctggcctctggcgtgccaggcagattttctggctctggcagcggcacaagctacagcctgacaatcagctccgtggaagccgaagatgccgccacctactactgccagcagtacagcggctaccccatcacatttggagccggcaccaaggtggaagtgaagagactcgaggagggacagcctaaggccaatcctaccgtgacactgttccctccaagcagcgaagaactccaggccaacaaggccacacttgtgtgcctgatctccgacttctaccctggggctgtgacagtggcttggaaggccgatggatctcctgtgaaagccggcgtggaaaccaccaagccatccaagcagagcaacaacaaatacgccgccagctcctacctgagcctgacacctgagcagtggaagtcccacagatcctacagctgccaagtgacccacgaaggcagcaccgtggaaaagacagtggcccctacagagtgcagcggcagagccgattgcggctttaccagcgagagctaccagcagggcgtgctgagcgcctactacatgtacttgttgctgctgctgaagtccgtggtgtacttcgccatcatcacatgctgcctgctgcggagaaccgccttctgctgcaacggcgagaagtctcgcgccaagagaagcggatctggcgtgaagcagaccctgaatttcgacctgctgaagctggctggcgacgtggaatccaacccaggccctactagtatggactggatttggcgcatccttttccttgtcggcgctgctaccggcgcgcattccttcgaacaggttcagctcaaagaatctggccccgtgctggtggccccaagccagacactgtctatcacctgtaccgtgtccggcttcagcctggcctcctacaacatccactgggtccgacagcctccaggcaaaggactggaatggctgggagtgatttgggctggcggcagcaccaactacaacagcgcactgatgagccggctgagcatcagcaaggacaacagcaagagccaggtgttcctccagatgaactccctccagaccgacgacaccgccatgtactactgcgccaagagaagcgacgactacagttggttcgcctactggggccagggcacactggttactgtgtctgcttctacgcgtgcctctacaaagggaccctccgtgtttcctctggctcccagcagcaagtctacaagcggaggaacagccgctctgggctgcctggtcaaggattactttcccgagcctgtgaccgtgtcctggaatagcggagcactgacaagcggcgtgcacacctttccagccgtgctgcaaagcagcggcctgtactctctgagcagcgtggtcacagtgcctagctctagcctgggcacccagacctacatctgcaatgtgaaccacaagcctagcaacaccaaggtggacaagagagtggaacccaagagctgtgaagtgaaaaccgactccaccgaccacgtgaagcccaaagagacagagaacaccaagcagcccagcaagagctgccacaagcccaaggccatcgtgcacaccgagaaagtgaacatgatgagcctgaccgtgctgggcttcagaatcctgctgctgaaagtggccggctttaacctgctgatgaccctgcggctgtggtccagc

SEQ ID NO: 40401 - DNA, 1926 bp, synthetic construct
  source 1..1926: mol_type = other DNA
atggccttaccagtgaccgccttgctcctgccgctggccttgctgctccacgccgccaggccggagatcgtgctgacacagtctcccgccacactgtcactgtctccaggcgaaagagccacactgagctgtagagccagccagagcgtgtcctcttacctggcctggtatcagcagaagcctggacaggctccccggctgctgatctacgatgccagcaatagagccacaggcatccccgccagattttctggctctggcagcggcaccgatttcaccctgaccataagcagcctggaacctgaggacttcgccgtgtactactgccagcagagaagcaactggcctcctacattcggccagggcaccaaggtggaaatcaaactcgaggagggacagcctaaggccaatcctaccgtgacactgttccctccaagcagcgaagaactccaggccaacaaggccacacttgtgtgcctgatctccgacttctaccctggggctgtgacagtggcttggaaggccgatggatctcctgtgaaagccggcgtggaaaccaccaagccatccaagcagagcaacaacaaatacgccgccagctcctacctgagcctgacacctgagcagtggaagtcccacagatcctacagctgccaagtgacccacgaaggcagcaccgtggaaaagacagtggcccctacagagtgcagcggcagagccgattgcggctttaccagcgagagctaccagcagggcgtgctgagcgcctactacatgtacttgttgctgctgctgaagtccgtggtgtacttcgccatcatcacatgctgcctgctgcggagaaccgccttctgctgcaacggcgagaagtctcgcgccaagagaagcggatctggcgtgaagcagaccctgaatttcgacctgctgaagctggctggcgacgtggaatccaacccaggccctactagtatggactggatttggcgcatccttttccttgtcggcgctgctaccggcgcgcattccttcgaacaactccagctgcaagagtctggccccggactggtcaagcctagcgaaacactgagcctgacctgtaccgtgtctggcggcagcatcagcagcagctcttattggtggggctggaccagacagcctcctggcagaggactggaatggatcggcaccatgtactacagcggcaacatctactacaaccccagcctccagagccgggccaccatctctgtggacaccagcaagaaccagttcagcctgaagctgagcagcgtgacagccgccgataccgccgtgtattattgcgccagacatgtgggctacagctacggcagacggttctggtacttcgacctgtggggcagaggcaccctggtcacagtttcttctacgcgtgcctctacaaagggaccctccgtgtttcctctggctcccagcagcaagtctacaagcggaggaacagccgctctgggctgcctggtcaaggattactttcccgagcctgtgaccgtgtcctggaatagcggagcactgacaagcggcgtgcacacctttccagccgtgctgcaaagcagcggcctgtactctctgagcagcgtggtcacagtgcctagctctagcctgggcacccagacctacatctgcaatgtgaaccacaagcctagcaacaccaaggtggacaagagagtggaacccaagagctgtgaagtgaaaaccgactccaccgaccacgtgaagcccaaagagacagagaacaccaagcagcccagcaagagctgccacaagcccaaggccatcgtgcacaccgagaaagtgaacatgatgagcctgaccgtgctgggcttcagaatcctgctgctgaaagtggccggctttaacctgctgatgaccctgcggctgtggtccagc

SEQ ID NO: 40402 - DNA, 1917 bp, synthetic construct
  source 1..1917: mol_type = other DNA
atggccttaccagtgaccgccttgctcctgccgctggccttgctgctccacgccgccaggccggacatccagatgacacagagccctagcagcctgtctgccagcgtgggagacagagtgaccatcacatgcaaggccagcgaccacatcaacaactggctggcctggtatcagcagaagcctggcaaggcccctaagctgctgatctacggcgctaccacactggaaacaggcgtgcccagcagattttctggcagcggctctggcaccgacttcaccctgacaatatccagcctccagcctgaggacttcgccacctactactgtcagcagagctggaacaccccttggacattcggccagggcaccaaggtggaaatcaagagactcgaggagggacagcctaaggccaatcctaccgtgacactgttccctccaagcagcgaagaactccaggccaacaaggccacacttgtgtgcctgatctccgacttctaccctggggctgtgacagtggcttggaaggccgatggatctcctgtgaaagccggcgtggaaaccaccaagccatccaagcagagcaacaacaaatacgccgccagctcctacctgagcctgacacctgagcagtggaagtcccacagatcctacagctgccaagtgacccacgaaggcagcaccgtggaaaagacagtggcccctacagagtgcagcggcagagccgattgcggctttaccagcgagagctaccagcagggcgtgctgagcgcctactacatgtacttgttgctgctgctgaagtccgtggtgtacttcgccatcatcacatgctgcctgctgcggagaaccgccttctgctgcaacggcgagaagtctcgcgccaagagaagcggatctggcgtgaagcagaccctgaatttcgacctgctgaagctggctggcgacgtggaatccaacccaggccctactagtatggactggatttggcgcatccttttccttgtcggcgctgctaccggcgcgcattccttcgaagaagttcagctggttgaatctggcggcggactggttcaacctggcggatctctgagactgagctgtgccgcctctggctacacctttagcagctactgggtcaactgggttcgacaggcccctggcaaaggactggaatgggtcgcccaaatctatcccggcgacggcgacaccaactacaacggcaagttcaagggcagattcaccatcagccgggacaacagcaagaacaccctgtacctccagatgaactccctgagagccgaggacaccgccgtgtactattgtgccagatccatcaccaccgtcgtgggctgcgctatggattattggggccagggaaccctggtcaccgtgtcctctacgcgtgcctctacaaagggaccctccgtgtttcctctggctcccagcagcaagtctacaagcggaggaacagccgctctgggctgcctggtcaaggattactttcccgagcctgtgaccgtgtcctggaatagcggagcactgacaagcggcgtgcacacctttccagccgtgctgcaaagcagcggcctgtactctctgagcagcgtggtcacagtgcctagctctagcctgggcacccagacctacatctgcaatgtgaaccacaagcctagcaacaccaaggtggacaagagagtggaacccaagagctgtgaagtgaaaaccgactccaccgaccacgtgaagcccaaagagacagagaacaccaagcagcccagcaagagctgccacaagcccaaggccatcgtgcacaccgagaaagtgaacatgatgagcctgaccgtgctgggcttcagaatcctgctgctgaaagtggccggctttaacctgctgatgaccctgcggctgtggtccagc

SEQ ID NO: 40403 - DNA, 1917 bp, synthetic construct
  source 1..1917: mol_type = other DNA
atggccttaccagtgaccgccttgctcctgccgctggccttgctgctccacgccgccaggccggacatccagatgacacagagccctagcagcctgtctgccagcgtgggagacagagtgaccatcacatgcaaggccagcgaccacatcaacaactggctggcctggtatcagcagaagcctggcaaggcccctaagctgctgatctacggcgctaccacactggaaacaggcgtgcccagcagattttctggcagcggctctggcaccgacttcaccctgacaatatccagcctccagcctgaggacttcgccacctactactgtcagcagagctggaacaccccttggacattcggccagggcaccaaggtggaaatcaagagactcgaggagggacagcctaaggccaatcctaccgtgacactgttccctccaagcagcgaagaactccaggccaacaaggccacacttgtgtgcctgatctccgacttctaccctggggctgtgacagtggcttggaaggccgatggatctcctgtgaaagccggcgtggaaaccaccaagccatccaagcagagcaacaacaaatacgccgccagctcctacctgagcctgacacctgagcagtggaagtcccacagatcctacagctgccaagtgacccacgaaggcagcaccgtggaaaagacagtggcccctacagagtgcagcggcagagccgattgcggctttaccagcgagagctaccagcagggcgtgctgagcgcctactacatgtacttgttgctgctgctgaagtccgtggtgtacttcgccatcatcacatgctgcctgctgcggagaaccgccttctgctgcaacggcgagaagtctcgcgccaagagaagcggatctggcgtgaagcagaccctgaatttcgacctgctgaagctggctggcgacgtggaatccaacccaggccctactagtatggactggatttggcgcatccttttccttgtcggcgctgctaccggcgcgcattccttcgaagaagttcagctggttgaatctggcggcggactggttcaacctggcggatctctgagactgagctgtgccgcctctggctacgcctttagcaactactgggtcaactgggttcgacaggcccctggcaaaggactggaatgggtcgcccaaatctatcccggcgacggcgacaccaactacaacggcaagttcaagggcagattcaccatcagccgggacaacagcaagaacaccctgtacctccagatgaactccctgagagccgaggacaccgccgtgtactattgtgccagatccatcaccaccgtcgtgggctgcgctatggattattggggccagggaaccctggtcaccgtgtcctctacgcgtgcctctacaaagggaccctccgtgtttcctctggctcccagcagcaagtctacaagcggaggaacagccgctctgggctgcctggtcaaggattactttcccgagcctgtgaccgtgtcctggaatagcggagcactgacaagcggcgtgcacacctttccagccgtgctgcaaagcagcggcctgtactctctgagcagcgtggtcacagtgcctagctctagcctgggcacccagacctacatctgcaatgtgaaccacaagcctagcaacaccaaggtggacaagagagtggaacccaagagctgtgaagtgaaaaccgactccaccgaccacgtgaagcccaaagagacagagaacaccaagcagcccagcaagagctgccacaagcccaaggccatcgtgcacaccgagaaagtgaacatgatgagcctgaccgtgctgggcttcagaatcctgctgctgaaagtggccggctttaacctgctgatgaccctgcggctgtggtccagc

SEQ ID NO: 40404 - DNA, 1908 bp, synthetic construct
  source 1..1908: mol_type = other DNA
atggccttaccagtgaccgccttgctcctgccgctggccttgctgctccacgccgccaggccggacatccagatgacacagagccctagcagcctgtctgccagcgtgggagacagagtgaccatcacatgcaagagcagccagagcctgctggactccgatggcaagacctacctgaactggtatcagcagaagcccggcaaggcccctaagctgctgatctacctggtgtccaagctggatagcggcgtgcccagcagattttctggcagcggcagcggaaccgacttcaccctgacaatatccagcctccagcctgaggacttcgccacctactactgcttccaaggcacccactttccattcaccttcggccagggcaccaaggtggaaatcaaaagactcgaggagggacagcctaaggccaatcctaccgtgacactgttccctccaagcagcgaagaactccaggccaacaaggccacacttgtgtgcctgatctccgacttctaccctggggctgtgacagtggcttggaaggccgatggatctcctgtgaaagccggcgtggaaaccaccaagccatccaagcagagcaacaacaaatacgccgccagctcctacctgagcctgacacctgagcagtggaagtcccacagatcctacagctgccaagtgacccacgaaggcagcaccgtggaaaagacagtggcccctacagagtgcagcggcagagccgattgcggctttaccagcgagagctaccagcagggcgtgctgagcgcctactacatgtacttgttgctgctgctgaagtccgtggtgtacttcgccatcatcacatgctgcctgctgcggagaaccgccttctgctgcaacggcgagaagtctcgcgccaagagaagcggatctggcgtgaagcagaccctgaatttcgacctgctgaagctggctggcgacgtggaatccaacccaggccctactagtatggactggatttggcgcatccttttccttgtcggcgctgctaccggcgcgcattccttcgaagaagtgcagctggttgaatcaggcggaggactggttcagcctggcggatctctgagactgtcttgtgccgccagcggctacaccttcaccagctactggatgaactgggtccgacaggcccctggcaaaggactggaatgggtcggaatgatcgaccccagcgacagcgagacacactacaaccacatcttcaaggaccgcttcaccatcagcgccgacaccagcaagaataccgcctacctccagatgaactccctgagagccgaggacaccgccgtgtactactgcgccagaaacctgtatctgttcggccagggaaccctggtcacagtgtcatctacgcgtgcctctacaaagggaccctccgtgtttcctctggctcccagcagcaagtctacaagcggaggaacagccgctctgggctgcctggtcaaggattactttcccgagcctgtgaccgtgtcctggaatagcggagcactgacaagcggcgtgcacacctttccagccgtgctgcaaagcagcggcctgtactctctgagcagcgtggtcacagtgcctagctctagcctgggcacccagacctacatctgcaatgtgaaccacaagcctagcaacaccaaggtggacaagagagtggaacccaagagctgtgaagtgaaaaccgactccaccgaccacgtgaagcccaaagagacagagaacaccaagcagcccagcaagagctgccacaagcccaaggccatcgtgcacaccgagaaagtgaacatgatgagcctgaccgtgctgggcttcagaatcctgctgctgaaagtggccggctttaacctgctgatgaccctgcggctgtggtccagc

SEQ ID NO: 40405 - DNA, 1908 bp, synthetic construct
  source 1..1908: mol_type = other DNA
atggccttaccagtgaccgccttgctcctgccgctggccttgctgctccacgccgccaggccggacatccagatgacacagagccctagcagcctgtctgccagcgtgggagacagagtgaccatcacatgcaagagcagccagagcctgctggactccgatggcaagacctacctgaactggtatcagcagaagcccggcaaggcccctaagctgctgatctacctggtgtccaagctggatagcggcgtgcccagcagattttctggcagcggcagcggaaccgacttcaccctgacaatatccagcctccagcctgaggacttcgccacctactactgcttccaaggcacccactttccattcaccttcggccagggcaccaaggtggaaatcaaaagactcgaggagggacagcctaaggccaatcctaccgtgacactgttccctccaagcagcgaagaactccaggccaacaaggccacacttgtgtgcctgatctccgacttctaccctggggctgtgacagtggcttggaaggccgatggatctcctgtgaaagccggcgtggaaaccaccaagccatccaagcagagcaacaacaaatacgccgccagctcctacctgagcctgacacctgagcagtggaagtcccacagatcctacagctgccaagtgacccacgaaggcagcaccgtggaaaagacagtggcccctacagagtgcagcggcagagccgattgcggctttaccagcgagagctaccagcagggcgtgctgagcgcctactacatgtacttgttgctgctgctgaagtccgtggtgtacttcgccatcatcacatgctgcctgctgcggagaaccgccttctgctgcaacggcgagaagtctcgcgccaagagaagcggatctggcgtgaagcagaccctgaatttcgacctgctgaagctggctggcgacgtggaatccaacccaggccctactagtatggactggatttggcgcatccttttccttgtcggcgctgctaccggcgcgcattccttcgaagaagtgcagctggttgaatcaggcggaggactggttcagcctggcggatctctgagactgtcttgtgccgccagcggctacaccttcagcagctactggatgaactgggtccgacaggcccctggcaaaggactggaatgggtcggaatgatcgaccccagcgacagcgagacacactacaaccacatcttcaaggaccgcttcaccatcagcgccgacaccagcaagaataccgcctacctccagatgaactccctgagagccgaggacaccgccgtgtactactgcgccagaaacctgtatctgtggggccagggaaccctggtcacagtgtcatctacgcgtgcctctacaaagggaccctccgtgtttcctctggctcccagcagcaagtctacaagcggaggaacagccgctctgggctgcctggtcaaggattactttcccgagcctgtgaccgtgtcctggaatagcggagcactgacaagcggcgtgcacacctttccagccgtgctgcaaagcagcggcctgtactctctgagcagcgtggtcacagtgcctagctctagcctgggcacccagacctacatctgcaatgtgaaccacaagcctagcaacaccaaggtggacaagagagtggaacccaagagctgtgaagtgaaaaccgactccaccgaccacgtgaagcccaaagagacagagaacaccaagcagcccagcaagagctgccacaagcccaaggccatcgtgcacaccgagaaagtgaacatgatgagcctgaccgtgctgggcttcagaatcctgctgctgaaagtggccggctttaacctgctgatgaccctgcggctgtggtccagc

SEQ ID NO: 40406 - DNA, 1908 bp, synthetic construct
  source 1..1908: mol_type = other DNA
atggccttaccagtgaccgccttgctcctgccgctggccttgctgctccacgccgccaggccggacatccagatgacacagagccctagcagcctgtctgccagcgtgggagacagagtgaccatcacatgcaagagcagccagagcctgctggactccgatggcaagacctacctgaactggtatcagcagaagcccggcaaggcccctaagctgctgatctacctggtgtccaagctggatagcggcgtgcccagcagattttctggcagcggcagcggaaccgacttcaccctgacaatatccagcctccagcctgaggacttcgccacctactactgctggcaaggcacccactttccattcaccttcggccagggcaccaaggtggaaatcaaaagactcgaggagggacagcctaaggccaatcctaccgtgacactgttccctccaagcagcgaagaactccaggccaacaaggccacacttgtgtgcctgatctccgacttctaccctggggctgtgacagtggcttggaaggccgatggatctcctgtgaaagccggcgtggaaaccaccaagccatccaagcagagcaacaacaaatacgccgccagctcctacctgagcctgacacctgagcagtggaagtcccacagatcctacagctgccaagtgacccacgaaggcagcaccgtggaaaagacagtggcccctacagagtgcagcggcagagccgattgcggctttaccagcgagagctaccagcagggcgtgctgagcgcctactacatgtacttgttgctgctgctgaagtccgtggtgtacttcgccatcatcacatgctgcctgctgcggagaaccgccttctgctgcaacggcgagaagtctcgcgccaagagaagcggatctggcgtgaagcagaccctgaatttcgacctgctgaagctggctggcgacgtggaatccaacccaggccctactagtatggactggatttggcgcatccttttccttgtcggcgctgctaccggcgcgcattccttcgaagaagtgcagctggttgaatcaggcggaggactggttcagcctggcggatctctgagactgtcttgtgccgccagcggctacaccttcaccagctactggatgaactgggtccgacaggcccctggcaaaggactggaatgggtcggaatgatcgaccccagcgacagcgagacacactacaaccacatcttcaaggaccgcttcaccatcagcgccgacaccagcaagaataccgcctacctccagatgaactccctgagagccgaggacaccgccgtgtactactgcgccagaaacctgtatctgttcggccagggaaccctggtcacagtgtcatctacgcgtgcctctacaaagggaccctccgtgtttcctctggctcccagcagcaagtctacaagcggaggaacagccgctctgggctgcctggtcaaggattactttcccgagcctgtgaccgtgtcctggaatagcggagcactgacaagcggcgtgcacacctttccagccgtgctgcaaagcagcggcctgtactctctgagcagcgtggtcacagtgcctagctctagcctgggcacccagacctacatctgcaatgtgaaccacaagcctagcaacaccaaggtggacaagagagtggaacccaagagctgtgaagtgaaaaccgactccaccgaccacgtgaagcccaaagagacagagaacaccaagcagcccagcaagagctgccacaagcccaaggccatcgtgcacaccgagaaagtgaacatgatgagcctgaccgtgctgggcttcagaatcctgctgctgaaagtggccggctttaacctgctgatgaccctgcggctgtggtccagc

SEQ ID NO: 40407 - DNA, 1908 bp, synthetic construct
  source 1..1908: mol_type = other DNA
atggccttaccagtgaccgccttgctcctgccgctggccttgctgctccacgccgccaggccggacatccagatgacacagagccctagcagcctgtctgccagcgtgggagacagagtgaccatcacatgcaagagcagccagagcctgctggactccgatggcaagacctacctgaactggtatcagcagaagcccggcaaggcccctaagctgctgatctacctggtgtccaagctggatagcggcgtgcccagcagattttctggcagcggcagcggaaccgacttcaccctgacaatatccagcctccagcctgaggacttcgccacctactactgctggcaaggcacccactttccattcaccttcggccagggcaccaaggtggaaatcaaaagactcgaggagggacagcctaaggccaatcctaccgtgacactgttccctccaagcagcgaagaactccaggccaacaaggccacacttgtgtgcctgatctccgacttctaccctggggctgtgacagtggcttggaaggccgatggatctcctgtgaaagccggcgtggaaaccaccaagccatccaagcagagcaacaacaaatacgccgccagctcctacctgagcctgacacctgagcagtggaagtcccacagatcctacagctgccaagtgacccacgaaggcagcaccgtggaaaagacagtggcccctacagagtgcagcggcagagccgattgcggctttaccagcgagagctaccagcagggcgtgctgagcgcctactacatgtacttgttgctgctgctgaagtccgtggtgtacttcgccatcatcacatgctgcctgctgcggagaaccgccttctgctgcaacggcgagaagtctcgcgccaagagaagcggatctggcgtgaagcagaccctgaatttcgacctgctgaagctggctggcgacgtggaatccaacccaggccctactagtatggactggatttggcgcatccttttccttgtcggcgctgctaccggcgcgcattccttcgaagaagtgcagctggttgaatcaggcggaggactggttcagcctggcggatctctgagactgtcttgtgccgccagcggctacaccttcagcagctactggatgaactgggtccgacaggcccctggcaaaggactggaatgggtcggaatgatcgaccccagcgacagcgagacacactacaaccacatcttcaaggaccgcttcaccatcagcgccgacaccagcaagaataccgcctacctccagatgaactccctgagagccgaggacaccgccgtgtactactgcgccagaaacctgtatctgtggggccagggaaccctggtcacagtgtcatctacgcgtgcctctacaaagggaccctccgtgtttcctctggctcccagcagcaagtctacaagcggaggaacagccgctctgggctgcctggtcaaggattactttcccgagcctgtgaccgtgtcctggaatagcggagcactgacaagcggcgtgcacacctttccagccgtgctgcaaagcagcggcctgtactctctgagcagcgtggtcacagtgcctagctctagcctgggcacccagacctacatctgcaatgtgaaccacaagcctagcaacaccaaggtggacaagagagtggaacccaagagctgtgaagtgaaaaccgactccaccgaccacgtgaagcccaaagagacagagaacaccaagcagcccagcaagagctgccacaagcccaaggccatcgtgcacaccgagaaagtgaacatgatgagcctgaccgtgctgggcttcagaatcctgctgctgaaagtggccggctttaacctgctgatgaccctgcggctgtggtccagc

SEQ ID NO: 40408 - DNA, 1908 bp, synthetic construct
  source 1..1908: mol_type = other DNA
atggccttaccagtgaccgccttgctcctgccgctggccttgctgctccacgccgccaggccggacatccagatgacacagagccctagcagcctgtctgccagcgtgggagacagagtgaccatcacatgcaagagcagccagagcctgctggactccgatggcaagacctacctgaactggtatcagcagaagcccggcaaggcccctaagctgctgatctacctggtgtccaagctggatagcggcgtgcccagcagattttctggcagcggcagcggaaccgacttcaccctgacaatatccagcctccagcctgaggacttcgccacctactactgcttccaaggcacccactttccatacaccttcggccagggcaccaaggtggaaatcaaaagactcgaggagggacagcctaaggccaatcctaccgtgacactgttccctccaagcagcgaagaactccaggccaacaaggccacacttgtgtgcctgatctccgacttctaccctggggctgtgacagtggcttggaaggccgatggatctcctgtgaaagccggcgtggaaaccaccaagccatccaagcagagcaacaacaaatacgccgccagctcctacctgagcctgacacctgagcagtggaagtcccacagatcctacagctgccaagtgacccacgaaggcagcaccgtggaaaagacagtggcccctacagagtgcagcggcagagccgattgcggctttaccagcgagagctaccagcagggcgtgctgagcgcctactacatgtacttgttgctgctgctgaagtccgtggtgtacttcgccatcatcacatgctgcctgctgcggagaaccgccttctgctgcaacggcgagaagtctcgcgccaagagaagcggatctggcgtgaagcagaccctgaatttcgacctgctgaagctggctggcgacgtggaatccaacccaggccctactagtatggactggatttggcgcatccttttccttgtcggcgctgctaccggcgcgcattccttcgaagaagtgcagctggttgaatcaggcggaggactggttcagcctggcggatctctgagactgtcttgtgccgccagcggctacaccttcaccagctactggatgaactgggtccgacaggcccctggcaaaggactggaatgggtcggaatgatcgaccccagcgacagcgagacacactacaaccacatcttcaaggaccgcttcaccatcagcgccgacaccagcaagaataccgcctacctccagatgaactccctgagagccgaggacaccgccgtgtactactgcgccagaaacctgtatctgttcggccagggaaccctggtcacagtgtcatctacgcgtgcctctacaaagggaccctccgtgtttcctctggctcccagcagcaagtctacaagcggaggaacagccgctctgggctgcctggtcaaggattactttcccgagcctgtgaccgtgtcctggaatagcggagcactgacaagcggcgtgcacacctttccagccgtgctgcaaagcagcggcctgtactctctgagcagcgtggtcacagtgcctagctctagcctgggcacccagacctacatctgcaatgtgaaccacaagcctagcaacaccaaggtggacaagagagtggaacccaagagctgtgaagtgaaaaccgactccaccgaccacgtgaagcccaaagagacagagaacaccaagcagcccagcaagagctgccacaagcccaaggccatcgtgcacaccgagaaagtgaacatgatgagcctgaccgtgctgggcttcagaatcctgctgctgaaagtggccggctttaacctgctgatgaccctgcggctgtggtccagc

SEQ ID NO: 40409 - DNA, 1908 bp, synthetic construct
  source 1..1908: mol_type = other DNA
atggccttaccagtgaccgccttgctcctgccgctggccttgctgctccacgccgccaggccggacatccagatgacacagagccctagcagcctgtctgccagcgtgggagacagagtgaccatcacatgcaagagcagccagagcctgctggactccgatggcaagacctacctgaactggtatcagcagaagcccggcaaggcccctaagctgctgatctacctggtgtccaagctggatagcggcgtgcccagcagattttctggcagcggcagcggaaccgacttcaccctgacaatatccagcctccagcctgaggacttcgccacctactactgcttccaaggcacccactttccatacaccttcggccagggcaccaaggtggaaatcaaaagactcgaggagggacagcctaaggccaatcctaccgtgacactgttccctccaagcagcgaagaactccaggccaacaaggccacacttgtgtgcctgatctccgacttctaccctggggctgtgacagtggcttggaaggccgatggatctcctgtgaaagccggcgtggaaaccaccaagccatccaagcagagcaacaacaaatacgccgccagctcctacctgagcctgacacctgagcagtggaagtcccacagatcctacagctgccaagtgacccacgaaggcagcaccgtggaaaagacagtggcccctacagagtgcagcggcagagccgattgcggctttaccagcgagagctaccagcagggcgtgctgagcgcctactacatgtacttgttgctgctgctgaagtccgtggtgtacttcgccatcatcacatgctgcctgctgcggagaaccgccttctgctgcaacggcgagaagtctcgcgccaagagaagcggatctggcgtgaagcagaccctgaatttcgacctgctgaagctggctggcgacgtggaatccaacccaggccctactagtatggactggatttggcgcatccttttccttgtcggcgctgctaccggcgcgcattccttcgaagaagtgcagctggttgaatcaggcggaggactggttcagcctggcggatctctgagactgtcttgtgccgccagcggctacaccttcaccaactactggatgaactgggtccgacaggcccctggcaaaggactggaatgggtcggaatgatcgaccccagcgacagcgagacacactacaaccacatcttcaaggaccgcttcaccatcagcgccgacaccagcaagaataccgcctacctccagatgaactccctgagagccgaggacaccgccgtgtactactgcgccagaaacctgtatctgtggggccagggaaccctggtcacagtgtcatctacgcgtgcctctacaaagggaccctccgtgtttcctctggctcccagcagcaagtctacaagcggaggaacagccgctctgggctgcctggtcaaggattactttcccgagcctgtgaccgtgtcctggaatagcggagcactgacaagcggcgtgcacacctttccagccgtgctgcaaagcagcggcctgtactctctgagcagcgtggtcacagtgcctagctctagcctgggcacccagacctacatctgcaatgtgaaccacaagcctagcaacaccaaggtggacaagagagtggaacccaagagctgtgaagtgaaaaccgactccaccgaccacgtgaagcccaaagagacagagaacaccaagcagcccagcaagagctgccacaagcccaaggccatcgtgcacaccgagaaagtgaacatgatgagcctgaccgtgctgggcttcagaatcctgctgctgaaagtggccggctttaacctgctgatgaccctgcggctgtggtccagc

SEQ ID NO: 40410 - DNA, 1908 bp, synthetic construct
  source 1..1908: mol_type = other DNA
atggccttaccagtgaccgccttgctcctgccgctggccttgctgctccacgccgccaggccggacatccagatgacacagagccctagcagcctgtctgccagcgtgggagacagagtgaccatcacatgcaagagcagccagagcctgctggactccgatggcaagacctacctgaactggtatcagcagaagcccggcaaggcccctaagctgctgatctacctggtgtccaagctggatagcggcgtgcccagcagattttctggcagcggcagcggaaccgacttcaccctgacaatatccagcctccagcctgaggacttcgccacctactactgcttccaaggcacccactttccattcaccttcggccagggcaccaaggtggaaatcaaaagactcgaggagggacagcctaaggccaatcctaccgtgacactgttccctccaagcagcgaagaactccaggccaacaaggccacacttgtgtgcctgatctccgacttctaccctggggctgtgacagtggcttggaaggccgatggatctcctgtgaaagccggcgtggaaaccaccaagccatccaagcagagcaacaacaaatacgccgccagctcctacctgagcctgacacctgagcagtggaagtcccacagatcctacagctgccaagtgacccacgaaggcagcaccgtggaaaagacagtggcccctacagagtgcagcggcagagccgattgcggctttaccagcgagagctaccagcagggcgtgctgagcgcctactacatgtacttgttgctgctgctgaagtccgtggtgtacttcgccatcatcacatgctgcctgctgcggagaaccgccttctgctgcaacggcgagaagtctcgcgccaagagaagcggatctggcgtgaagcagaccctgaatttcgacctgctgaagctggctggcgacgtggaatccaacccaggccctactagtatggactggatttggcgcatccttttccttgtcggcgctgctaccggcgcgcattccttcgaagaagtgcagctggttgaatcaggcggaggactggttcagcctggcggatctctgagactgtcttgtgccgccagcggctacaccttcaccaactactggatgaactgggtccgacaggcccctggcaaaggactggaatgggtcggaatgatcgaccccagcgacagcgagacacactacaaccacatcttcaaggaccgcttcaccatcagcgccgacaccagcaagaataccgcctacctccagatgaactccctgagagccgaggacaccgccgtgtactactgcgccagaaacctgtatctgtggggccagggaaccctggtcacagtgtcatctacgcgtgcctctacaaagggaccctccgtgtttcctctggctcccagcagcaagtctacaagcggaggaacagccgctctgggctgcctggtcaaggattactttcccgagcctgtgaccgtgtcctggaatagcggagcactgacaagcggcgtgcacacctttccagccgtgctgcaaagcagcggcctgtactctctgagcagcgtggtcacagtgcctagctctagcctgggcacccagacctacatctgcaatgtgaaccacaagcctagcaacaccaaggtggacaagagagtggaacccaagagctgtgaagtgaaaaccgactccaccgaccacgtgaagcccaaagagacagagaacaccaagcagcccagcaagagctgccacaagcccaaggccatcgtgcacaccgagaaagtgaacatgatgagcctgaccgtgctgggcttcagaatcctgctgctgaaagtggccggctttaacctgctgatgaccctgcggctgtggtccagc

SEQ ID NO: 40411 - DNA, 1917 bp, synthetic construct
  source 1..1917: mol_type = other DNA
atggccttaccagtgaccgccttgctcctgccgctggccttgctgctccacgccgccaggccggacatccagttgacccagtcccccagctcactcagcgccagtgtgggggaccgggtgaccattacctgtaaagccagtcagagtgtggactatgacggggatagcttcctgaattggtatcagcagaagcctggcaaagccccaaagctgctgatctacgctgcatctaatctggagtcaggcgtgccttccaggttctccggtagtgggtctgggaccgatttcacattgaccatttcatccctccaacccgaggatttcgctacatattactgtcagcagtccaatgaggaccctctcacctttggccagggcaccaaagttgaaattaagagactcgaggagggacagcctaaggccaatcctaccgtgacactgttccctccaagcagcgaagaactccaggccaacaaggccacacttgtgtgcctgatctccgacttctaccctggggctgtgacagtggcttggaaggccgatggatctcctgtgaaagccggcgtggaaaccaccaagccatccaagcagagcaacaacaaatacgccgccagctcctacctgagcctgacacctgagcagtggaagtcccacagatcctacagctgccaagtgacccacgaaggcagcaccgtggaaaagacagtggcccctacagagtgcagcggcagagccgattgcggctttaccagcgagagctaccagcagggcgtgctgagcgcctactacatgtacttgttgctgctgctgaagtccgtggtgtacttcgccatcatcacatgctgcctgctgcggagaaccgccttctgctgcaacggcgagaagtctcgcgccaagagaagcggatctggcgtgaagcagaccctgaatttcgacctgctgaagctggctggcgacgtggaatccaacccaggccctactagtatggactggatttggcgcatccttttccttgtcggcgctgctaccggcgcgcattccttcgaagaagtccaacttgtggagtctggagggggcctggtgcagcccggcggctctctcagactgtcttgtgcggcaagcggctacaccttcacctcttactggatagaatgggtgaggcaggcacctggaaagggactggagtggattggagagattctgccaggagggggagatacaaattacaatgaaatcttcaaggggcgggccaccttttcagcggataccagcaagaatacagcttacctgcagatgaatagcctccgggcagaagataccgctgtttattattgcacgagacgggtgccaataagactggactattgggggcaagggactcttgtcaccgtcagttcaacgcgtgcctctacaaagggaccctccgtgtttcctctggctcccagcagcaagtctacaagcggaggaacagccgctctgggctgcctggtcaaggattactttcccgagcctgtgaccgtgtcctggaatagcggagcactgacaagcggcgtgcacacctttccagccgtgctgcaaagcagcggcctgtactctctgagcagcgtggtcacagtgcctagctctagcctgggcacccagacctacatctgcaatgtgaaccacaagcctagcaacaccaaggtggacaagagagtggaacccaagagctgtgaagtgaaaaccgactccaccgaccacgtgaagcccaaagagacagagaacaccaagcagcccagcaagagctgccacaagcccaaggccatcgtgcacaccgagaaagtgaacatgatgagcctgaccgtgctgggcttcagaatcctgctgctgaaagtggccggctttaacctgctgatgaccctgcggctgtggtccagc

SEQ ID NO: 40412 - DNA, 1917 bp, synthetic construct
  source 1..1917: mol_type = other DNA
atggccttaccagtgaccgccttgctcctgccgctggccttgctgctccacgccgccaggccggacatccagttgacccagtcccccagctcactcagcgccagtgtgggggaccgggtgaccattacctgtaaagccagtcagagtgtggactatgagggggatagcttcctgaattggtatcagcagaagcctggcaaagccccaaagctgctgatctacgctgcatctaatctggagtcaggcgtgccttctaggttctccggtagtgggtctgggaccgatttcacattgaccatttcatccctccaacccgaggatttcgctacatattactgtcagcagtccaatgaggaccctctcacctttggccagggcaccaaagttgaaattaagagactcgaggagggacagcctaaggccaatcctaccgtgacactgttccctccaagcagcgaagaactccaggccaacaaggccacacttgtgtgcctgatctccgacttctaccctggggctgtgacagtggcttggaaggccgatggatctcctgtgaaagccggcgtggaaaccaccaagccatccaagcagagcaacaacaaatacgccgccagctcctacctgagcctgacacctgagcagtggaagtcccacagatcctacagctgccaagtgacccacgaaggcagcaccgtggaaaagacagtggcccctacagagtgcagcggcagagccgattgcggctttaccagcgagagctaccagcagggcgtgctgagcgcctactacatgtacttgttgctgctgctgaagtccgtggtgtacttcgccatcatcacatgctgcctgctgcggagaaccgccttctgctgcaacggcgagaagtctcgcgccaagagaagcggatctggcgtgaagcagaccctgaatttcgacctgctgaagctggctggcgacgtggaatccaacccaggccctactagtatggactggatttggcgcatccttttccttgtcggcgctgctaccggcgcgcattccttcgaagaagtccaacttgtggagtctggagggggcctggtgcagcccggcggctctctcagactgtcttgtgcggcaagcggctacaccttcacctcttactggatagaatgggtgaggcaggcacctggaaagggactggagtggattggagagattctgccaggagggggagatacaaattacaatgaaatcttcaaggggcgggccaccttttcagcggataccagcaagaatacagcttacctgcagatgaatagcctccgggcagaagataccgctgtttattattgcacgagacgggtgccaataagactggactattgggggcaagggactcttgtcaccgtcagttcaacgcgtgcctctacaaagggaccctccgtgtttcctctggctcccagcagcaagtctacaagcggaggaacagccgctctgggctgcctggtcaaggattactttcccgagcctgtgaccgtgtcctggaatagcggagcactgacaagcggcgtgcacacctttccagccgtgctgcaaagcagcggcctgtactctctgagcagcgtggtcacagtgcctagctctagcctgggcacccagacctacatctgcaatgtgaaccacaagcctagcaacaccaaggtggacaagagagtggaacccaagagctgtgaagtgaaaaccgactccaccgaccacgtgaagcccaaagagacagagaacaccaagcagcccagcaagagctgccacaagcccaaggccatcgtgcacaccgagaaagtgaacatgatgagcctgaccgtgctgggcttcagaatcctgctgctgaaagtggccggctttaacctgctgatgaccctgcggctgtggtccagc

SEQ ID NO: 40413 - DNA, 1914 bp, synthetic construct
  source 1..1914: mol_type = other DNA
atggccttaccagtgaccgccttgctcctgccgctggccttgctgctccacgccgccaggccggacatcgtgatgacacagagccctgatagcctggccgtgtctctgggagagagagccaccattaactgcaaggccagccagagcgtggactacgacggcgacagcttcctgaactggtatcagcagaagcccggccagcctcctaagctgctgatctacgccgccagcaatctggaaagcggcgtgccaagcagattttccggctctggcagcggcaccgatttcaccctgacaatatccagcctccagcctgaggacgtggccgtgtactactgccagcagagcaacgacgaccctctgacctttggacagggcaccaaggtggaaatcaaactcgaggagggacagcctaaggccaatcctaccgtgacactgttccctccaagcagcgaagaactccaggccaacaaggccacacttgtgtgcctgatctccgacttctaccctggggctgtgacagtggcttggaaggccgatggatctcctgtgaaagccggcgtggaaaccaccaagccatccaagcagagcaacaacaaatacgccgccagctcctacctgagcctgacacctgagcagtggaagtcccacagatcctacagctgccaagtgacccacgaaggcagcaccgtggaaaagacagtggcccctacagagtgcagcggcagagccgattgcggctttaccagcgagagctaccagcagggcgtgctgagcgcctactacatgtacttgttgctgctgctgaagtccgtggtgtacttcgccatcatcacatgctgcctgctgcggagaaccgccttctgctgcaacggcgagaagtctcgcgccaagagaagcggatctggcgtgaagcagaccctgaatttcgacctgctgaagctggctggcgacgtggaatccaacccaggccctactagtatggactggatttggcgcatccttttccttgtcggcgctgctaccggcgcgcattccttcgaacaagttcagctggttcagagcggagccgaagtgaagaaacctggggcctctgtgaaggtgtcctgcaaagccagcggctacacctttaccagctactggatcaactgggtccgacaggcccctggacaaggactggaatggatgggacagatccttccaggcggaggggacaccaactacaacggcaagttcaagggcagagtgaccatcaccgccgacaccagcacaagcaccgcctacatggaactgagcagcctgagaagcgaggacaccgccgtgtattattgcaccagacgggtgcccatccggctggattattggggacagggaaccctggtcaccgtgtctagtacgcgtgcctctacaaagggaccctccgtgtttcctctggctcccagcagcaagtctacaagcggaggaacagccgctctgggctgcctggtcaaggattactttcccgagcctgtgaccgtgtcctggaatagcggagcactgacaagcggcgtgcacacctttccagccgtgctgcaaagcagcggcctgtactctctgagcagcgtggtcacagtgcctagctctagcctgggcacccagacctacatctgcaatgtgaaccacaagcctagcaacaccaaggtggacaagagagtggaacccaagagctgtgaagtgaaaaccgactccaccgaccacgtgaagcccaaagagacagagaacaccaagcagcccagcaagagctgccacaagcccaaggccatcgtgcacaccgagaaagtgaacatgatgagcctgaccgtgctgggcttcagaatcctgctgctgaaagtggccggctttaacctgctgatgaccctgcggctgtggtccagc

SEQ ID NO: 40414 - DNA, 1914 bp, synthetic construct
  source 1..1914: mol_type = other DNA
atggccttaccagtgaccgccttgctcctgccgctggccttgctgctccacgccgccaggccggacatcgtgatgacacagagccctgatagcctggccgtgtctctgggagagagagccaccattaactgcaaggccagccagagcgtggactacgacggcgacagcttcctgaactggtatcagcagaagcccggccagcctcctaagctgctgatctacgccgccagcaatctggaaagcggcgtgccaagcagattttccggctctggcagcggcaccgatttcaccctgacaatatccagcctccagcctgaggacgtggccgtgtactactgccagcagagcaacgacgaccctctgacctttggacagggcaccaaggtggaaatcaaactcgaggagggacagcctaaggccaatcctaccgtgacactgttccctccaagcagcgaagaactccaggccaacaaggccacacttgtgtgcctgatctccgacttctaccctggggctgtgacagtggcttggaaggccgatggatctcctgtgaaagccggcgtggaaaccaccaagccatccaagcagagcaacaacaaatacgccgccagctcctacctgagcctgacacctgagcagtggaagtcccacagatcctacagctgccaagtgacccacgaaggcagcaccgtggaaaagacagtggcccctacagagtgcagcggcagagccgattgcggctttaccagcgagagctaccagcagggcgtgctgagcgcctactacatgtacttgttgctgctgctgaagtccgtggtgtacttcgccatcatcacatgctgcctgctgcggagaaccgccttctgctgcaacggcgagaagtctcgcgccaagagaagcggatctggcgtgaagcagaccctgaatttcgacctgctgaagctggctggcgacgtggaatccaacccaggccctactagtatggactggatttggcgcatccttttccttgtcggcgctgctaccggcgcgcattccttcgaagaagtccaacttgtggagtctggagggggcctggtgcagcccggcggctctctcagactgtcttgtgcggcaagcggctacaccttcacctcttactggatagaatgggtgaggcaggcacctggaaagggactggagtggattggagagattctgccaggagggggagatacaaattacaatgaaatcttcaaggggcgggccaccttttcagcggataccagcaagaatacagcttacctgcagatgaatagcctccgggcagaagataccgctgtttattattgcacgagacgggtgccaataagactggactattgggggcaagggactcttgtcaccgtcagttcaacgcgtgcctctacaaagggaccctccgtgtttcctctggctcccagcagcaagtctacaagcggaggaacagccgctctgggctgcctggtcaaggattactttcccgagcctgtgaccgtgtcctggaatagcggagcactgacaagcggcgtgcacacctttccagccgtgctgcaaagcagcggcctgtactctctgagcagcgtggtcacagtgcctagctctagcctgggcacccagacctacatctgcaatgtgaaccacaagcctagcaacaccaaggtggacaagagagtggaacccaagagctgtgaagtgaaaaccgactccaccgaccacgtgaagcccaaagagacagagaacaccaagcagcccagcaagagctgccacaagcccaaggccatcgtgcacaccgagaaagtgaacatgatgagcctgaccgtgctgggcttcagaatcctgctgctgaaagtggccggctttaacctgctgatgaccctgcggctgtggtccagc

SEQ ID NO: 40415 - DNA, 1914 bp, synthetic construct
  source 1..1914: mol_type = other DNA
atggccttaccagtgaccgccttgctcctgccgctggccttgctgctccacgccgccaggccggacatcgtgatgacacagagccctgatagcctggccgtgtctctgggagagagagccaccattaactgcaaggccagccagagcgtggactacgacggcgacagcttcctgaactggtatcagcagaagcccggccagcctcctaagctgctgatctacgccgccagcaatctggaaagcggcgtgccaagcagattttccggctctggcagcggcaccgatttcaccctgacaatatccagcctccagcctgaggacgtggccgtgtactactgccagcagagcaacgacgaccctctgacctttggacagggcaccaaggtggaaatcaaactcgaggagggacagcctaaggccaatcctaccgtgacactgttccctccaagcagcgaagaactccaggccaacaaggccacacttgtgtgcctgatctccgacttctaccctggggctgtgacagtggcttggaaggccgatggatctcctgtgaaagccggcgtggaaaccaccaagccatccaagcagagcaacaacaaatacgccgccagctcctacctgagcctgacacctgagcagtggaagtcccacagatcctacagctgccaagtgacccacgaaggcagcaccgtggaaaagacagtggcccctacagagtgcagcggcagagccgattgcggctttaccagcgagagctaccagcagggcgtgctgagcgcctactacatgtacttgttgctgctgctgaagtccgtggtgtacttcgccatcatcacatgctgcctgctgcggagaaccgccttctgctgcaacggcgagaagtctcgcgccaagagaagcggatctggcgtgaagcagaccctgaatttcgacctgctgaagctggctggcgacgtggaatccaacccaggccctactagtatggactggatttggcgcatccttttccttgtcggcgctgctaccggcgcgcattccttcgaagaagtccaacttgtggagtctggagggggcctggtgcagcccggcggctctctcagactgtcttgtgcggcaagcggctacaccttcagctcttactggatagaatgggtgaggcaggcacctggaaagggactggagtggattggagagattctgccaggagggggagatacaaattacaatgaaatcttcaaggggcgggccaccttttcagcggataccagcaagaatacagcttacctgcagatgaatagcctccgggcagaagataccgctgtttattattgcacgagacgggtgccaataagactggactattgggggcaagggactcttgtcaccgtcagttcaacgcgtgcctctacaaagggaccctccgtgtttcctctggctcccagcagcaagtctacaagcggaggaacagccgctctgggctgcctggtcaaggattactttcccgagcctgtgaccgtgtcctggaatagcggagcactgacaagcggcgtgcacacctttccagccgtgctgcaaagcagcggcctgtactctctgagcagcgtggtcacagtgcctagctctagcctgggcacccagacctacatctgcaatgtgaaccacaagcctagcaacaccaaggtggacaagagagtggaacccaagagctgtgaagtgaaaaccgactccaccgaccacgtgaagcccaaagagacagagaacaccaagcagcccagcaagagctgccacaagcccaaggccatcgtgcacaccgagaaagtgaacatgatgagcctgaccgtgctgggcttcagaatcctgctgctgaaagtggccggctttaacctgctgatgaccctgcggctgtggtccagc

SEQ ID NO: 40416 - DNA, 1905 bp, synthetic construct
  source 1..1905: mol_type = other DNA
atggccttaccagtgaccgccttgctcctgccgctggccttgctgctccacgccgccaggccggacgtggtcatgacacagagcccttctagcctgtctgccagcgtgggcgacagagtgaccatcacctgtatggcctccgaggacatctacatccggctggcctggtatcagcagaagcctggaaacgcccctaagctgctgatctacgccgccacctctctggaaacaggcgtgccaagcagattttccggcagcggctctggcaccgatttcaccctgacaatatccagcctccagcctgaggacttcgccacctactactgccagcagtattggagcagcccctggacatttggcggaggcaccaaggtggaaatcaaactcgaggagggacagcctaaggccaatcctaccgtgacactgttccctccaagcagcgaagaactccaggccaacaaggccacacttgtgtgcctgatctccgacttctaccctggggctgtgacagtggcttggaaggccgatggatctcctgtgaaagccggcgtggaaaccaccaagccatccaagcagagcaacaacaaatacgccgccagctcctacctgagcctgacacctgagcagtggaagtcccacagatcctacagctgccaagtgacccacgaaggcagcaccgtggaaaagacagtggcccctacagagtgcagcggcagagccgattgcggctttaccagcgagagctaccagcagggcgtgctgagcgcctactacatgtacttgttgctgctgctgaagtccgtggtgtacttcgccatcatcacatgctgcctgctgcggagaaccgccttctgctgcaacggcgagaagtctcgcgccaagagaagcggatctggcgtgaagcagaccctgaatttcgacctgctgaagctggctggcgacgtggaatccaacccaggccctactagtatggactggatttggcgcatccttttccttgtcggcgctgctaccggcgcgcattccttcgaacaggttcagctgcaagagtctggccccggactggtcaagcctagccaaacactgagcctgacctgtaccgtgtccggctacagcatcaccagcgactacacctggaactggatcagacagcctcctggcaacggactggaatggatcggctacatcacctacagcggcagcaccagctacaaccccagcctgaaaagccgggtgctgatctccgtggacaccagcaagaatcaggtgtccctgaagctgagcagcgtgacagccgctgataccgccgtgtactactgtgccagactggggagaagatacacaatggactactggggccagggcaccaccgtgacagtttcttctacgcgtgcctctacaaagggaccctccgtgtttcctctggctcccagcagcaagtctacaagcggaggaacagccgctctgggctgcctggtcaaggattactttcccgagcctgtgaccgtgtcctggaatagcggagcactgacaagcggcgtgcacacctttccagccgtgctgcaaagcagcggcctgtactctctgagcagcgtggtcacagtgcctagctctagcctgggcacccagacctacatctgcaatgtgaaccacaagcctagcaacaccaaggtggacaagagagtggaacccaagagctgtgaagtgaaaaccgactccaccgaccacgtgaagcccaaagagacagagaacaccaagcagcccagcaagagctgccacaagcccaaggccatcgtgcacaccgagaaagtgaacatgatgagcctgaccgtgctgggcttcagaatcctgctgctgaaagtggccggctttaacctgctgatgaccctgcggctgtggtccagc

SEQ ID NO: 40417 - DNA, 1902 bp, synthetic construct
  source 1..1902: mol_type = other DNA
atggccttaccagtgaccgccttgctcctgccgctggccttgctgctccacgccgccaggccggacatccagatgacacagagccctagcagcctgtctgccagcgtgggagacagagtgaccatcacatgcaaggccagcgacctgatccacaactggctggcctggtatcagcagaagcctggcaaggcccctaagctgctgatctacggcgctacctctctggaaacaggcgtgcccagcagattttctggcagcggctctggcaccgacttcaccctgacaatatccagcctccagcctgaggacttcgccacctactactgccagcagtactggaccacacctttcaccttcggccagggcaccaaggtggaaatcaaaagactcgaggagggacagcctaaggccaatcctaccgtgacactgttccctccaagcagcgaagaactccaggccaacaaggccacacttgtgtgcctgatctccgacttctaccctggggctgtgacagtggcttggaaggccgatggatctcctgtgaaagccggcgtggaaaccaccaagccatccaagcagagcaacaacaaatacgccgccagctcctacctgagcctgacacctgagcagtggaagtcccacagatcctacagctgccaagtgacccacgaaggcagcaccgtggaaaagacagtggcccctacagagtgcagcggcagagccgattgcggctttaccagcgagagctaccagcagggcgtgctgagcgcctactacatgtacttgttgctgctgctgaagtccgtggtgtacttcgccatcatcacatgctgcctgctgcggagaaccgccttctgctgcaacggcgagaagtctcgcgccaagagaagcggatctggcgtgaagcagaccctgaatttcgacctgctgaagctggctggcgacgtggaatccaacccaggccctactagtatggactggatttggcgcatccttttccttgtcggcgctgctaccggcgcgcattccttcgaagaagtgcagctggttgaatcaggtggcggcctggttcaacctggcggatctctgagactgagctgtgccgccagcggctacagcatcaccaatgactacgcctggaactgggtccgacaggcccctggaaaaggactggaatgggtcggatatatcagctactccggctacaccacctacaatcccagcatcaagagccggttcaccatcagcagagacaccagcaagaacaccctgtacctccagatgaactccctgagagccgaggacaccgccgtgtactattgtgccagatggaccagcggcctggactattggggacagggaacactggtcaccgtgtcctctacgcgtgcctctacaaagggaccctccgtgtttcctctggctcccagcagcaagtctacaagcggaggaacagccgctctgggctgcctggtcaaggattactttcccgagcctgtgaccgtgtcctggaatagcggagcactgacaagcggcgtgcacacctttccagccgtgctgcaaagcagcggcctgtactctctgagcagcgtggtcacagtgcctagctctagcctgggcacccagacctacatctgcaatgtgaaccacaagcctagcaacaccaaggtggacaagagagtggaacccaagagctgtgaagtgaaaaccgactccaccgaccacgtgaagcccaaagagacagagaacaccaagcagcccagcaagagctgccacaagcccaaggccatcgtgcacaccgagaaagtgaacatgatgagcctgaccgtgctgggcttcagaatcctgctgctgaaagtggccggctttaacctgctgatgaccctgcggctgtggtccagc

SEQ ID NO: 40418 - DNA, 1923 bp, synthetic construct
  source 1..1923: mol_type = other DNA
atggccttaccagtgaccgccttgctcctgccgctggccttgctgctccacgccgccaggccggacatcgtgatgacacagagccctgatagcctggccgtgtctctgggagagagagccaccatcaactgcaagagcagccagagcctgctgaacagcggcaaccagaagaactacctggcctggtatcagcagaagcccggccagcctcctaagctgctgatctactggggcagcaccagatccacaggcgtgcccgatagattttctggctctggcagcggcaccgacttcaccctgacaatttctagcctgcaagccgaggacgtggccgtgtactactgccagaacgactacacataccccttcaccttcggccagggcaccaagctggaaatcaaactcgaggagggacagcctaaggccaatcctaccgtgacactgttccctccaagcagcgaagaactccaggccaacaaggccacacttgtgtgcctgatctccgacttctaccctggggctgtgacagtggcttggaaggccgatggatctcctgtgaaagccggcgtggaaaccaccaagccatccaagcagagcaacaacaaatacgccgccagctcctacctgagcctgacacctgagcagtggaagtcccacagatcctacagctgccaagtgacccacgaaggcagcaccgtggaaaagacagtggcccctacagagtgcagcggcagagccgattgcggctttaccagcgagagctaccagcagggcgtgctgagcgcctactacatgtacttgttgctgctgctgaagtccgtggtgtacttcgccatcatcacatgctgcctgctgcggagaaccgccttctgctgcaacggcgagaagtctcgcgccaagagaagcggatctggcgtgaagcagaccctgaatttcgacctgctgaagctggctggcgacgtggaatccaacccaggccctactagtatggactggatttggcgcatccttttccttgtcggcgctgctaccggcgcgcattccttcgaacaagttcagctggttcagagcggagccgaagtgaagaaacctggggcctctgtgaaggtgtcctgcaaggcttccggctataccttcaccagcttttggctgaactgggtccgacaggcccctggacaaggactggaatggatgggcaacatctaccccagcaccagctacaccgtgtacaaccagaaattcaaggaccgcgtgaccatgaccagggacaccagcacaagcacagtgtacatggaactgagcagcctgcggagcgaggataccgccgtgtattattgcgccagaacctggcggggcaacagcttcgattattggggccagggaaccaccgtgaccgtgtcatctacgcgtgcctctacaaagggaccctccgtgtttcctctggctcccagcagcaagtctacaagcggaggaacagccgctctgggctgcctggtcaaggattactttcccgagcctgtgaccgtgtcctggaatagcggagcactgacaagcggcgtgcacacctttccagccgtgctgcaaagcagcggcctgtactctctgagcagcgtggtcacagtgcctagctctagcctgggcacccagacctacatctgcaatgtgaaccacaagcctagcaacaccaaggtggacaagagagtggaacccaagagctgtgaagtgaaaaccgactccaccgaccacgtgaagcccaaagagacagagaacaccaagcagcccagcaagagctgccacaagcccaaggccatcgtgcacaccgagaaagtgaacatgatgagcctgaccgtgctgggcttcagaatcctgctgctgaaagtggccggctttaacctgctgatgaccctgcggctgtggtccagc

SEQ ID NO: 40419 - DNA, 1923 bp, synthetic construct
  source 1..1923: mol_type = other DNA
atggccttaccagtgaccgccttgctcctgccgctggccttgctgctccacgccgccaggccggacatcgtgatgacacagagccctgatagcctggccgtgtctctgggagagagagccaccatcaactgcaagagcagccagagcctgctgaacagcggcaacaacaagaactacgtgacatggtatcagcagaagcccggccagcctcctaagctgctgatctactggggcagcaccagatccacaggcgtgcccgatagattttctggctctggcagcggcaccgacttcaccctgacaatttctagcctgcaagccgaggacgtggccgtgtactactgccagaacgactacacataccccttcaccttcggccagggcaccaagctggaaatcaaactcgaggagggacagcctaaggccaatcctaccgtgacactgttccctccaagcagcgaagaactccaggccaacaaggccacacttgtgtgcctgatctccgacttctaccctggggctgtgacagtggcttggaaggccgatggatctcctgtgaaagccggcgtggaaaccaccaagccatccaagcagagcaacaacaaatacgccgccagctcctacctgagcctgacacctgagcagtggaagtcccacagatcctacagctgccaagtgacccacgaaggcagcaccgtggaaaagacagtggcccctacagagtgcagcggcagagccgattgcggctttaccagcgagagctaccagcagggcgtgctgagcgcctactacatgtacttgttgctgctgctgaagtccgtggtgtacttcgccatcatcacatgctgcctgctgcggagaaccgccttctgctgcaacggcgagaagtctcgcgccaagagaagcggatctggcgtgaagcagaccctgaatttcgacctgctgaagctggctggcgacgtggaatccaacccaggccctactagtatggactggatttggcgcatccttttccttgtcggcgctgctaccggcgcgcattccttcgaacaagttcagctggttcagagcggagccgaagtgaagaaacctggggcctctgtgaaggtgtcctgcaaggcttccggctataccttcaccagcttttggctgaactgggtccgacaggcccctggacaaggactggaatggatgggcaacatctaccccagcgacagctacaccgtgtacaaccagaaattcaaggaccgcgtgaccatgaccagggacaccagcacaagcacagtgtacatggaactgagcagcctgcggagcgaggataccgccgtgtattattgcgccagaacctggcggggcaacagcttcgattattggggccagggaaccaccgtgaccgtgtcatctacgcgtgcctctacaaagggaccctccgtgtttcctctggctcccagcagcaagtctacaagcggaggaacagccgctctgggctgcctggtcaaggattactttcccgagcctgtgaccgtgtcctggaatagcggagcactgacaagcggcgtgcacacctttccagccgtgctgcaaagcagcggcctgtactctctgagcagcgtggtcacagtgcctagctctagcctgggcacccagacctacatctgcaatgtgaaccacaagcctagcaacaccaaggtggacaagagagtggaacccaagagctgtgaagtgaaaaccgactccaccgaccacgtgaagcccaaagagacagagaacaccaagcagcccagcaagagctgccacaagcccaaggccatcgtgcacaccgagaaagtgaacatgatgagcctgaccgtgctgggcttcagaatcctgctgctgaaagtggccggctttaacctgctgatgaccctgcggctgtggtccagc

SEQ ID NO: 40420 - DNA, 1899 bp, synthetic construct
  source 1..1899: mol_type = other DNA
atggccttaccagtgaccgccttgctcctgccgctggccttgctgctccacgccgccaggccgcagatcgtgctgacacagagccctgccatcatgtccgcttctcccggcgagaaagtgaccatgacatgtagcgccagcagcagcgtgtccttcatgcactggtatcagcagaagtccggcacaagccccaagcggtggatctacgataccagcacactggcctctggcgtgccagccagatttggcggatctggcagcggcacatcttacagcctgaccatcagcagcatggaagccgaagatgccgccacctactactgccagcagtggtccagcaatcccctgacatttggagccggcaccaagctggaactgaagagactcgaggagggacagcctaaggccaatcctaccgtgacactgttccctccaagcagcgaagaactccaggccaacaaggccacacttgtgtgcctgatctccgacttctaccctggggctgtgacagtggcttggaaggccgatggatctcctgtgaaagccggcgtggaaaccaccaagccatccaagcagagcaacaacaaatacgccgccagctcctacctgagcctgacacctgagcagtggaagtcccacagatcctacagctgccaagtgacccacgaaggcagcaccgtggaaaagacagtggcccctacagagtgcagcggcagagccgattgcggctttaccagcgagagctaccagcagggcgtgctgagcgcctactacatgtacttgttgctgctgctgaagtccgtggtgtacttcgccatcatcacatgctgcctgctgcggagaaccgccttctgctgcaacggcgagaagtctcgcgccaagagaagcggatctggcgtgaagcagaccctgaatttcgacctgctgaagctggctggcgacgtggaatccaacccaggccctactagtatggactggatttggcgcatccttttccttgtcggcgctgctaccggcgcgcattccttcgaacaagttcagctgcaacagagcggccctgagctggttaagcctggcgcttctgtgcggatctcttgcaaggccagcggctacaccttcaccagctactacatccactgggtcaagcagcggcctggacagggactcgaatggatcggctggatctaccccggcaacctgaacaccaagtacaacgagaagttcaagggcaaagccacactgaccgccgacaagagcagcagcacagcctacatgcagctgagcagcctgacaagcgaggacagcgccgtgtacttctgcgccagatacgactggtacttcgacgtgtggggagccggaaccaccgtgacagtttcttctacgcgtgcctctacaaagggaccctccgtgtttcctctggctcccagcagcaagtctacaagcggaggaacagccgctctgggctgcctggtcaaggattactttcccgagcctgtgaccgtgtcctggaatagcggagcactgacaagcggcgtgcacacctttccagccgtgctgcaaagcagcggcctgtactctctgagcagcgtggtcacagtgcctagctctagcctgggcacccagacctacatctgcaatgtgaaccacaagcctagcaacaccaaggtggacaagagagtggaacccaagagctgtgaagtgaaaaccgactccaccgaccacgtgaagcccaaagagacagagaacaccaagcagcccagcaagagctgccacaagcccaaggccatcgtgcacaccgagaaagtgaacatgatgagcctgaccgtgctgggcttcagaatcctgctgctgaaagtggccggctttaacctgctgatgaccctgcggctgtggtccagc

SEQ ID NO: 40421 - DNA, 1917 bp, synthetic construct
  source 1..1917: mol_type = other DNA
atggccttaccagtgaccgccttgctcctgccgctggccttgctgctccacgccgccaggccggacatccagatgacacagagccctagcagcctgtctgccagcgtgggagacagagtgaccatcacctgtagagccagccagagcatcagcagctacctgaactggtatcagcagaagcccggcaaggcccctaaactgctgatctatgccgccagctctctccagagcggagtgcctagcagattttctggcagcggctccggcaccgatttcaccctgacaatatccagcctccagcctgaggacttcgccacctactactgccagcagagctacagcacccctctgacctttggacagggcaccaaggtggaaatcaagctcgaggagggacagcctaaggccaatcctaccgtgacactgttccctccaagcagcgaagaactccaggccaacaaggccacacttgtgtgcctgatctccgacttctaccctggggctgtgacagtggcttggaaggccgatggatctcctgtgaaagccggcgtggaaaccaccaagccatccaagcagagcaacaacaaatacgccgccagctcctacctgagcctgacacctgagcagtggaagtcccacagatcctacagctgccaagtgacccacgaaggcagcaccgtggaaaagacagtggcccctacagagtgcagcggcagagccgattgcggctttaccagcgagagctaccagcagggcgtgctgagcgcctactacatgtacttgttgctgctgctgaagtccgtggtgtacttcgccatcatcacatgctgcctgctgcggagaaccgccttctgctgcaacggcgagaagtctcgcgccaagagaagcggatctggcgtgaagcagaccctgaatttcgacctgctgaagctggctggcgacgtggaatccaacccaggccctactagtatggactggatttggcgcatccttttccttgtcggcgctgctaccggcgcgcattccttcgaagaggtgcagctggttgaatctggcggaggactggttcagcctggcggatctctgagactgtcttgtgctgccagcggcttcaccttcagctcctacgccatgagctgggtccgacaggctcctggcaaaggactggaatgggtgtccgccatctctggctcaggcggcagcacatattacgccgactctgtgaagggcagattcaccatcagccgggacaacagcaagaacaccctgtacctccagatgaactccctgagagccgaggacaccgccgtgtactattgtgccagactgggctaccccaccaccacactgctgccctttgattattggggccagggcaccctggtcaccgtttcttctacgcgtgcctctacaaagggaccctccgtgtttcctctggctcccagcagcaagtctacaagcggaggaacagccgctctgggctgcctggtcaaggattactttcccgagcctgtgaccgtgtcctggaatagcggagcactgacaagcggcgtgcacacctttccagccgtgctgcaaagcagcggcctgtactctctgagcagcgtggtcacagtgcctagctctagcctgggcacccagacctacatctgcaatgtgaaccacaagcctagcaacaccaaggtggacaagagagtggaacccaagagctgtgaagtgaaaaccgactccaccgaccacgtgaagcccaaagagacagagaacaccaagcagcccagcaagagctgccacaagcccaaggccatcgtgcacaccgagaaagtgaacatgatgagcctgaccgtgctgggcttcagaatcctgctgctgaaagtggccggctttaacctgctgatgaccctgcggctgtggtccagc

SEQ ID NO: 40422 - DNA, 1920 bp, synthetic construct
  source 1..1920: mol_type = other DNA
atggccttaccagtgaccgccttgctcctgccgctggccttgctgctccacgccgccaggccggacatccagatgacacagagccctagcagcctgtctgccagcgtgggagacagagtgaccatcacctgtagagccagccaggacatcaacacagccgtggcttggtatcagcagaagcctggcaaggcccctaagctgctgatctacagcgcctacttcctgtacagcggcgtgcccagcagattcagcggaagcagaagcggcaccgacttcaccctgacaatatccagcctccagcctgaggacttcgccacctactactgccagcagtacagcagatacagccccgtgacctttggacagggcaccaaggtggaaatcaagagactcgaggagggacagcctaaggccaatcctaccgtgacactgttccctccaagcagcgaagaactccaggccaacaaggccacacttgtgtgcctgatctccgacttctaccctggggctgtgacagtggcttggaaggccgatggatctcctgtgaaagccggcgtggaaaccaccaagccatccaagcagagcaacaacaaatacgccgccagctcctacctgagcctgacacctgagcagtggaagtcccacagatcctacagctgccaagtgacccacgaaggcagcaccgtggaaaagacagtggcccctacagagtgcagcggcagagccgattgcggctttaccagcgagagctaccagcagggcgtgctgagcgcctactacatgtacttgttgctgctgctgaagtccgtggtgtacttcgccatcatcacatgctgcctgctgcggagaaccgccttctgctgcaacggcgagaagtctcgcgccaagagaagcggatctggcgtgaagcagaccctgaatttcgacctgctgaagctggctggcgacgtggaatccaacccaggccctactagtatggactggatttggcgcatccttttccttgtcggcgctgctaccggcgcgcattccttcgaagaagttcagctggttgaaagtggtggcggcctggttcaacctggcggatctctgagactgagctgtgccgccagcggcttcaatgtgtacgcctctggaatgcactgggtccgacaggcccctggcaaaggacttgagtgggtcgccaaaatctaccccgacagcgactacacctattacgccgacagcgtgaagggcagattcaccatcagcgccgacaccagcaagaacaccgcctacctccagatgaactccctgagagccgaggacaccgccgtgtactactgtagcagagacagcagcttctactacgtgtacgctatggactactggggccagggcacactggtcacagtctcttctacgcgtgcctctacaaagggaccctccgtgtttcctctggctcccagcagcaagtctacaagcggaggaacagccgctctgggctgcctggtcaaggattactttcccgagcctgtgaccgtgtcctggaatagcggagcactgacaagcggcgtgcacacctttccagccgtgctgcaaagcagcggcctgtactctctgagcagcgtggtcacagtgcctagctctagcctgggcacccagacctacatctgcaatgtgaaccacaagcctagcaacaccaaggtggacaagagagtggaacccaagagctgtgaagtgaaaaccgactccaccgaccacgtgaagcccaaagagacagagaacaccaagcagcccagcaagagctgccacaagcccaaggccatcgtgcacaccgagaaagtgaacatgatgagcctgaccgtgctgggcttcagaatcctgctgctgaaagtggccggctttaacctgctgatgaccctgcggctgtggtccagc

SEQ ID NO: 40423 - DNA, 1920 bp, synthetic construct
  source 1..1920: mol_type = other DNA
atggccttaccagtgaccgccttgctcctgccgctggccttgctgctccacgccgccaggccggacatccagatgacacagagccctagcagcctgtctgccagcgtgggagacagagtgaccatcacctgtagagccagccaggacgtgaacacagccgtggcttggtatcagcagaagcctggcaaggcccctaagctgctgatctacagcgcctacttcctgtacagcggcgtgcccagcagattcagcggaagcagaagcggcaccgacttcaccctgacaatatccagcctccagcctgaggacttcgccacctactactgccagcagtacagcagatacagccccgtgacctttggacagggcaccaaggtggaaatcaagagactcgaggagggacagcctaaggccaatcctaccgtgacactgttccctccaagcagcgaagaactccaggccaacaaggccacacttgtgtgcctgatctccgacttctaccctggggctgtgacagtggcttggaaggccgatggatctcctgtgaaagccggcgtggaaaccaccaagccatccaagcagagcaacaacaaatacgccgccagctcctacctgagcctgacacctgagcagtggaagtcccacagatcctacagctgccaagtgacccacgaaggcagcaccgtggaaaagacagtggcccctacagagtgcagcggcagagccgattgcggctttaccagcgagagctaccagcagggcgtgctgagcgcctactacatgtacttgttgctgctgctgaagtccgtggtgtacttcgccatcatcacatgctgcctgctgcggagaaccgccttctgctgcaacggcgagaagtctcgcgccaagagaagcggatctggcgtgaagcagaccctgaatttcgacctgctgaagctggctggcgacgtggaatccaacccaggccctactagtatggactggatttggcgcatccttttccttgtcggcgctgctaccggcgcgcattccttcgaagaagttcagctggttgaaagtggtggcggcctggttcaacctggcggatctctgagactgagctgtgccgccagcggcttcaatgtgtacgcctctggaatgcactgggtccgacaggcccctggcaaaggacttgagtgggtcgccaaaatctaccccgacagcgactacacctattacgccgacagcgtgaagggcagattcaccatcagcgccgacaccagcaagaacaccgcctacctccagatgaactccctgagagccgaggacaccgccgtgtactactgtagcagagacagcagcttctactacgtgtacgctatggactactggggccagggcacactggtcacagtctcttctacgcgtgcctctacaaagggaccctccgtgtttcctctggctcccagcagcaagtctacaagcggaggaacagccgctctgggctgcctggtcaaggattactttcccgagcctgtgaccgtgtcctggaatagcggagcactgacaagcggcgtgcacacctttccagccgtgctgcaaagcagcggcctgtactctctgagcagcgtggtcacagtgcctagctctagcctgggcacccagacctacatctgcaatgtgaaccacaagcctagcaacaccaaggtggacaagagagtggaacccaagagctgtgaagtgaaaaccgactccaccgaccacgtgaagcccaaagagacagagaacaccaagcagcccagcaagagctgccacaagcccaaggccatcgtgcacaccgagaaagtgaacatgatgagcctgaccgtgctgggcttcagaatcctgctgctgaaagtggccggctttaacctgctgatgaccctgcggctgtggtccagc

SEQ ID NO: 40424 - DNA, 1905 bp, synthetic construct
  source 1..1905: mol_type = other DNA
atggccttaccagtgaccgccttgctcctgccgctggccttgctgctccacgccgccaggccggacatccagatgacacagagccctagcagcctgtctgccagcgtgggagacagagtgaccatcacctgtagagccagccaggatgtgtctacagccgtggcctggtatcagcagaagcctggaaaggcccctaagctgctgatctacagcgccagctttctgtactccggcgtgcccagcagattcagcggaagcagaagcggcaccgacttcaccctgacaatatccagcctccagcctgaggacttcgccacctactactgccagcagtacctgtaccagccttggacattcggccagggcaccaaggtggaaatcaagagactcgaggagggacagcctaaggccaatcctaccgtgacactgttccctccaagcagcgaagaactccaggccaacaaggccacacttgtgtgcctgatctccgacttctaccctggggctgtgacagtggcttggaaggccgatggatctcctgtgaaagccggcgtggaaaccaccaagccatccaagcagagcaacaacaaatacgccgccagctcctacctgagcctgacacctgagcagtggaagtcccacagatcctacagctgccaagtgacccacgaaggcagcaccgtggaaaagacagtggcccctacagagtgcagcggcagagccgattgcggctttaccagcgagagctaccagcagggcgtgctgagcgcctactacatgtacttgttgctgctgctgaagtccgtggtgtacttcgccatcatcacatgctgcctgctgcggagaaccgccttctgctgcaacggcgagaagtctcgcgccaagagaagcggatctggcgtgaagcagaccctgaatttcgacctgctgaagctggctggcgacgtggaatccaacccaggccctactagtatggactggatttggcgcatccttttccttgtcggcgctgctaccggcgcgcattccttcgaagaagttcagctggttgagtctggcggaggactggttcaacctggcggaagcctgagactgtcttgtgccgccagcggcttcaacatcgactactacggaatgcactgggtccgacaggcccctggcaaaggacttgaatgggtcgcctctctgtacggcggcagcgatagcacagattacgccgactctgtgaagggcagattcaccatcagcgccgacaccagcaagaacaccgcctacctccagatgaactccctgagagccgaagataccgccgtgtactactgctccagacagtacagcgcctacttcgactattggggccagggaaccctggtcaccgttagctctacgcgtgcctctacaaagggaccctccgtgtttcctctggctcccagcagcaagtctacaagcggaggaacagccgctctgggctgcctggtcaaggattactttcccgagcctgtgaccgtgtcctggaatagcggagcactgacaagcggcgtgcacacctttccagccgtgctgcaaagcagcggcctgtactctctgagcagcgtggtcacagtgcctagctctagcctgggcacccagacctacatctgcaatgtgaaccacaagcctagcaacaccaaggtggacaagagagtggaacccaagagctgtgaagtgaaaaccgactccaccgaccacgtgaagcccaaagagacagagaacaccaagcagcccagcaagagctgccacaagcccaaggccatcgtgcacaccgagaaagtgaacatgatgagcctgaccgtgctgggcttcagaatcctgctgctgaaagtggccggctttaacctgctgatgaccctgcggctgtggtccagc

SEQ ID NO: 40425 - DNA, 1911 bp, synthetic construct
  source 1..1911: mol_type = other DNA
atggccttaccagtgaccgccttgctcctgccgctggccttgctgctccacgccgccaggccggagatcgtgctgacacagtctcccgccacactgtcactgtctccaggcgaaagagccacactgagctgtagagccagccagagcgtgtcctcttacctggcctggtatcagcagaagcctggacaggctccccggctgctgatctacgatgccagcaatagagccacaggcatccccgccagattttctggctctggcagcggcaccgatttcaccctgaccataagcagcctggaacctgaggacttcgccgtgtactactgccagcagagaagcgactggcccctgacatttggcggcggaacaaaggtggaaatcaaactcgaggagggacagcctaaggccaatcctaccgtgacactgttccctccaagcagcgaagaactccaggccaacaaggccacacttgtgtgcctgatctccgacttctaccctggggctgtgacagtggcttggaaggccgatggatctcctgtgaaagccggcgtggaaaccaccaagccatccaagcagagcaacaacaaatacgccgccagctcctacctgagcctgacacctgagcagtggaagtcccacagatcctacagctgccaagtgacccacgaaggcagcaccgtggaaaagacagtggcccctacagagtgcagcggcagagccgattgcggctttaccagcgagagctaccagcagggcgtgctgagcgcctactacatgtacttgttgctgctgctgaagtccgtggtgtacttcgccatcatcacatgctgcctgctgcggagaaccgccttctgctgcaacggcgagaagtctcgcgccaagagaagcggatctggcgtgaagcagaccctgaatttcgacctgctgaagctggctggcgacgtggaatccaacccaggccctactagtatggactggatttggcgcatccttttccttgtcggcgctgctaccggcgcgcattccttcgaacaagttcagctggttcagagcggagccgaagtgaagaaacctggcagcagcgtgaaggtgtcctgcaaagcaagcggcggcacctttagctcctacgccatccactgggttcgacaggcaccaggacaaggactggaatggatgggcagaatcatccccatcgagggcagagcctactacgcccagaaattccagggcagagtgaccatcaccgccgacgagtctacaagcaccgcctacatggaactgagcagcctgagaagcgaggataccgctgtgtactattgcgccagaggccggtacagctacagatattggttcgactactggggccagggcaccctggttacagtctcttctacgcgtgcctctacaaagggaccctccgtgtttcctctggctcccagcagcaagtctacaagcggaggaacagccgctctgggctgcctggtcaaggattactttcccgagcctgtgaccgtgtcctggaatagcggagcactgacaagcggcgtgcacacctttccagccgtgctgcaaagcagcggcctgtactctctgagcagcgtggtcacagtgcctagctctagcctgggcacccagacctacatctgcaatgtgaaccacaagcctagcaacaccaaggtggacaagagagtggaacccaagagctgtgaagtgaaaaccgactccaccgaccacgtgaagcccaaagagacagagaacaccaagcagcccagcaagagctgccacaagcccaaggccatcgtgcacaccgagaaagtgaacatgatgagcctgaccgtgctgggcttcagaatcctgctgctgaaagtggccggctttaacctgctgatgaccctgcggctgtggtccagc

SEQ ID NO: 40426 - DNA, 1911 bp, synthetic construct
  source 1..1911: mol_type = other DNA
atggccttaccagtgaccgccttgctcctgccgctggccttgctgctccacgccgccaggccggagatcgtgctgacacagtctcccgccacactgtcactgtctccaggcgaaagagccacactgagctgtagagccagccagagcgtgtcctcttacctggcctggtatcagcagaagcctggacaggctccccggctgctgatctacgatgccagcaatagagccacaggcatccccgccagattttctggctctggcagcggcaccgatttcaccctgaccataagcagcctggaacctgaggacttcgccgtgtactactgccagcagagaagcaactggcccctgacctttggacagggcaccaaggtggaaatcaaactcgaggagggacagcctaaggccaatcctaccgtgacactgttccctccaagcagcgaagaactccaggccaacaaggccacacttgtgtgcctgatctccgacttctaccctggggctgtgacagtggcttggaaggccgatggatctcctgtgaaagccggcgtggaaaccaccaagccatccaagcagagcaacaacaaatacgccgccagctcctacctgagcctgacacctgagcagtggaagtcccacagatcctacagctgccaagtgacccacgaaggcagcaccgtggaaaagacagtggcccctacagagtgcagcggcagagccgattgcggctttaccagcgagagctaccagcagggcgtgctgagcgcctactacatgtacttgttgctgctgctgaagtccgtggtgtacttcgccatcatcacatgctgcctgctgcggagaaccgccttctgctgcaacggcgagaagtctcgcgccaagagaagcggatctggcgtgaagcagaccctgaatttcgacctgctgaagctggctggcgacgtggaatccaacccaggccctactagtatggactggatttggcgcatccttttccttgtcggcgctgctaccggcgcgcattccttcgaacaagttcagctggttcagagcggagccgaagtgaagaaacctggcagcagcgtgaaggtgtcctgcaaagcaagcggcggcacctttagcacctacgccatccactgggttcgacaggcaccaggacaaggactggaatggatgggcagaatcatccccatcgagggcagagcctactacgcccagaaattccagggcagagtgaccatcaccgccgacgagtctacaagcaccgcctacatggaactgagcagcctgagaagcgaggataccgctgtgtactattgcgccagaggccggtacagctacagatattggttcgactactggggccagggcaccctggttacagtctcttctacgcgtgcctctacaaagggaccctccgtgtttcctctggctcccagcagcaagtctacaagcggaggaacagccgctctgggctgcctggtcaaggattactttcccgagcctgtgaccgtgtcctggaatagcggagcactgacaagcggcgtgcacacctttccagccgtgctgcaaagcagcggcctgtactctctgagcagcgtggtcacagtgcctagctctagcctgggcacccagacctacatctgcaatgtgaaccacaagcctagcaacaccaaggtggacaagagagtggaacccaagagctgtgaagtgaaaaccgactccaccgaccacgtgaagcccaaagagacagagaacaccaagcagcccagcaagagctgccacaagcccaaggccatcgtgcacaccgagaaagtgaacatgatgagcctgaccgtgctgggcttcagaatcctgctgctgaaagtggccggctttaacctgctgatgaccctgcggctgtggtccagc

SEQ ID NO: 40427 - DNA, 1953 bp, synthetic construct
  source 1..1953: mol_type = other DNA
atggccttaccagtgaccgccttgctcctgccgctggccttgctgctccacgccgccaggccggacatccagatgacacagagcccctctagcctgtctgccagcgtgggagacagagtgaccatcacctgtagagccagccagagcatcagaaactacctgaactggtatcagcaaaagcccggcaaggcccctgagctgctgattcatgctgcaagcagcctccagagcggcgtgccaagcagattttctggcagcggcagcggaaccgacttcaccctgacaatatctagcctccagcctgaggacttcgccagctactactgccagcagagctacagcgcccctcctatcacctttggacagggcaccagactggaaatcaagctcgaggagggacagcctaaggccaatcctaccgtgacactgttccctccaagcagcgaagaactccaggccaacaaggccacacttgtgtgcctgatctccgacttctaccctggggctgtgacagtggcttggaaggccgatggatctcctgtgaaagccggcgtggaaaccaccaagccatccaagcagagcaacaacaaatacgccgccagctcctacctgagcctgacacctgagcagtggaagtcccacagatcctacagctgccaagtgacccacgaaggcagcaccgtggaaaagacagtggcccctacagagtgcagcggcagagccgattgcggctttaccagcgagagctaccagcagggcgtgctgagcgcctactacatgtacttgttgctgctgctgaagtccgtggtgtacttcgccatcatcacatgctgcctgctgcggagaaccgccttctgctgcaacggcgagaagtctcgcgccaagagaagcggatctggcgtgaagcagaccctgaatttcgacctgctgaagctggctggcgacgtggaatccaacccaggccctactagtatggactggatttggcgcatccttttccttgtcggcgctgctaccggcgcgcattccttcgaacaggttcagctccagcagtctggacctggcctggtcaagcctagccagacactgtctctgacctgtgccatcagcggcgatagcgtgtcctctaatagagccgcctggaactggatcagacagagccctagcagaggactccagtggctgggcagaacctactaccgcagcaagtggtacaacgactacgccgtgtctctgcggagccggatcaccatcaatcccgtgaccagcaagaaccaggtggccctgcacatgaacagcgtgacccctgaagataccgccgtgtactactgtgccagagccggaattgtggtggtgcccggacctgagacattctactactacgaccacggcctggacgtgtggggccagggaacaacagtgactgtctcttctacgcgtgcctctacaaagggaccctccgtgtttcctctggctcccagcagcaagtctacaagcggaggaacagccgctctgggctgcctggtcaaggattactttcccgagcctgtgaccgtgtcctggaatagcggagcactgacaagcggcgtgcacacctttccagccgtgctgcaaagcagcggcctgtactctctgagcagcgtggtcacagtgcctagctctagcctgggcacccagacctacatctgcaatgtgaaccacaagcctagcaacaccaaggtggacaagagagtggaacccaagagctgtgaagtgaaaaccgactccaccgaccacgtgaagcccaaagagacagagaacaccaagcagcccagcaagagctgccacaagcccaaggccatcgtgcacaccgagaaagtgaacatgatgagcctgaccgtgctgggcttcagaatcctgctgctgaaagtggccggctttaacctgctgatgaccctgcggctgtggtccagc

SEQ ID NO: 40428 - DNA, 1884 bp, synthetic construct
  source 1..1884: mol_type = other DNA
atggccttaccagtgaccgccttgctcctgccgctggccttgctgctccacgccgccaggccggacatccagctgacacagagccctagcacactgagcgccagcatgggcgacagagtgaccatcacatgtagcgcctctagcagcgtgcggttcatccactggtatcagcagaagcctggcaaggcccctaagcggctgatctacgataccagcaaactggcctctggcgtgcccagcagattttctggctctggcagcggcaccgacttcaccctgacaatatctagcctccagcctgaggacttcgccacctactactgtcagcagtggggcagcagccctttcacctttggacagggcaccaaggtggaaatcaagctcgaggagggacagcctaaggccaatcctaccgtgacactgttccctccaagcagcgaagaactccaggccaacaaggccacacttgtgtgcctgatctccgacttctaccctggggctgtgacagtggcttggaaggccgatggatctcctgtgaaagccggcgtggaaaccaccaagccatccaagcagagcaacaacaaatacgccgccagctcctacctgagcctgacacctgagcagtggaagtcccacagatcctacagctgccaagtgacccacgaaggcagcaccgtggaaaagacagtggcccctacagagtgcagcggcagagccgattgcggctttaccagcgagagctaccagcagggcgtgctgagcgcctactacatgtacttgttgctgctgctgaagtccgtggtgtacttcgccatcatcacatgctgcctgctgcggagaaccgccttctgctgcaacggcgagaagtctcgcgccaagagaagcggatctggcgtgaagcagaccctgaatttcgacctgctgaagctggctggcgacgtggaatccaacccaggccctactagtatggactggatttggcgcatccttttccttgtcggcgctgctaccggcgcgcattccttcgaagtgcagctggttgagtacggtggcggactggttcaacctggcggtagcctgagactgtcttgtgccgccagcggcttcaacatcaaggactactatatccactgggtccgacaggccccaggcaaaggacttgaatgggttgcctggatcgaccccgagaacggcgataccgagttcgtgcccaagtttcagggcagagccaccatgagcgccgacacctctaagaacacagcctacctccagatgaacagcctgagagccgaggacaccgccgtgtactactgtaaaaccggcggcttttggggccagggcacactggtcacagtcagctctacgcgtgcctctacaaagggaccctccgtgtttcctctggctcccagcagcaagtctacaagcggaggaacagccgctctgggctgcctggtcaaggattactttcccgagcctgtgaccgtgtcctggaatagcggagcactgacaagcggcgtgcacacctttccagccgtgctgcaaagcagcggcctgtactctctgagcagcgtggtcacagtgcctagctctagcctgggcacccagacctacatctgcaatgtgaaccacaagcctagcaacaccaaggtggacaagagagtggaacccaagagctgtgaagtgaaaaccgactccaccgaccacgtgaagcccaaagagacagagaacaccaagcagcccagcaagagctgccacaagcccaaggccatcgtgcacaccgagaaagtgaacatgatgagcctgaccgtgctgggcttcagaatcctgctgctgaaagtggccggctttaacctgctgatgaccctgcggctgtggtccagctaa

SEQ ID NO: 40429 - DNA, 1899 bp, synthetic construct
  source 1..1899: mol_type = other DNA
atggccttaccagtgaccgccttgctcctgccgctggccttgctgctccacgccgccaggccggacatccagatgacacagagccctagcagcctgtctgccagcgtgggagacagagtgaccatcacatgcaaggccagccaggatgtgggcacagccgtggattggtatcagcagaagcctggcaaggcccctaagctgctgatctactgggccagcacaagacacacaggcgtgcccagcagattttctggcagcggctctggcaccgacttcaccctgacaatatccagcctccagcctgaggacttcgccacctactactgccagcagtacaacagctaccctctgaccttcggccagggcaccaaggtggaaatcaaaagactcgaggagggacagcctaaggccaatcctaccgtgacactgttccctccaagcagcgaagaactccaggccaacaaggccacacttgtgtgcctgatctccgacttctaccctggggctgtgacagtggcttggaaggccgatggatctcctgtgaaagccggcgtggaaaccaccaagccatccaagcagagcaacaacaaatacgccgccagctcctacctgagcctgacacctgagcagtggaagtcccacagatcctacagctgccaagtgacccacgaaggcagcaccgtggaaaagacagtggcccctacagagtgcagcggcagagccgattgcggctttaccagcgagagctaccagcagggcgtgctgagcgcctactacatgtacttgttgctgctgctgaagtccgtggtgtacttcgccatcatcacatgctgcctgctgcggagaaccgccttctgctgcaacggcgagaagtctcgcgccaagagaagcggatctggcgtgaagcagaccctgaatttcgacctgctgaagctggctggcgacgtggaatccaacccaggccctactagtatggactggatttggcgcatccttttccttgtcggcgctgctaccggcgcgcattccttcgaagtgcagctggttgaatcaggtggcggcctggttcaacctggcggatctctgagactgagctgtgccgccagcggctacacctttaccgagtacacaatccactgggtccgacaggcccctggcaaaggacttgagtgggtcgccaacatcaaccccaacaatggcggcaccacctacaaccagaagttcgaggacagattcaccatcagccgggacaacagcaagaacaccctgtacctccagatgaactccctgagagccgaggacaccgccgtgtactattgtgccagaggctggaacttcgactactggggccagggaacactggtcaccgttagctctacgcgtgcctctacaaagggaccctccgtgtttcctctggctcccagcagcaagtctacaagcggaggaacagccgctctgggctgcctggtcaaggattactttcccgagcctgtgaccgtgtcctggaatagcggagcactgacaagcggcgtgcacacctttccagccgtgctgcaaagcagcggcctgtactctctgagcagcgtggtcacagtgcctagctctagcctgggcacccagacctacatctgcaatgtgaaccacaagcctagcaacaccaaggtggacaagagagtggaacccaagagctgtgaagtgaaaaccgactccaccgaccacgtgaagcccaaagagacagagaacaccaagcagcccagcaagagctgccacaagcccaaggccatcgtgcacaccgagaaagtgaacatgatgagcctgaccgtgctgggcttcagaatcctgctgctgaaagtggccggctttaacctgctgatgaccctgcggctgtggtccagctaa

SEQ ID NO: 40430 - DNA, 2571 bp, synthetic construct
  source 1..2571: mol_type = other DNA
atggccttaccagtgaccgccttgctcctgccgctggccttgctgctccacgccgccaggccggacatccagatgacacagagccctagcagcctgtctgccagcgtgggagacagagtgaccatcacatgcaaggccagcgaccacatcaacaactggctggcctggtatcagcagaagcctggacaggcccctaagctgctgatctacggcgctaccacactggaaacaggcgtgcccagcagattttctggcagcggctctggcaccgactacaccctgacaatatccagcctccagcctgaggacttcgccacctactactgtcagcagagctggaacaccccttggacattcggccagggcaccaagctggaaatcaagagactcgaggacctgaagaacgtgttcccacctgaggtggccgtgttcgagcctagcgaggccgagatcagccacacccagaaagccaccctcgtgtgcctggctaccggcttctaccccgaccatgtggaactgtcttggtgggtcaacggcaaagaggtgcacagcggcgtgtctaccgacccccagccactgaaagaacagcccgccctgaacgacagccggtactgcctgagcagcagactgagagtgtccgccaccttctggcagaacccccggaaccacttcagatgccaggtgcagttctacggcctgagcgagaacgacgagtggacccaggacagagccaagcccgtgacccagatcgtgtctgccgaagcctggggcagagccgattgcggctttaccagcgagagctaccagcagggcgtgctgagcgcctactacatgtacttgttgctgctgctgaagtccgtggtgtacttcgccatcatcacatgctgcctgctgcggagaaccgccttctgctgcaacggcgagaagtctagggccaagcgatctggatctggagcaacaaacttctcactactcaaacaagcaggtgacgtggaggagaatcccgggcctactagtatggactggatttggcgcatccttttccttgtcggcgctgctaccggcgcgcattccttcgaacaagttcagcttcaacagcctggcgctgagctggtcaaacctggcgcttctgtgaagatgagctgcaaagccagcggctacgccttcagcagctactggatcaactggatgaagcagaaacccggccagggactcgaatggatcggccaaatctatcccggcgacggcgacaccaactacaacggcaagttcaagggcagagccacactgaccgccgatacctctagcagcacagcctacatgcagctgagcagcctgaccagcgaagatagcgccgtgtacttctgtgcccggtccatcacaacagtcgtgggctgcgctatggactattggggccagggaacaagcgtgaccgtgtctagtacgcgtatccagaaccctgatcctgccgtgtaccagctgcgggatagcaagagcagcgacaagagcgtgtgtctgttcaccgacttcgacagccagaccaacgtgtcccagagcaaggactccgacgtgtacatcaccgataagtgcgtgctggacatgcggagcatggacttcaagagcaactccgccgtggcctggtccaacaagtccgatttcgcctgcgccaacgccttcaacaacagcattatccccgaggacacattcttcccaagccccgagagcagctgcgacgtgaagctggtggaaaagagcttcgagacagacaccaacctgaacttccagaacctgagcgtgatcggcttcagaatcctgctgctgaaagtggccggctttaacctgctgatgaccctgcggctgtggtccagccgcgccaagagaagcggatctggcgtgaagcagaccctgaatttcgacctgctgaagctggctggcgacgtggaatccaacccaggcccttctagaggccatatgaccgagtacaagcccacggtgcgcctcgccacccgcgacgacgtccccagggccgtacgcaccctcgccgccgcgttcgccgactaccccgccacgcgccacaccgtcgatccggaccgccacatcgagcgggtcaccgagctgcaagaactcttcctcacgcgcgtcgggctcgacatcggcaaggtgtgggtcgcggacgacggcgccgcggtggcggtctggaccacgccggagagcgtcgaagcgggggcggtgttcgccgagatcggcccgcgcatggccgagttgagcggttcccggctggccgcgcagcaacagatggaaggcctcctggcgccgcaccggcccaaggagcccgcgtggttcctggccaccgtcggcgtctcgcccgaccaccagggcaagggtctgggcagcgccgtcgtgctccccggagtggaggcggccgagcgcgccggggtgcccgccttcctggagacctccgcgccccgcaacctccccttctacgagcggctcggcttcaccgtcaccgccgacgtcgaggtgcccgaaggaccgcgcacctggtgcatgacccgcaagcccggtgcctga

SEQ ID NO: 40431 - DNA, 1890 bp, synthetic construct
  source 1..1890: mol_type = other DNA
atggccttaccagtgaccgccttgctcctgccgctggccttgctgctccacgccgccaggccggacatccagatgacacagagccctagcagcctgtctgccagcgtgggagacagagtgaccatcacatgcaaggccagcgaccacatcaacaactggctggcctggtatcagcagaagcctggacaggcccctaagctgctgatctacggcgctaccacactggaaacaggcgtgcccagcagattttctggcagcggctctggcaccgactacaccctgacaatatccagcctccagcctgaggacttcgccacctactactgtcagcagagctggaacaccccttggacattcggccagggcaccaagctggaaatcaagagactcgagatccagaaccctgatcctgccgtgtaccagctgcgggatagcaagagcagcgacaagagcgtgtgtctgttcaccgacttcgacagccagaccaacgtgtcccagagcaaggactccgacgtgtacatcaccgataagtgcgtgctggacatgcggagcatggacttcaagagcaactccgccgtggcctggtccaacaagtccgatttcgcctgcgccaacgccttcaacaacagcattatccccgaggacacattcttcccaagccccgagagcagctgcgacgtgaagctggtggaaaagagcttcgagacagacaccaacctgaacttccagaacctgagcgtgatcggcttcagaatcctgctgctgaaagtggccggctttaacctgctgatgaccctgcggctgtggtccagctctagtcgcgccaagagaagcggatctggcgtgaagcagaccctgaatttcgacctgctgaagctggctggcgacgtggaatccaacccaggccctactagtatggactggatttggcgcatccttttccttgtcggcgctgctaccggcgcgcattccttcgaacaagttcagcttcaacagcctggcgctgagctggtcaaacctggcgcttctgtgaagatgagctgcaaagccagcggctacgccttcagcagctactggatcaactggatgaagcagaaacccggccagggactcgaatggatcggccaaatctatcccggcgacggcgacaccaactacaacggcaagttcaagggcagagccacactgaccgccgatacctctagcagcacagcctacatgcagctgagcagcctgaccagcgaagatagcgccgtgtacttctgtgcccggtccatcacaacagtcgtgggctgcgctatggactattggggccagggaacaagcgtgaccgtgtctagtacgcgtgaggacctgaagaacgtgttcccacctgaggtggccgtgttcgagcctagcgaggccgagatcagccacacccagaaagccaccctcgtgtgcctggctaccggcttctaccccgaccatgtggaactgtcttggtgggtcaacggcaaagaggtgcacagcggcgtgtgtaccgacccccagccactgaaagaacagcccgccctgaacgacagccggtactgcctgagcagcagactgagagtgtccgccaccttctggcagaacccccggaaccacttcagatgccaggtgcagttctacggcctgagcgagaacgacgagtggacccaggacagagccaagcccgtgacccagatcgtgtctgccgaagcctggggcagagccgattgcggctttaccagcgagagctaccagcagggcgtgctgagcgcctactacatgtacttgttgctgctgctgaagtccgtggtgtacttcgccatcatcacatgctgcctgctgcggagaaccgccttctgctgcaacggcgagaagtcttaa

SEQ ID NO: 40432 - DNA, 2301 bp, synthetic construct
  source 1..2301: mol_type = other DNA
atggccttaccagtgaccgccttgctcctgccgctggccttgctgctccacgccgccaggccggcatgccaggttcagctgcaagagtctggccctggcctggtcaagcctagccaaacactgagcctgacctgtaccgtgtctggcggctctatcaccaccggcgagttctactggaactggttcagacagcctcctggcaaaggactggaatggatgggagccattgccgccagcggcagcacaacatacagccctagcttcgagagccggaccagcatcagcagagacaccagcaagaatcagttcagcctgaagctgagcagcgtgacagccgccgatacagccgtgtattactgcggcagatcctttggagtggccgccgtgacaaccggccagaatagaggacagggcaccctggtcacagtgtctagcggtaccggcggaggcggatctggcggcggaggtagcggtggcggaggatctgaattcgacatccagatgacacagagccctagcagcctgtctgccagcgtgggagacagagtgaccatcacatgcaaggccagcgaccacatcaacaactggctggcctggtatcagcagaagcctggacaggcccctaagctgctgatctacggcgctaccacactggaaacaggcgtgcccagcagattttctggcagcggctctggcaccgactacaccctgacaatatccagcctccagcctgaggacttcgccacctactactgtcagcagagctggaacaccccttggacattcggccagggcaccaagctggaaatcaagagactcgaggacctgaagaacgtgttcccacctgaggtggccgtgttcgagcctagcgaggccgagatcagccacacccagaaagccaccctcgtgtgcctggctaccggcttctaccccgaccatgtggaactgtcttggtgggtcaacggcaaagaggtgcacagcggcgtgtgtaccgacccccagccactgaaagaacagcccgccctgaacgacagccggtactgcctgagcagcagactgagagtgtccgccaccttctggcagaacccccggaaccacttcagatgccaggtgcagttctacggcctgagcgagaacgacgagtggacccaggacagagccaagcccgtgacccagatcgtgtctgccgaagcctggggcagagccgattgcggctttaccagcgagagctaccagcagggcgtgctgagcgccaccatcctgtacttgttgctgctgctgaagtccgtggtgtacttcgccatcatcacatgctgcctgctgcggagaaccgccttctgctgcaacggcgagaagtctagggccaagcgatctggatctggagcaacaaacttctcactactcaaacaagcaggtgacgtggaggagaatcccgggcctactagtatggactggatttggcgcatccttttccttgtcggcgctgctaccggcgcgcattccttcgaacaagttcagcttcaacagcctggcgctgagctggtcaaacctggcgcttctgtgaagatgagctgcaaagccagcggctacgccttcagcagctactggatcaactggatgaagcagaaacccggccagggactcgaatggatcggccaaatctatcccggcgacggcgacaccaactacaacggcaagttcaagggcagagccacactgaccgccgatacctctagcagcacagcctacatgcagctgagcagcctgaccagcgaagatagcgccgtgtacttctgtgcccggtccatcacaacagtcgtgggctgcgctatggactattggggccagggaacaagcgtgaccgtgtctagtacgcgtatccagaaccctgatcctgccgtgtaccagctgcgggatagcaagagcagcgacaagagcgtgtgtctgttcaccgacttcgacagccagaccaacgtgtcccagagcaaggactccgacgtgtacatcaccgataagtgcgtgctggacatgcggagcatggacttcaagagcaactccgccgtggcctggtccaacaagtccgatttcgcctgcgccaacgccttcaacaacagcattatccccgaggacacattcttcccaagccccgagagcagctgcgacgtgaagctggtggaaaagagcttcgagacagacaccaacctgaacttccagaacctgagcgtgatcggcttcagaatcctgctgctgaaagtggccggctttaacctgctgatgaccctgcggctgtggtccagctaa

SEQ ID NO: 40433 - DNA, 2301 bp, synthetic construct
  source 1..2301: mol_type = other DNA
atggccttaccagtgaccgccttgctcctgccgctggccttgctgctccacgccgccaggccggcatgccaggttcagctgcaagagtctggccctggcctggtcaagcctagccaaacactgagcctgacctgtaccgtgtctggcggctctatcaccaccggcgagttctactggaactggttcagacagcctcctggcaaaggactggaatggatgggagccattgccgccagcggcagcacaacatacagccctagcttcgagagccggaccagcatcagcagagacaccagcaagaatcagttcagcctgaagctgagcagcgtgacagccgccgatacagccgtgtattactgcggcagatcctttggagtggccgccgtgacaaccggccagaatagaggacagggcaccctggtcacagtgtctagcggtaccggcggaggcggatctggcggcggaggtagcggtggcggaggatctgaattcgacatccagatgacacagagccctagcagcctgtctgccagcgtgggagacagagtgaccatcacatgcaaggccagcgaccacatcaacaactggctggcctggtatcagcagaagcctggacaggcccctaagctgctgatctacggcgctaccacactggaaacaggcgtgcccagcagattttctggcagcggctctggcaccgactacaccctgacaatatccagcctccagcctgaggacttcgccacctactactgtcagcagagctggaacaccccttggacattcggccagggcaccaagctggaaatcaagagactcgaggacctgaagaacgtgttcccacctgaggtggccgtgttcgagcctagcgaggccgagatcagccacacccagaaagccaccctcgtgtgcctggctaccggcttctaccccgaccgtgtggaactgtcttggtgggtcaacggcaaagaggtgcacagcggcgtgtgtaccgacccccagccactgaaagaacagcccgccctgaacgacagccggtactgcctgagcagcagactgagagtgtccgccaccttctggcagaacccccggaaccacttcagatgccaggtgcagttctacggcctgagcgagaacgacgagtggacccaggacagagccaagcccgtgacccagatcgtgtctgccgaagcctggggcagagccgattgcggctttaccagcgagagctaccagcagggcgtgctgagcgcctactacatgtacttgttgctgctgctgaagtccgtggtgtacttcgccatcatcacatgctgcctgctgcggagaaccgccttctgctgcaacggcgagaagtctagggccaagcgatctggatctggagcaacaaacttctcactactcaaacaagcaggtgacgtggaggagaatcccgggcctactagtatggactggatttggcgcatccttttccttgtcggcgctgctaccggcgcgcattccttcgaacaagttcagcttcaacagcctggcgctgagctggtcaaacctggcgcttctgtgaagatgagctgcaaagccagcggctacgccttcagcagctactggatcaactggatgaagcagaaacccggccagggactcgaatggatcggccaaatctatcccggcgacggcgacaccaactacaacggcaagttcaagggcagagccacactgaccgccgatacctctagcagcacagcctacatgcagctgagcagcctgaccagcgaagatagcgccgtgtacttctgtgcccggtccatcacaacagtcgtgggctgcgctatggactattggggccagggaacaagcgtgaccgtgtctagtacgcgtatccagaaccctgatcctgccgtgtaccagctgcgggatagcaagagcagcgacaagagcgtgtgtctgttcaccgacttcgacagccagaccaacgtgtcccagagcaaggactccgacgtgtacatcaccgataagtgcgtgctggacatgcggagcatggacttcaagagcaactccgccgtggcctggtccaacaagtccgatttcgcctgcgccaacgccttcaacaacagcattatccccgaggacacattcttcccaagccccgagagcagctgcgacgtgaagctggtggaaaagagcttcgagacagacaccaacctgaacttccagaacctgagcgtgatcggcttcagaatcctgctgctgaaagtggccggctttaacctgctgatgaccctgcggctgtggtccagctaa

SEQ ID NO: 40434 - DNA, 2316 bp, synthetic construct
  source 1..2316: mol_type = other DNA
atggccttaccagtgaccgccttgctcctgccgctggccttgctgctccacgccgccaggccggcatgccaggttcagctgcaagagtctggccctggcctggtcaagcctagccaaacactgagcctgacctgtaccgtgtctggcggctctatcaccaccggcgagttctactggaactggttcagacagcctcctggcaaaggactggaatggatgggagccattgccgccagcggcagcacaacatacagccctagcttcgagagccggaccagcatcagcagagacaccagcaagaatcagttcagcctgaagctgagcagcgtgacagccgccgatacagccgtgtattactgcggcagatcctttggagtggccgccgtgacaaccggccagaatagaggacagggcaccctggtcacagtgtctagcggtaccggcggaggcggatctggcggcggaggtagcggtggcggaggatctgaattcgacatccagatgacacagagccctagcagcctgtctgccagcgtgggagacagagtgaccatcacatgcaaggccagcgaccacatcaacaactggctggcctggtatcagcagaagcctggacaggcccctaagctgctgatctacggcgctaccacactggaaacaggcgtgcccagcagattttctggcagcggctctggcaccgactacaccctgacaatatccagcctccagcctgaggacttcgccacctactactgtcagcagagctggaacaccccttggacattcggccagggcaccaagctggaaatcaagagactcgaggacctgaagaacgtgttcccacctgaggtggccgtgttcgagcctagcgaggccgagatcagccacacccagaaagccaccctcgtgtgcctggctaccggcttctaccccgaccatgtggaactgtcttggtgggtcaacggcaaagaggtgcacagcggcgtgtctaccgacccccagccactgaaagaacagcccgccctgaacgacagccggtactgcctgagcagcagactgagagtgtccgccaccttctggcagaacccccggaaccacttcagatgccaggtgcagttctacggcctgagcgagaacgacgagtggacccaggacagagccaagcccgtgacccagatcgtgtctgccgaagcctggggcagagccgattgcggatcctccaaggacgccaacgataccctgctgctccagctgaccaacaccagcgcctactacatgtacttgttgctgctgctgaagtccgtggtgtacttcgccatcatcacatgctgcctgctgcggagaaccgccttctgctgcaacggcgagaagtctagggccaagcgatctggatctggagcaacaaacttctcactactcaaacaagcaggtgacgtggaggagaatcccgggcctactagtatggactggatttggcgcatccttttccttgtcggcgctgctaccggcgcgcattccttcgaacaagttcagcttcaacagcctggcgctgagctggtcaaacctggcgcttctgtgaagatgagctgcaaagccagcggctacgccttcagcagctactggatcaactggatgaagcagaaacccggccagggactcgaatggatcggccaaatctatcccggcgacggcgacaccaactacaacggcaagttcaagggcagagccacactgaccgccgatacctctagcagcacagcctacatgcagctgagcagcctgaccagcgaagatagcgccgtgtacttctgtgcccggtccatcacaacagtcgtgggctgcgctatggactattggggccagggaacaagcgtgaccgtgtctagtacgcgtatccagaaccctgatcctgccgtgtaccagctgcgggatagcaagagcagcgacaagagcgtgtgtctgttcaccgacttcgacagccagaccaacgtgtcccagagcaaggactccgacgtgtacatcaccgataagtgcgtgctggacatgcggagcatggacttcaagagcaactccgccgtggcctggtccaacaagtccgatttcgcctgcgccaacgccttcaacaacagcattatccccgaggacacattcttcccaagccccgagagcagctgcgacgtgaagctggtggaaaagagcttcgagacagacaccaacctgaacttccagaacctgagcgtgatcggcttcagaatcctgctgctgaaagtggccggctttaacctgctgatgaccctgcggctgtggtccagctaa

SEQ ID NO: 40435 - DNA, 3414 bp, synthetic construct; identical to SEQ ID NO: 1100
  source 1..3414: mol_type = other DNA

SEQ ID NO: 40436 - DNA, 1893 bp, synthetic construct; identical to SEQ ID NO: 32352
  source 1..1893: mol_type = other DNA

SEQ ID NO: 40437 - DNA, 1869 bp, synthetic construct; identical to SEQ ID NO: 32291
  source 1..1869: mol_type = other DNA

SEQ ID NO: 40438 - DNA, 3282 bp, synthetic construct
  source 1..3282: mol_type = other DNA
atggccttaccagtgaccgccttgctcctgccgctggccttgctgctccacgccgccaggccggacatccagatgacacagagccctagcagcctgtctgccagcgtgggagacagagtgaccatcacatgcaaggccagcgaccacatcaacaactggctggcctggtatcagcagaagcctggacaggcccctaagctgctgatctacggcgctaccacactggaaacaggcgtgcccagcagattttctggcagcggctctggcaccgactacaccctgacaatatccagcctccagcctgaggacttcgccacctactactgtcagcagagctggaacaccccttggacattcggccagggcaccaagctggaaatcaagagactcgaggacctgaagaacgtgttcccacctgaggtggccgtgttcgagcctagcgaggccgagatcagccacacccagaaagccaccctcgtgtgcctggctaccggcttctaccccgaccatgtggaactgtcttggtgggtcaacggcaaagaggtgcacagcggcgtgtgtaccgacccccagccactgaaagaacagcccgccctgaacgacagccggtactgcctgagcagcagactgagagtgtccgccaccttctggcagaacccccggaaccacttcagatgccaggtgcagttctacggcctgagcgagaacgacgagtggacccaggacagagccaagcccgtgacccagatcgtgtctgccgaagcctggggcagagccgattgcggctttaccagcgagagctaccagcagggcgtgctgagcgccggatcccagagcttcggcctgctggaccccaagctgtgctacctgctggatggcatcctgttcatctacggcgtgatcctgaccgccctgttcctgagagtgaagttcagcagaagcgccgacgcccctgcctaccagcagggacagaaccaactgtacaacgagctgaacctgggcagacgggaagagtacgacgtgctggacaagcggagaggcagggaccctgagatgggcggaaagccccggagaaagaacccccaggaaggactgtataacgaactccagaaagacaagatggccgaagcctacagcgagatcggcatgaagggcgagcggagaagaggcaagggccacgatggcctgtaccagggcctgagcaccgccaccaaggacacctatgacgccctgcacatgcaggccctgcctccaagaagggccaagcgatctggatctggagcaacaaacttctcactactcaaacaagcaggtgacgtggaggagaatcccgggcctactagtatggactggatttggcgcatccttttccttgtcggcgctgctaccggcgcgcattccttcgaacaagttcagcttcaacagcctggcgctgagctggtcaaacctggcgcttctgtgaagatgagctgcaaagccagcggctacgccttcagcagctactggatcaactggatgaagcagaaacccggccagggactcgaatggatcggccaaatctatcccggcgacggcgacaccaactacaacggcaagttcaagggcagagccacactgaccgccgatacctctagcagcacagcctacatgcagctgagcagcctgaccagcgaagatagcgccgtgtacttctgtgcccggtccatcacaacagtcgtgggctgcgctatggactattggggccagggaacaagcgtgaccgtgtctagtacgcgtatccagaaccctgatcctgccgtgtaccagctgcgggatagcaagagcagcgacaagagcgtgtgtctgttcaccgacttcgacagccagaccaacgtgtcccagagcaaggactccgacgtgtacatcaccgataagtgcgtgctggacatgcggagcatggacttcaagagcaactccgccgtggcctggtccaacaagtccgatttcgcctgcgccaacgccttcaacaacagcattatccccgaggacacattcttcccaagccccgagagcagctgcgacgtgaagctggtggaaaagagcttcgagacagacggtaccatcactcaaggtttggcagtgtcaaccatctcatcattctttccacctggctaccaagtgtccttctgcctggtcatggtgctgctgttcgccgtggataccggcctgtacttcagcgtctggcgacgcaagcgcaaagaaaagcaaagcgagacaagcccaaaagaatttctcactatatacgaggacgtgaaagatttgaagacgaggcggaatcatgagcaagagcagacatttcctggcgggggctctactatctactcaatgattcaatcccaaagctccgctccgacttcccaagagcccgcttacactctctactcactgatacagccttcaagaaaatcaggctctcggaaacggaatcattccccatccttcaatagtaccatctatgaagtaatcggtaagagtcaacctaaagctcaaaaccccgctcgcttgagccgcaaggagctggaaaacttcgatgtatatagccgcgccaagagaagcggatctggcgtgaagcagaccctgaatttcgacctgctgaagctggctggcgacgtggaatccaacccaggcccttctagaggccatatgaccgagtacaagcccacggtgcgcctcgccacccgcgacgacgtccccagggccgtacgcaccctcgccgccgcgttcgccgactaccccgccacgcgccacaccgtcgatccggaccgccacatcgagcgggtcaccgagctgcaagaactcttcctcacgcgcgtcgggctcgacatcggcaaggtgtgggtcgcggacgacggcgccgcggtggcggtctggaccacgccggagagcgtcgaagcgggggcggtgttcgccgagatcggcccgcgcatggccgagttgagcggttcccggctggccgcgcagcaacagatggaaggcctcctggcgccgcaccggcccaaggagcccgcgtggttcctggccaccgtcggcgtctcgcccgaccaccagggcaagggtctgggcagcgccgtcgtgctccccggagtggaggcggccgagcgcgccggggtgcccgccttcctggagacctccgcgccccgcaacctccccttctacgagcggctcggcttcaccgtcaccgccgacgtcgaggtgcccgaaggaccgcgcacctggtgcatgacccgcaagcccggtgcctga

SEQ ID NO: 40439 - DNA, 1785 bp, synthetic construct
  source 1..1785: mol_type = other DNA
atggccttaccagtgaccgccttgctcctgccgctggccttgctgctccacgccgccaggccgcaggtgcagctggttgaatctggcggaggatctgttcaggctggtggctctctgagactgtcttgtggcgcttccggcagcatcaacagcagaaactgcatgggctggttcagacaggcccctggcaaagagagagaaggcgttgccgccatcggacaagtgaccggcagatcctactacgtggacagcgtgaagggcagattcaccatcagcctggacaacgccaagaacaccctgtacctccagatgaacacactgaagcccgaggacaccgccatgtactactgtgctgctgcccctggctgtctgctgtctgcacttagaagcgccgactacagaaactggggccagggaacccaagtgacagtgtctagtacgcgtaccacgacgccagcgccgcgaccaccaacaccggcgcccaccatcgcgtcgcagcccctgtccctgcgcccagaggcgtgccggccagcggcggggggcgcagtgcacacgagggggctggacttcgcctgtgacatctacatctgggcgcccttggccgggacttgtggggtccttctcctgtcactggttatcaccctttactgcaaacggggcagaaagaaactcctgtatatattcaaacaaccatttatgagaccagtacaaactactcaagaggaagatggctgtagctgccgatttccagaagaagaagaaggaggatgtgaactgagagtgaagttcagcaggagcgcagacgcccccgcgtaccagcagggccagaaccagctctataacgagctgaatctaggacgaagagaggagtacgatgttttggacaagagacgtggccgggaccctgagatggggggaaagccgagaaggaagaaccctcaggaaggcctgtacaatgaactgcagaaagataagatggcggaggcctacagtgagattgggatgaaaggcgagcgccggaggggcaaggggcacgatggcctttaccagggtctcagtacagccaccaaggacacctacgacgcccttcacatgcaggccctgccccctcgctctagtggctccggcgagggcagaggaagtctactaacctgcggagatgtggaagaaaatcctggcccacatatgaccgagtacaagcccacggtgcgcctcgccacccgcgacgacgtccccagggccgtacgcaccctcgccgccgcgttcgccgactaccccgccacgcgccacaccgtcgatccggaccgccacatcgagcgggtcaccgagctgcaagaactcttcctcacgcgcgtcgggctcgacatcggcaaggtgtgggtcgcggacgacggcgccgcggtggcggtctggaccacgccggagagcgtcgaagcgggggcggtgttcgccgagatcggcccgcgcatggccgagttgagcggttcccggctggccgcgcagcaacagatggaaggcctcctggcgccgcaccggcccaaggagcccgcgtggttcctggccaccgtcggcgtctcgcccgaccaccagggcaagggtctgggcagcgccgtcgtgctccccggagtggaggcggccgagcgcgccggggtgcccgccttcctggagacctccgcgccccgcaacctccccttctacgagcggctcggcttcaccgtcaccgccgacgtcgaggtgcccgaaggaccgcgcacctggtgcatgacccgcaagcccggtgcctga

SEQ ID NO: 40440 - DNA, 1785 bp, synthetic construct
  source 1..1785: mol_type = other DNA
atggccttaccagtgaccgccttgctcctgccgctggccttgctgctccacgccgccaggccgcaggtgcagctggttgaatctggcggaggatctgttcaggctggcggctctctgagactgtcttgtggcgcttccggcaacatcagcagcagaaactgcatgggctggttcagacaggcccctggcaaagagagagaaggcgttgccgccatcggacaagtgaccggcagatcctactacgtggacagcgtgaagggcagattcaccatcagcctggacaacgccaagaacaccctgtacctccagatgaacacactgaagcccgaggacaccgccatgtactactgtgctgctgcccctggctgtctgctgtctgcacttagaagcgccgactacagaaactggggccagggaacccaagtgacagtgtctagtacgcgtaccacgacgccagcgccgcgaccaccaacaccggcgcccaccatcgcgtcgcagcccctgtccctgcgcccagaggcgtgccggccagcggcggggggcgcagtgcacacgagggggctggacttcgcctgtgacatctacatctgggcgcccttggccgggacttgtggggtccttctcctgtcactggttatcaccctttactgcaaacggggcagaaagaaactcctgtatatattcaaacaaccatttatgagaccagtacaaactactcaagaggaagatggctgtagctgccgatttccagaagaagaagaaggaggatgtgaactgagagtgaagttcagcaggagcgcagacgcccccgcgtaccagcagggccagaaccagctctataacgagctgaatctaggacgaagagaggagtacgatgttttggacaagagacgtggccgggaccctgagatggggggaaagccgagaaggaagaaccctcaggaaggcctgtacaatgaactgcagaaagataagatggcggaggcctacagtgagattgggatgaaaggcgagcgccggaggggcaaggggcacgatggcctttaccagggtctcagtacagccaccaaggacacctacgacgcccttcacatgcaggccctgccccctcgctctagtggctccggcgagggcagaggaagtctactaacctgcggagatgtggaagaaaatcctggcccacatatgaccgagtacaagcccacggtgcgcctcgccacccgcgacgacgtccccagggccgtacgcaccctcgccgccgcgttcgccgactaccccgccacgcgccacaccgtcgatccggaccgccacatcgagcgggtcaccgagctgcaagaactcttcctcacgcgcgtcgggctcgacatcggcaaggtgtgggtcgcggacgacggcgccgcggtggcggtctggaccacgccggagagcgtcgaagcgggggcggtgttcgccgagatcggcccgcgcatggccgagttgagcggttcccggctggccgcgcagcaacagatggaaggcctcctggcgccgcaccggcccaaggagcccgcgtggttcctggccaccgtcggcgtctcgcccgaccaccagggcaagggtctgggcagcgccgtcgtgctccccggagtggaggcggccgagcgcgccggggtgcccgccttcctggagacctccgcgccccgcaacctccccttctacgagcggctcggcttcaccgtcaccgccgacgtcgaggtgcccgaaggaccgcgcacctggtgcatgacccgcaagcccggtgcctga

SEQ ID NO: 40441 - DNA, 1764 bp, synthetic construct
  source 1..1764: mol_type = other DNA
atggccttaccagtgaccgccttgctcctgccgctggccttgctgctccacgccgccaggccggaagtgcaactggttgaatccggtggcggcctggtgcaacccggcggatctctcagacttagctgtgccgcctccggcagaaccttcacaatgggatggttcaggcaggctccagggaaagggagagagttcgtcgccgccatctctctgtctcccacactggcctactacgccgactctgtgaaaggccggttcaccatctccagagataatagcaagaacaccgtggtgctgcaaatgaactctctgagagccgaggatacagccgtgtactattgtgccgctgaccggaagtccgtgatgagcatcagacccgattactggggacagggcacacaggtcacagtgtctagtacgcgtaccacgacgccagcgccgcgaccaccaacaccggcgcccaccatcgcgtcgcagcccctgtccctgcgcccagaggcgtgccggccagcggcggggggcgcagtgcacacgagggggctggacttcgcctgtgacatctacatctgggcgcccttggccgggacttgtggggtccttctcctgtcactggttatcaccctttactgcaaacggggcagaaagaaactcctgtatatattcaaacaaccatttatgagaccagtacaaactactcaagaggaagatggctgtagctgccgatttccagaagaagaagaaggaggatgtgaactgagagtgaagttcagcaggagcgcagacgcccccgcgtaccagcagggccagaaccagctctataacgagctgaatctaggacgaagagaggagtacgatgttttggacaagagacgtggccgggaccctgagatggggggaaagccgagaaggaagaaccctcaggaaggcctgtacaatgaactgcagaaagataagatggcggaggcctacagtgagattgggatgaaaggcgagcgccggaggggcaaggggcacgatggcctttaccagggtctcagtacagccaccaaggacacctacgacgcccttcacatgcaggccctgccccctcgctctagtggctccggcgagggcagaggaagtctactaacctgcggagatgtggaagaaaatcctggcccacatatgaccgagtacaagcccacggtgcgcctcgccacccgcgacgacgtccccagggccgtacgcaccctcgccgccgcgttcgccgactaccccgccacgcgccacaccgtcgatccggaccgccacatcgagcgggtcaccgagctgcaagaactcttcctcacgcgcgtcgggctcgacatcggcaaggtgtgggtcgcggacgacggcgccgcggtggcggtctggaccacgccggagagcgtcgaagcgggggcggtgttcgccgagatcggcccgcgcatggccgagttgagcggttcccggctggccgcgcagcaacagatggaaggcctcctggcgccgcaccggcccaaggagcccgcgtggttcctggccaccgtcggcgtctcgcccgaccaccagggcaagggtctgggcagcgccgtcgtgctccccggagtggaggcggccgagcgcgccggggtgcccgccttcctggagacctccgcgccccgcaacctccccttctacgagcggctcggcttcaccgtcaccgccgacgtcgaggtgcccgaaggaccgcgcacctggtgcatgacccgcaagcccggtgcctga

SEQ ID NO: 40442 - DNA, 1791 bp, synthetic construct
  source 1..1791: mol_type = other DNA
atggccttaccagtgaccgccttgctcctgccgctggccttgctgctccacgccgccaggccgcaggtgcagctggttgaatctggcggaggactggttcagcctggcggatctctgagactgtcttgtgccgccagcggctacacctacggcatcaactgtatgggctggttcagacaggcccctggcaagggaagagaaggcgtggccgttattagcaccggcggaggcagaaccgactaccgggattctgtgaagggcagattcaccatcagccaggacaacagcaagaacaccgtgtacctgcagatgaacagcctgagagccgaggacaccgccatgtactattgtgccggcaagaccacctatcctggctacggatgtggcctgggcagaagcgcctacaattattggggccagggcacccaagtgaccgtgtctagcacgcgtaccacgacgccagcgccgcgaccaccaacaccggcgcccaccatcgcgtcgcagcccctgtccctgcgcccagaggcgtgccggccagcggcggggggcgcagtgcacacgagggggctggacttcgcctgtgacatctacatctgggcgcccttggccgggacttgtggggtccttctcctgtcactggttatcaccctttactgcaaacggggcagaaagaaactcctgtatatattcaaacaaccatttatgagaccagtacaaactactcaagaggaagatggctgtagctgccgatttccagaagaagaagaaggaggatgtgaactgagagtgaagttcagcaggagcgcagacgcccccgcgtaccagcagggccagaaccagctctataacgagctgaatctaggacgaagagaggagtacgatgttttggacaagagacgtggccgggaccctgagatggggggaaagccgagaaggaagaaccctcaggaaggcctgtacaatgaactgcagaaagataagatggcggaggcctacagtgagattgggatgaaaggcgagcgccggaggggcaaggggcacgatggcctttaccagggtctcagtacagccaccaaggacacctacgacgcccttcacatgcaggccctgccccctcgctctagtggctccggcgagggcagaggaagtctactaacctgcggagatgtggaagaaaatcctggcccacatatgaccgagtacaagcccacggtgcgcctcgccacccgcgacgacgtccccagggccgtacgcaccctcgccgccgcgttcgccgactaccccgccacgcgccacaccgtcgatccggaccgccacatcgagcgggtcaccgagctgcaagaactcttcctcacgcgcgtcgggctcgacatcggcaaggtgtgggtcgcggacgacggcgccgcggtggcggtctggaccacgccggagagcgtcgaagcgggggcggtgttcgccgagatcggcccgcgcatggccgagttgagcggttcccggctggccgcgcagcaacagatggaaggcctcctggcgccgcaccggcccaaggagcccgcgtggttcctggccaccgtcggcgtctcgcccgaccaccagggcaagggtctgggcagcgccgtcgtgctccccggagtggaggcggccgagcgcgccggggtgcccgccttcctggagacctccgcgccccgcaacctccccttctacgagcggctcggcttcaccgtcaccgccgacgtcgaggtgcccgaaggaccgcgcacctggtgcatgacccgcaagcccggtgcctga

SEQ ID NO: 40443 - DNA, 1803 bp, synthetic construct
  source 1..1803: mol_type = other DNA
atggccctgcctgtgacagctctgctgctgcctctggcactgctgctgcacgccgccagacctcaggttcagctggtggaaagcggtggtggcgttgtgcaacctggcagaagtctgaggctgagctgtgtggcctccggctacacatactctattaactgcatgggatggtttcggcaggctcccggaaaaggcagagagggaattgccgccatctctacaggcggcggaacaacaggcgtggcagatagcgtgaaaggccggttcaccatctctcaggacaatgccaagaatacggtctatctccagatgaactctctgcgggccgaagatacagccatgtattactgcgccgccaggtccacctacagcggctatgcctgtgtgtacagcgaagtgaacggctacaactacagaggccagggaacacaagtcacagtcagcagcggtaccgaaacgcgtaccacgacgccagcgccgcgaccaccaacaccggcgcccaccatcgcgtcgcagcccctgtccctgcgcccagaggcgtgccggccagcggcggggggcgcagtgcacacgagggggctggacttcgcctgtgacatctacatctgggcgcccttggccgggacttgtggggtccttctcctgtcactggttatcaccctttactgcaaacggggcagaaagaaactcctgtatatattcaaacaaccatttatgagaccagtacaaactactcaagaggaagatggctgtagctgccgatttccagaagaagaagaaggaggatgtgaactgagagtgaagttcagcaggagcgcagacgcccccgcgtaccagcagggccagaaccagctctataacgagctgaatctaggacgaagagaggagtacgatgttttggacaagagacgtggccgggaccctgagatggggggaaagccgagaaggaagaaccctcaggaaggcctgtacaatgaactgcagaaagataagatggcggaggcctacagtgagattgggatgaaaggcgagcgccggaggggcaaggggcacgatggcctttaccagggtctcagtacagccaccaaggacacctacgacgcccttcacatgcaggccctgccccctcgctctagtggctccggcgagggcagaggaagtctactaacctgcggagatgtggaagaaaatcctggcccacatatgaccgagtacaagcccacggtgcgcctcgccacccgcgacgacgtccccagggccgtacgcaccctcgccgccgcgttcgccgactaccccgccacgcgccacaccgtcgatccggaccgccacatcgagcgggtcaccgagctgcaagaactcttcctcacgcgcgtcgggctcgacatcggcaaggtgtgggtcgcggacgacggcgccgcggtggcggtctggaccacgccggagagcgtcgaagcgggggcggtgttcgccgagatcggcccgcgcatggccgagttgagcggttcccggctggccgcgcagcaacagatggaaggcctcctggcgccgcaccggcccaaggagcccgcgtggttcctggccaccgtcggcgtctcgcccgaccaccagggcaagggtctgggcagcgccgtcgtgctccccggagtggaggcggccgagcgcgccggggtgcccgccttcctggagacctccgcgccccgcaacctccccttctacgagcggctcggcttcaccgtcaccgccgacgtcgaggtgcccgaaggaccgcgcacctggtgcatgacccgcaagcccggtgcctga

SEQ ID NO: 40444 - DNA, 1791 bp, synthetic construct
  source 1..1791: mol_type = other DNA
atggccttaccagtgaccgccttgctcctgccgctggccttgctgctccacgccgccaggccggaggtgcagctggttgaatctggcggaggatctgttcaggctggcggctctcagagactgtcttgtgccgcctctggctacacctacggcatcaactgcatgggctggttcagacaggcccctggcaaagaacgagaaggcgtggccgtgattagcaccggcggaggcagaaccgactaccgggattctgtgaagggcagattcaccatcagccaggacaacgccaagaacaccgtgtacctccagatgaacagcctgaagcctgaggacaccgccatgtactactgtgccggcaagaccacctatcctggctacggatgtggcctgggcagaagcgcctacaattattggggccagggcacccaagtgaccgtgtctagcacgcgtaccacgacgccagcgccgcgaccaccaacaccggcgcccaccatcgcgtcgcagcccctgtccctgcgcccagaggcgtgccggccagcggcggggggcgcagtgcacacgagggggctggacttcgcctgtgacatctacatctgggcgcccttggccgggacttgtggggtccttctcctgtcactggttatcaccctttactgcaaacggggcagaaagaaactcctgtatatattcaaacaaccatttatgagaccagtacaaactactcaagaggaagatggctgtagctgccgatttccagaagaagaagaaggaggatgtgaactgagagtgaagttcagcaggagcgcagacgcccccgcgtaccagcagggccagaaccagctctataacgagctgaatctaggacgaagagaggagtacgatgttttggacaagagacgtggccgggaccctgagatggggggaaagccgagaaggaagaaccctcaggaaggcctgtacaatgaactgcagaaagataagatggcggaggcctacagtgagattgggatgaaaggcgagcgccggaggggcaaggggcacgatggcctttaccagggtctcagtacagccaccaaggacacctacgacgcccttcacatgcaggccctgccccctcgctctagtggctccggcgagggcagaggaagtctactaacctgcggagatgtggaagaaaatcctggcccacatatgaccgagtacaagcccacggtgcgcctcgccacccgcgacgacgtccccagggccgtacgcaccctcgccgccgcgttcgccgactaccccgccacgcgccacaccgtcgatccggaccgccacatcgagcgggtcaccgagctgcaagaactcttcctcacgcgcgtcgggctcgacatcggcaaggtgtgggtcgcggacgacggcgccgcggtggcggtctggaccacgccggagagcgtcgaagcgggggcggtgttcgccgagatcggcccgcgcatggccgagttgagcggttcccggctggccgcgcagcaacagatggaaggcctcctggcgccgcaccggcccaaggagcccgcgtggttcctggccaccgtcggcgtctcgcccgaccaccagggcaagggtctgggcagcgccgtcgtgctccccggagtggaggcggccgagcgcgccggggtgcccgccttcctggagacctccgcgccccgcaacctccccttctacgagcggctcggcttcaccgtcaccgccgacgtcgaggtgcccgaaggaccgcgcacctggtgcatgacccgcaagcccggtgcctga

SEQ ID NO: 40445 - DNA, 1791 bp, synthetic construct
  source 1..1791: mol_type = other DNA
atggccttaccagtgaccgccttgctcctgccgctggccttgctgctccacgccgccaggccggaggtgcagctggttgaatctggcggaggatctgttcaggctggcggctctctgagactgtcttgtgccgccagcggctacacctacagcatcaactgcatgggctggttcagacaggcccctggcaaagagagagaaggcgttgccgccatctctaccggcggaggcagaaccgattaccgggattctgtgaagggcagattcaccatcagccaggacaacgccaagaacaccgtgtacctccagatgaacagcctgaagcctgaggacaccgccatgtactactgtgccggcaagaccacctatcctggctacggatgtggcctgggcagaagcgcctacaattattggggccagggcacccaagtgaccgtgtcatctacgcgtaccacgacgccagcgccgcgaccaccaacaccggcgcccaccatcgcgtcgcagcccctgtccctgcgcccagaggcgtgccggccagcggcggggggcgcagtgcacacgagggggctggacttcgcctgtgacatctacatctgggcgcccttggccgggacttgtggggtccttctcctgtcactggttatcaccctttactgcaaacggggcagaaagaaactcctgtatatattcaaacaaccatttatgagaccagtacaaactactcaagaggaagatggctgtagctgccgatttccagaagaagaagaaggaggatgtgaactgagagtgaagttcagcaggagcgcagacgcccccgcgtaccagcagggccagaaccagctctataacgagctgaatctaggacgaagagaggagtacgatgttttggacaagagacgtggccgggaccctgagatggggggaaagccgagaaggaagaaccctcaggaaggcctgtacaatgaactgcagaaagataagatggcggaggcctacagtgagattgggatgaaaggcgagcgccggaggggcaaggggcacgatggcctttaccagggtctcagtacagccaccaaggacacctacgacgcccttcacatgcaggccctgccccctcgctctagtggctccggcgagggcagaggaagtctactaacctgcggagatgtggaagaaaatcctggcccacatatgaccgagtacaagcccacggtgcgcctcgccacccgcgacgacgtccccagggccgtacgcaccctcgccgccgcgttcgccgactaccccgccacgcgccacaccgtcgatccggaccgccacatcgagcgggtcaccgagctgcaagaactcttcctcacgcgcgtcgggctcgacatcggcaaggtgtgggtcgcggacgacggcgccgcggtggcggtctggaccacgccggagagcgtcgaagcgggggcggtgttcgccgagatcggcccgcgcatggccgagttgagcggttcccggctggccgcgcagcaacagatggaaggcctcctggcgccgcaccggcccaaggagcccgcgtggttcctggccaccgtcggcgtctcgcccgaccaccagggcaagggtctgggcagcgccgtcgtgctccccggagtggaggcggccgagcgcgccggggtgcccgccttcctggagacctccgcgccccgcaacctccccttctacgagcggctcggcttcaccgtcaccgccgacgtcgaggtgcccgaaggaccgcgcacctggtgcatgacccgcaagcccggtgcctga

SEQ ID NO: 40446 - DNA, 1776 bp, synthetic construct
  source 1..1776: mol_type = other DNA
atggccttaccagtgaccgccttgctcctgccgctggccttgctgctccacgccgccaggccggaggtgcagctggttgaatctggcggaggactggttcagcctggcggatctctgagactgtcttgtgccgccagcgagttcacctacagcatgggctggtttagacaggcccctggcaaaggactggaaggcgtgtcccacatctacaccagaggcggcactaccgtgtacgccgattctgtgcggggcagattcgtgctgagccgggacaacagcaagaacaccctgtacctgcagatgaacagcctgagagccgaggacaccgccgtgtactattgtgccgctcggaccatctttgaaggcagctggtctagccccagcagcttcgatttttggggccagggcacactggtcaccgtttctagcacgcgtaccacgacgccagcgccgcgaccaccaacaccggcgcccaccatcgcgtcgcagcccctgtccctgcgcccagaggcgtgccggccagcggcggggggcgcagtgcacacgagggggctggacttcgcctgtgacatctacatctgggcgcccttggccgggacttgtggggtccttctcctgtcactggttatcaccctttactgcaaacggggcagaaagaaactcctgtatatattcaaacaaccatttatgagaccagtacaaactactcaagaggaagatggctgtagctgccgatttccagaagaagaagaaggaggatgtgaactgagagtgaagttcagcaggagcgcagacgcccccgcgtaccagcagggccagaaccagctctataacgagctgaatctaggacgaagagaggagtacgatgttttggacaagagacgtggccgggaccctgagatggggggaaagccgagaaggaagaaccctcaggaaggcctgtacaatgaactgcagaaagataagatggcggaggcctacagtgagattgggatgaaaggcgagcgccggaggggcaaggggcacgatggcctttaccagggtctcagtacagccaccaaggacacctacgacgcccttcacatgcaggccctgccccctcgctctagtggctccggcgagggcagaggaagtctactaacctgcggagatgtggaagaaaatcctggcccacatatgaccgagtacaagcccacggtgcgcctcgccacccgcgacgacgtccccagggccgtacgcaccctcgccgccgcgttcgccgactaccccgccacgcgccacaccgtcgatccggaccgccacatcgagcgggtcaccgagctgcaagaactcttcctcacgcgcgtcgggctcgacatcggcaaggtgtgggtcgcggacgacggcgccgcggtggcggtctggaccacgccggagagcgtcgaagcgggggcggtgttcgccgagatcggcccgcgcatggccgagttgagcggttcccggctggccgcgcagcaacagatggaaggcctcctggcgccgcaccggcccaaggagcccgcgtggttcctggccaccgtcggcgtctcgcccgaccaccagggcaagggtctgggcagcgccgtcgtgctccccggagtggaggcggccgagcgcgccggggtgcccgccttcctggagacctccgcgccccgcaacctccccttctacgagcggctcggcttcaccgtcaccgccgacgtcgaggtgcccgaaggaccgcgcacctggtgcatgacccgcaagcccggtgcctga

SEQ ID NO: 40447 - DNA, 1794 bp, synthetic construct
  source 1..1794: mol_type = other DNA
atggccctgcctgtgacagctctgctgctgcctctggcactgctgctgcacgccgccagacctcaagttcagctggtggaaagcggtggtggcgttgtgcaacctggtggaagtctgaggctgagctgtgccgcttctggcctgagctttagcacctacactgtggcctggttcaggcaggctcccggaaagggtcttgaaggcgtggccgccattccttacaccagccagcacatggtgtacacagacagcgtcagaggccggttcaccatcagcagagacaactccaagaatacgctctatctccagatgaactctctgcgcgccgaagatacagccgtgtattactgcgccaccgacagacggcctggcacctctatgctggctatcaacggctacaacagatggggacagggaaccaccgtgaccgtgtcatctggtaccgaaacgcgtaccacgacgccagcgccgcgaccaccaacaccggcgcccaccatcgcgtcgcagcccctgtccctgcgcccagaggcgtgccggccagcggcggggggcgcagtgcacacgagggggctggacttcgcctgtgacatctacatctgggcgcccttggccgggacttgtggggtccttctcctgtcactggttatcaccctttactgcaaacggggcagaaagaaactcctgtatatattcaaacaaccatttatgagaccagtacaaactactcaagaggaagatggctgtagctgccgatttccagaagaagaagaaggaggatgtgaactgagagtgaagttcagcaggagcgcagacgcccccgcgtaccagcagggccagaaccagctctataacgagctgaatctaggacgaagagaggagtacgatgttttggacaagagacgtggccgggaccctgagatggggggaaagccgagaaggaagaaccctcaggaaggcctgtacaatgaactgcagaaagataagatggcggaggcctacagtgagattgggatgaaaggcgagcgccggaggggcaaggggcacgatggcctttaccagggtctcagtacagccaccaaggacacctacgacgcccttcacatgcaggccctgccccctcgctctagtggctccggcgagggcagaggaagtctactaacctgcggagatgtggaagaaaatcctggcccacatatgaccgagtacaagcccacggtgcgcctcgccacccgcgacgacgtccccagggccgtacgcaccctcgccgccgcgttcgccgactaccccgccacgcgccacaccgtcgatccggaccgccacatcgagcgggtcaccgagctgcaagaactcttcctcacgcgcgtcgggctcgacatcggcaaggtgtgggtcgcggacgacggcgccgcggtggcggtctggaccacgccggagagcgtcgaagcgggggcggtgttcgccgagatcggcccgcgcatggccgagttgagcggttcccggctggccgcgcagcaacagatggaaggcctcctggcgccgcaccggcccaaggagcccgcgtggttcctggccaccgtcggcgtctcgcccgaccaccagggcaagggtctgggcagcgccgtcgtgctccccggagtggaggcggccgagcgcgccggggtgcccgccttcctggagacctccgcgccccgcaacctccccttctacgagcggctcggcttcaccgtcaccgccgacgtcgaggtgcccgaaggaccgcgcacctggtgcatgacccgcaagcccggtgcctga

SEQ ID NO: 40448 - DNA, 1773 bp, synthetic construct
  source 1..1773: mol_type = other DNA
atggccttaccagtgaccgccttgctcctgccgctggccttgctgctccacgccgccaggccggaggtgcagctggttgaatctggcggaggactggttcagcctggcggatctctgagactgtcttgtgccgccagcggcagaaccttcagcaactacaacatgggctggttcagacaggcccctggcaaaggactggaatgggttgcagctgtggattggagcggcggcagcccttactatgccgattctgtgaagggcagattcaccatcagccgggacaacagcaagaacaccgtgtacctccagatgaacagcctgagagccgaggacaccgccgtgtactattgtgccggcagagtgcagtacggcagctcttggagcggagattattggggccagggcaccctggtcacagtttctagcacgcgtaccacgacgccagcgccgcgaccaccaacaccggcgcccaccatcgcgtcgcagcccctgtccctgcgcccagaggcgtgccggccagcggcggggggcgcagtgcacacgagggggctggacttcgcctgtgacatctacatctgggcgcccttggccgggacttgtggggtccttctcctgtcactggttatcaccctttactgcaaacggggcagaaagaaactcctgtatatattcaaacaaccatttatgagaccagtacaaactactcaagaggaagatggctgtagctgccgatttccagaagaagaagaaggaggatgtgaactgagagtgaagttcagcaggagcgcagacgcccccgcgtaccagcagggccagaaccagctctataacgagctgaatctaggacgaagagaggagtacgatgttttggacaagagacgtggccgggaccctgagatggggggaaagccgagaaggaagaaccctcaggaaggcctgtacaatgaactgcagaaagataagatggcggaggcctacagtgagattgggatgaaaggcgagcgccggaggggcaaggggcacgatggcctttaccagggtctcagtacagccaccaaggacacctacgacgcccttcacatgcaggccctgccccctcgctctagtggctccggcgagggcagaggaagtctactaacctgcggagatgtggaagaaaatcctggcccacatatgaccgagtacaagcccacggtgcgcctcgccacccgcgacgacgtccccagggccgtacgcaccctcgccgccgcgttcgccgactaccccgccacgcgccacaccgtcgatccggaccgccacatcgagcgggtcaccgagctgcaagaactcttcctcacgcgcgtcgggctcgacatcggcaaggtgtgggtcgcggacgacggcgccgcggtggcggtctggaccacgccggagagcgtcgaagcgggggcggtgttcgccgagatcggcccgcgcatggccgagttgagcggttcccggctggccgcgcagcaacagatggaaggcctcctggcgccgcaccggcccaaggagcccgcgtggttcctggccaccgtcggcgtctcgcccgaccaccagggcaagggtctgggcagcgccgtcgtgctccccggagtggaggcggccgagcgcgccggggtgcccgccttcctggagacctccgcgccccgcaacctccccttctacgagcggctcggcttcaccgtcaccgccgacgtcgaggtgcccgaaggaccgcgcacctggtgcatgacccgcaagcccggtgcctga

SEQ ID NO: 40449 - DNA, 4044 bp, synthetic construct
  source 1..4044: mol_type = other DNA
atggccttaccagtgaccgccttgctcctgccgctggccttgctgctccacgccgccaggccggacatccagatgacacagagccctagcagcctgtctgccagcgtgggagacagagtgaccatcacatgcaaggccagccaggatgtgggcacagccgtggattggtatcagcagaagcctggcaaggcccctaagctgctgatctactgggccagcacaagacacacaggcgtgcccagcagattttctggcagcggctctggcaccgacttcaccctgacaatatccagcctccagcctgaggacttcgccacctactactgccagcagtacaacagctaccctctgaccttcggccagggcaccaaggtggaaatcaaaagactcgaggacctgaagaacgtgttcccacctgaggtggccgtgttcgagcctagcgaggccgagatcagccacacccagaaagccaccctcgtgtgcctggctaccggcttctaccccgaccatgtggaactgtcttggtgggtcaacggcaaagaggtgcacagcggcgtgtctaccgacccccagccactgaaagaacagcccgccctgaacgacagccggtactgcctgagcagcagactgagagtgtccgccaccttctggcagaacccccggaaccacttcagatgccaggtgcagttctacggcctgagcgagaacgacgagtggacccaggacagagccaagcccgtgacccagatcgtgtctgccgaagcctggggcagagccgattgcggatcccagagcttcggcctgctggaccccaagctgtgctacctgctggatggcatcctgttcatctacggcgtgatcctgaccgccctgttcctgggcggtggaggctctatccggaacggctctgaagttcgcgatcctctggtcacctacgagggcagcaatcctcctgccagtcctctgcaggataacctcgtgatcgccctgcacagctacgagccttctcatgatggcgacctgggctttgagaagggcgagcagctgagaatcctggaacagtctggcgagtggtggaaggcccagtctctgacaacaggccaagagggcttcatccccttcaacttcgtggccaaggccaacagcctggaacctgagccttggtttttcaagaacctgtccagaaaggacgccgagagacagctgctggcccctggaaatacccacggcagctttctgattagagagagcgagagcacagccggcagcttcagcctgagtgtgcgggactttgaccagaatcaaggcgaggtcgtgaagcactacaagatccggaacctggataacggcggcttctacatcagccccagaatcacctttcctggcctgcacgaactcgtgcggcactacacaaatgcctccgatggcctgtgcaccagactgagcagaccctgtcagacccagaagcctcagaaaccttggtgggaagatgagtgggaagtgcccagagaaaccctgaagctggtggaaagactcggagccggccagtttggagaagtgtggatgggctactacaatggccacaccaaggtggccgtgaagtctctgaagcagggctctatgagcccagatgcttttctggccgaggccaatctgatgaagcagctgcagcaccagagacttgtgcggctgtatgccgtggtcacccaagagcctatctacatcatcatcgagtacatggaaaacggcagcctggtggacttcctgaaaacccctagcggcatcaagctgaccattaacaagctgctggacatggccgctcagatcgccgaaggcatggcctttatcgaggaacggaactacatccacagggacctgagagccgccaatatcctggtgtctgacaccctgagctgcaagattgccgatttcggcctggccagactgatcgaggacaatgagtataccgccagagagggcgccaagtttcccatcaaatggacagcccctgaggccatcaactacggcaccttcaccatcaagagcgacgtgtggtccttcggcatcctgctgacagagatcgtgacacacggcagaatcccatatcctggcatgacaaaccccgaagtgatccagaatctggaacggggctacagaatggtccgacctgacaactgccccgaggaactgtaccagctgatgagactgtgctggaaagagaggcccgaggacagacccaccttcgactacctgagaagcgtgctggaagatttcttcaccgccaccgagggccagtaccagcctcagccaagggccaagcgatctggatctggagcaacaaacttctcactactcaaacaagcaggtgacgtggaggagaatcccgggcctactagtatggactggatttggcgcatccttttccttgtcggcgctgctaccggcgcgcattccttcgaagtgcagctggttgaatcaggtggcggcctggttcaacctggcggatctctgagactgagctgtgccgccagcggctacacctttaccgagtacacaatccactgggtccgacaggcccctggcaaaggacttgagtgggtcgccaacatcaaccccaacaatggcggcaccacctacaaccagaagttcgaggacagattcaccatcagccgggacaacagcaagaacaccctgtacctccagatgaactccctgagagccgaggacaccgccgtgtactattgtgccagaggctggaacttcgactactggggccagggaacactggtcaccgttagctctacgcgtatccagaaccctgatcctgccgtgtaccagctgcgggatagcaagagcagcgacaagagcgtgtgtctgttcaccgacttcgacagccagaccaacgtgtcccagagcaaggactccgacgtgtacatcaccgataagaccgtgctggacatgcggagcatggacttcaagagcaactccgccgtggcctggtccaacaagtccgatttcgcctgcgccaacgccttcaacaacagcattatccccgaggacacattcttcccaagccccgagagcagctgcggtaccatcactcaaggtttggcagtgtcaaccatctcatcattctttccacctggctaccaagtgtccttctgcctggtcatggtgctgctgttcgccgtggataccggcctgtacttcagcgtcaagagaggccggaagaagctgctgtacatcttcaagcagcctttcatgcggcccgtgcagaccacccaggaagaggacggctgctcctgccggttccccgaggaagaagaaggcggctgcgagctgcgcgccaagagaagcggatctggcgtgaagcagaccctgaatttcgacctgctgaagctggctggcgacgtggaatccaacccaggcccttctagaggccatatgaccgagtacaagcccacggtgcgcctcgccacccgcgacgacgtccccagggccgtacgcaccctcgccgccgcgttcgccgactaccccgccacgcgccacaccgtcgatccggaccgccacatcgagcgggtcaccgagctgcaagaactcttcctcacgcgcgtcgggctcgacatcggcaaggtgtgggtcgcggacgacggcgccgcggtggcggtctggaccacgccggagagcgtcgaagcgggggcggtgttcgccgagatcggcccgcgcatggccgagttgagcggttcccggctggccgcgcagcaacagatggaaggcctcctggcgccgcaccggcccaaggagcccgcgtggttcctggccaccgtcggcgtctcgcccgaccaccagggcaagggtctgggcagcgccgtcgtgctccccggagtggaggcggccgagcgcgccggggtgcccgccttcctggagacctccgcgccccgcaacctccccttctacgagcggctcggcttcaccgtcaccgccgacgtcgaggtgcccgaaggaccgcgcacctggtgcatgacccgcaagcccggtgcctga

SEQ ID NO: 40450 - DNA, 2208 bp, synthetic construct; identical to SEQ ID NO: 32278
  source 1..2208: mol_type = other DNA

SEQ ID NO: 40451 - DNA, 1473 bp, synthetic construct; identical to SEQ ID NO: 32276
  source 1..1473: mol_type = other DNA

SEQ ID NO: 40452 - DNA, 2586 bp, synthetic construct
  source 1..2586: mol_type = other DNA
atggccttaccagtgaccgccttgctcctgccgctggccttgctgctccacgccgccaggccggacatccagatgacacagagccctagcagcctgtctgccagcgtgggagacagagtgaccatcacatgcaaggccagcgaccacatcaacaactggctggcctggtatcagcagaagcctggacaggcccctaagctgctgatctacggcgctaccacactggaaacaggcgtgcccagcagattttctggcagcggctctggcaccgactacaccctgacaatatccagcctccagcctgaggacttcgccacctactactgtcagcagagctggaacaccccttggacattcggccagggcaccaagctggaaatcaagagactcgaggacaagcagctggacgccgacgtgtcccccaagcctaccatcttcctgccctctatcgccgagacaaagctccagaaggccggcacctacctgtgcctgctggaaaagttcttcccagatgtgattaagatccactggcaggaaaagaagtccaacaccatcctgggcagccaggaaggcaacaccatgaagaccaacgacacctacatgaagttcagctggctgaccgtgcccgagaagtccctggacaaagaacacagatgcatcgtgcggcacgaaaacaacaagaacggcgtggaccaggaaatcatcttcccgagcatcaagaaagtggccgtgtccaccaagccaaccacctgttggcaggacaagaacgacgtgctccagctccagttcaccatcaccagcgcctactacacatacctgctgctgctcctcaagagcgtgatctacctggccatcatcagcttcagcctgctgcggagaacaagcgtgtgcggcaacgagaagaagtccagggccaagcgatctggatctggagcaacaaacttctcactactcaaacaagcaggtgacgtggaggagaatcccgggcctactagtatggactggatttggcgcatccttttccttgtcggcgctgctaccggcgcgcattccttcgaacaagttcagcttcaacagcctggcgctgagctggtcaaacctggcgcttctgtgaagatgagctgcaaagccagcggctacgccttcagcagctactggatcaactggatgaagcagaaacccggccagggactcgaatggatcggccaaatctatcccggcgacggcgacaccaactacaacggcaagttcaagggcagagccacactgaccgccgatacctctagcagcacagcctacatgcagctgagcagcctgaccagcgaagatagcgccgtgtacttctgtgcccggtccatcacaacagtcgtgggctgcgctatggactattggggccagggaacaagcgtgaccgtgtctagtacgcgttctcagcctcctgccaagcctagcgtgttcattatgaagaacggcaccaacgtggcctgcctggtcaaggacttctaccccaaagaagtgaccatcagcctgcggagcagcaagaagatcgtcgagttcgaccccgccatcgtgattagccctagcggcaagtatagcgccgtgaagctgggccagtacggcgacagcaatagcgtgacatgtagcgtgcagcacaacagcgagacagtgcacagcaccgacttcgagccctacgccaacagcttcaacaacgagaagctgcccgagcctgagaacgacacccagatcagcgagccttgctacggccctagagtgaccgtgcacaccgagaaagtgaacatgatgagcctgaccgtgctgggcctgagactgctgttcgccaagacaatcgccatcaactttctgctgaccgtcaagctgttcttccgcgccaagagaagcggatctggcgtgaagcagaccctgaatttcgacctgctgaagctggctggcgacgtggaatccaacccaggcccttctagaggccatatgaccgagtacaagcccacggtgcgcctcgccacccgcgacgacgtccccagggccgtacgcaccctcgccgccgcgttcgccgactaccccgccacgcgccacaccgtcgatccggaccgccacatcgagcgggtcaccgagctgcaagaactcttcctcacgcgcgtcgggctcgacatcggcaaggtgtgggtcgcggacgacggcgccgcggtggcggtctggaccacgccggagagcgtcgaagcgggggcggtgttcgccgagatcggcccgcgcatggccgagttgagcggttcccggctggccgcgcagcaacagatggaaggcctcctggcgccgcaccggcccaaggagcccgcgtggttcctggccaccgtcggcgtctcgcccgaccaccagggcaagggtctgggcagcgccgtcgtgctccccggagtggaggcggccgagcgcgccggggtgcccgccttcctggagacctccgcgccccgcaacctccccttctacgagcggctcggcttcaccgtcaccgccgacgtcgaggtgcccgaaggaccgcgcacctggtgcatgacccgcaagcccggtgcctga

SEQ ID NO: 40453 - DNA, 2568 bp, synthetic construct
  source 1..2568: mol_type = other DNA
atggccttaccagtgaccgccttgctcctgccgctggccttgctgctccacgccgccaggccggacatccagatgacacagagccctagcagcctgtctgccagcgtgggagacagagtgaccatcacatgcaaggccagcgaccacatcaacaactggctggcctggtatcagcagaagcctggacaggcccctaagctgctgatctacggcgctaccacactggaaacaggcgtgcccagcagattttctggcagcggctctggcaccgactacaccctgacaatatccagcctccagcctgaggacttcgccacctactactgtcagcagagctggaacaccccttggacattcggccagggcaccaagctggaaatcaagagactcgaggacctgaagaacgtgttcccacctgaggtggccgtgttcgagcctagcgaggccgagatcagccacacccagaaagccaccctcgtgtgcctggctaccggcttctaccccgaccatgtggaactgtcttggtgggtcaacggcaaagaggtgcacagcggcgtgtctaccgacccccagccactgaaagaacagcccgccctgaacgacagccggtactgcctgagcagcagactgagagtgtccgccaccttctggcagaacccccggaaccacttcagatgccaggtgcagttctacggcctgagcgagaacgacgagtggacccaggacagagccaagcccgtgacccagatcgtgtctgccgaagcctggggcagagccgattgcggctttaccagcgagagctaccagcagggcgtgctgagcgcctactacatgtacttgttgctgctgctgaagtccgtggtgtacttcgccatcatcacatgctgcctgctgcggagaaccgccttctgctgcaacggcgagaagtctagggccaagcgatctggatctggagcaacaaacttctcactactcaaacaagcaggtgacgtggaggagaatcccgggcctactagtatggactggatttggcgcatccttttccttgtcggcgctgctaccggcgcgcattccttcgaacaagttcagcttcaacagcctggcgctgagctggtcaaacctggcgcttctgtgaagatgagctgcaaagccagcggctacgccttcagcagctactggatcaactggatgaagcagaaacccggccagggactcgaatggatcggccaaatctatcccggcgacggcgacaccaactacaacggcaagttcaagggcagagccacactgaccgccgatacctctagcagcacagcctacatgcagctgagcagcctgaccagcgaagatagcgccgtgtacttctgtgcccggtccatcacaacagtcgtgggctgcgctatggactattggggccagggaacaagcgtgaccgtgtctagtacgcgtatccagaaccctgatcctgccgtgtaccagctgcgggatagcaagagcagcgacaagagcgtgtgtctgttcaccgacttcgacagccagaccaacgtgtcccagagcaaggactccgacgtgtacatcaccgataagaccgtgctggacatgcggagcatggacttcaagagcaactccgccgtggcctggtccaacaagtccgatttcgcctgcgccaacgccttcaacaacagcattatccccgaggacacattcttcccaagccccgagagcagctgcgacgtgaagctggtggaaaagagcttcgagacagacaccaacctgaacttccagaacctgaccgtgctgggcctgagactgctgttcgccaagacaatcgccatcaactttctgctgaccgtcaagctgttcttccgcgccaagagaagcggatctggcgtgaagcagaccctgaatttcgacctgctgaagctggctggcgacgtggaatccaacccaggcccttctagaggccatatgaccgagtacaagcccacggtgcgcctcgccacccgcgacgacgtccccagggccgtacgcaccctcgccgccgcgttcgccgactaccccgccacgcgccacaccgtcgatccggaccgccacatcgagcgggtcaccgagctgcaagaactcttcctcacgcgcgtcgggctcgacatcggcaaggtgtgggtcgcggacgacggcgccgcggtggcggtctggaccacgccggagagcgtcgaagcgggggcggtgttcgccgagatcggcccgcgcatggccgagttgagcggttcccggctggccgcgcagcaacagatggaaggcctcctggcgccgcaccggcccaaggagcccgcgtggttcctggccaccgtcggcgtctcgcccgaccaccagggcaagggtctgggcagcgccgtcgtgctccccggagtggaggcggccgagcgcgccggggtgcccgccttcctggagacctccgcgccccgcaacctccccttctacgagcggctcggcttcaccgtcaccgccgacgtcgaggtgcccgaaggaccgcgcacctggtgcatgacccgcaagcccggtgcctga

SEQ ID NO: 40454 - DNA, 2550 bp, synthetic construct
  source 1..2550: mol_type = other DNA
atggccttaccagtgaccgccttgctcctgccgctggccttgctgctccacgccgccaggccggacatccagatgacacagagccctagcagcctgtctgccagcgtgggagacagagtgaccatcacatgcaaggccagcgaccacatcaacaactggctggcctggtatcagcagaagcctggacaggcccctaagctgctgatctacggcgctaccacactggaaacaggcgtgcccagcagattttctggcagcggctctggcaccgactacaccctgacaatatccagcctccagcctgaggacttcgccacctactactgtcagcagagctggaacaccccttggacattcggccagggcaccaagctggaaatcaagagactcgaggatctgcggaacgtgaccccacccaaggtgtccctgttcgagcccagcaaggccgagatcgccaataaacagaaggccaccctcgtgtgcctggccagaggcttcttccccgaccacgtggaactgtcttggtgggtcaacggcaaagaggtgcacagcggcgtcagcaccgaccctcaggcctacaaagagagcaactacagctactgcctgagcagtcggctgcgggtgtccgccaccttctggcacaacccccggaaccacttcagatgccaggtgcagttccacggcctgagcgaagaggacaagtggcccgagggcagccccaagcctgtcacccagaacatcagcgccgaggcctggggcagagcctgtggcatcaccagcagctaccagcagggcgtgctgagcgcctactacacatacctgctgctgctcctcaagagcgtgatctacctggccatcatcagcttcagcctgctgcggagaacaagcgtgtgcggcaacgagaagaagtccagggccaagcgatctggatctggagcaacaaacttctcactactcaaacaagcaggtgacgtggaggagaatcccgggcctactagtatggactggatttggcgcatccttttccttgtcggcgctgctaccggcgcgcattccttcgaacaagttcagcttcaacagcctggcgctgagctggtcaaacctggcgcttctgtgaagatgagctgcaaagccagcggctacgccttcagcagctactggatcaactggatgaagcagaaacccggccagggactcgaatggatcggccaaatctatcccggcgacggcgacaccaactacaacggcaagttcaagggcagagccacactgaccgccgatacctctagcagcacagcctacatgcagctgagcagcctgaccagcgaagatagcgccgtgtacttctgtgcccggtccatcacaacagtcgtgggctgcgctatggactattggggccagggaacaagcgtgaccgtgtctagtacgcgtatccagaaccctgatcctgccgtgtaccagctgcgggatagcaagagcagcgacaagagcgtgtgtctgttcaccgacttcgacagccagaccaacgtgtcccagagcaaggactccgacgtgtacatcaccgataagaccgtgctggacatgcggagcatggacttcaagagcaactccgccgtggcctggtccaacaagtccgatttcgcctgcgccaacgccttcaacaacagcattatccccgaggacacattcttcccaagccccgagagcagctgcgacgtgaagctggtggaaaagagcttcgagacagacaccaacctgaacttccagaacctgaccgtgctgggcctgagactgctgttcgccaagacaatcgccatcaactttctgctgaccgtcaagctgttcttccgcgccaagagaagcggatctggcgtgaagcagaccctgaatttcgacctgctgaagctggctggcgacgtggaatccaacccaggcccttctagaggccatatgaccgagtacaagcccacggtgcgcctcgccacccgcgacgacgtccccagggccgtacgcaccctcgccgccgcgttcgccgactaccccgccacgcgccacaccgtcgatccggaccgccacatcgagcgggtcaccgagctgcaagaactcttcctcacgcgcgtcgggctcgacatcggcaaggtgtgggtcgcggacgacggcgccgcggtggcggtctggaccacgccggagagcgtcgaagcgggggcggtgttcgccgagatcggcccgcgcatggccgagttgagcggttcccggctggccgcgcagcaacagatggaaggcctcctggcgccgcaccggcccaaggagcccgcgtggttcctggccaccgtcggcgtctcgcccgaccaccagggcaagggtctgggcagcgccgtcgtgctccccggagtggaggcggccgagcgcgccggggtgcccgccttcctggagacctccgcgccccgcaacctccccttctacgagcggctcggcttcaccgtcaccgccgacgtcgaggtgcccgaaggaccgcgcacctggtgcatgacccgcaagcccggtgcctga

SEQ ID NO: 40455 - DNA, 2550 bp, synthetic construct
  source 1..2550: mol_type = other DNA
atggccttaccagtgaccgccttgctcctgccgctggccttgctgctccacgccgccaggccggacatccagatgacacagagccctagcagcctgtctgccagcgtgggagacagagtgaccatcacatgcaaggccagcgaccacatcaacaactggctggcctggtatcagcagaagcctggacaggcccctaagctgctgatctacggcgctaccacactggaaacaggcgtgcccagcagattttctggcagcggctctggcaccgactacaccctgacaatatccagcctccagcctgaggacttcgccacctactactgtcagcagagctggaacaccccttggacattcggccagggcaccaagctggaaatcaagagactcgaggatctgcggaacgtgaccccacccaaggtgtccctgttcgagcccagcaaggccgagatcgccaataaacagaaggccaccctcgtgtgcctggccagaggcttcttccccgaccacgtggaactgtcttggtgggtcaacggcaaagaggtgcacagcggcgtcagcaccgaccctcaggcctacaaagagagcaactacagctactgcctgagcagtcggctgcgggtgtccgccaccttctggcacaacccccggaaccacttcagatgccaggtgcagttccacggcctgagcgaagaggacaagtggcccgagggcagccccaagcctgtcacccagaacatcagcgccgaggcctggggcagagcctgtggcatcaccagcagctaccagcagggcgtgctgagcgcctactacatgtacttgttgctgctgctgaagtccgtggtgtacttcgccatcatcacatgctgcctgctgcggagaaccgccttctgctgcaacggcgagaagtctagggccaagcgatctggatctggagcaacaaacttctcactactcaaacaagcaggtgacgtggaggagaatcccgggcctactagtatggactggatttggcgcatccttttccttgtcggcgctgctaccggcgcgcattccttcgaacaagttcagcttcaacagcctggcgctgagctggtcaaacctggcgcttctgtgaagatgagctgcaaagccagcggctacgccttcagcagctactggatcaactggatgaagcagaaacccggccagggactcgaatggatcggccaaatctatcccggcgacggcgacaccaactacaacggcaagttcaagggcagagccacactgaccgccgatacctctagcagcacagcctacatgcagctgagcagcctgaccagcgaagatagcgccgtgtacttctgtgcccggtccatcacaacagtcgtgggctgcgctatggactattggggccagggaacaagcgtgaccgtgtctagtacgcgtatccagaaccctgatcctgccgtgtaccagctgcgggatagcaagagcagcgacaagagcgtgtgtctgttcaccgacttcgacagccagaccaacgtgtcccagagcaaggactccgacgtgtacatcaccgataagaccgtgctggacatgcggagcatggacttcaagagcaactccgccgtggcctggtccaacaagtccgatttcgcctgcgccaacgccttcaacaacagcattatccccgaggacacattcttcccaagccccgagagcagctgcgacgtgaagctggtggaaaagagcttcgagacagacaccaacctgaacttccagaacctgaccgtgctgggcctgagactgctgttcgccaagacaatcgccatcaactttctgctgaccgtcaagctgttcttccgcgccaagagaagcggatctggcgtgaagcagaccctgaatttcgacctgctgaagctggctggcgacgtggaatccaacccaggcccttctagaggccatatgaccgagtacaagcccacggtgcgcctcgccacccgcgacgacgtccccagggccgtacgcaccctcgccgccgcgttcgccgactaccccgccacgcgccacaccgtcgatccggaccgccacatcgagcgggtcaccgagctgcaagaactcttcctcacgcgcgtcgggctcgacatcggcaaggtgtgggtcgcggacgacggcgccgcggtggcggtctggaccacgccggagagcgtcgaagcgggggcggtgttcgccgagatcggcccgcgcatggccgagttgagcggttcccggctggccgcgcagcaacagatggaaggcctcctggcgccgcaccggcccaaggagcccgcgtggttcctggccaccgtcggcgtctcgcccgaccaccagggcaagggtctgggcagcgccgtcgtgctccccggagtggaggcggccgagcgcgccggggtgcccgccttcctggagacctccgcgccccgcaacctccccttctacgagcggctcggcttcaccgtcaccgccgacgtcgaggtgcccgaaggaccgcgcacctggtgcatgacccgcaagcccggtgcctga

SEQ ID NO: 40456 - DNA, 2547 bp, synthetic construct
  source 1..2547: mol_type = other DNA
atggccttaccagtgaccgccttgctcctgccgctggccttgctgctccacgccgccaggccggacatccagatgacacagagccctagcagcctgtctgccagcgtgggagacagagtgaccatcacatgcaaggccagcgaccacatcaacaactggctggcctggtatcagcagaagcctggacaggcccctaagctgctgatctacggcgctaccacactggaaacaggcgtgcccagcagattttctggcagcggctctggcaccgactacaccctgacaatatccagcctccagcctgaggacttcgccacctactactgtcagcagagctggaacaccccttggacattcggccagggcaccaagctggaaatcaagagactcgaggacaagagactggacgccgacatcagccccaagcctacaatcttcctgcctagcgtggccgagacaaacctgcacaagaccggcacctacctgtgtctgctggaaaagttcttccccgacgtgatccgggtgtactggaaagagaaggacggcaacaccatcctggactcccaagagggcgacaccctgaaaacaaacgacacctacatgaagttcagctggctgaccgtgcctgagagagctatgggcaaagaacacagatgcatcgtgaagcacgagaacaacaaaggcggagccgaccaagagatattcttcccgagcatcaagaaagtggccgtgtccaccaagccaaccacctgttggcaggacaagaacgacgtgctccagctccagttcaccatcaccagcgcctactacacatacctgctgctgctcctcaagagcgtgatctacctggccatcatcagcttcagcctgctgcggagaacaagcgtgtgcggcaacgagaagaagtccagggccaagcgatctggatctggagcaacaaacttctcactactcaaacaagcaggtgacgtggaggagaatcccgggcctactagtatggactggatttggcgcatccttttccttgtcggcgctgctaccggcgcgcattccttcgaacaagttcagcttcaacagcctggcgctgagctggtcaaacctggcgcttctgtgaagatgagctgcaaagccagcggctacgccttcagcagctactggatcaactggatgaagcagaaacccggccagggactcgaatggatcggccaaatctatcccggcgacggcgacaccaactacaacggcaagttcaagggcagagccacactgaccgccgatacctctagcagcacagcctacatgcagctgagcagcctgaccagcgaagatagcgccgtgtacttctgtgcccggtccatcacaacagtcgtgggctgcgctatggactattggggccagggaacaagcgtgaccgtgtctagtacgcgtatccagaaccctgatcctgccgtgtaccagctgcgggatagcaagagcagcgacaagagcgtgtgtctgttcaccgacttcgacagccagaccaacgtgtcccagagcaaggactccgacgtgtacatcaccgataagaccgtgctggacatgcggagcatggacttcaagagcaactccgccgtggcctggtccaacaagtccgatttcgcctgcgccaacgccttcaacaacagcattatccccgaggacacattcttcccaagccccgagagcagctgcgacgtgaagctggtggaaaagagcttcgagacagacaccaacctgaacttccagaacctgaccgtgctgggcctgagactgctgttcgccaagacaatcgccatcaactttctgctgaccgtcaagctgttcttccgcgccaagagaagcggatctggcgtgaagcagaccctgaatttcgacctgctgaagctggctggcgacgtggaatccaacccaggcccttctagaggccatatgaccgagtacaagcccacggtgcgcctcgccacccgcgacgacgtccccagggccgtacgcaccctcgccgccgcgttcgccgactaccccgccacgcgccacaccgtcgatccggaccgccacatcgagcgggtcaccgagctgcaagaactcttcctcacgcgcgtcgggctcgacatcggcaaggtgtgggtcgcggacgacggcgccgcggtggcggtctggaccacgccggagagcgtcgaagcgggggcggtgttcgccgagatcggcccgcgcatggccgagttgagcggttcccggctggccgcgcagcaacagatggaaggcctcctggcgccgcaccggcccaaggagcccgcgtggttcctggccaccgtcggcgtctcgcccgaccaccagggcaagggtctgggcagcgccgtcgtgctccccggagtggaggcggccgagcgcgccggggtgcccgccttcctggagacctccgcgccccgcaacctccccttctacgagcggctcggcttcaccgtcaccgccgacgtcgaggtgcccgaaggaccgcgcacctggtgcatgacccgcaagcccggtgcctga

SEQ ID NO: 40457 - DNA, 4053 bp, synthetic construct
  source 1..4053: mol_type = other DNA
atggccttaccagtgaccgccttgctcctgccgctggccttgctgctccacgccgccaggccggaggttcagctgcttgagtctggcggaggactggttcaacctggcggaagcctgagactgtcttgtgccgccagcggcttcacctttagcagctacgccatgagctgggtccgacaggctcctggcaaaggactggaatgggtgtccagcatcagcggcagcggcgactacatctactacgccgatagcgtgaagggcagattcaccatcagccgggacatcagcaagaacaccctgtacctccagatgaacagcctgagagccgaggacaccgccgtgtactactgtgccaaagaaggcaccggcgctaacagcagcctggccgattatagaggccagggcacactggtcaccgtgtctagtctcgaggacctgaagaacgtgttcccacctgaggtggccgtgttcgagcctagcgaggccgagatcagccacacccagaaagccaccctcgtgtgcctggctaccggcttctaccccgaccatgtggaactgtcttggtgggtcaacggcaaagaggtgcacagcggcgtgtctaccgacccccagccactgaaagaacagcccgccctgaacgacagccggtactgcctgagcagcagactgagagtgtccgccaccttctggcagaacccccggaaccacttcagatgccaggtgcagttctacggcctgagcgagaacgacgagtggacccaggacagagccaagcccgtgacccagatcgtgtctgccgaagcctggggcagagccgattgcggatcccagagcttcggcctgctggaccccaagctgtgctacctgctggatggcatcctgttcatctacggcgtgatcctgaccgccctgttcctgggcggtggaggctctatccggaacggctctgaagttcgcgatcctctggtcacctacgagggcagcaatcctcctgccagtcctctgcaggataacctcgtgatcgccctgcacagctacgagccttctcatgatggcgacctgggctttgagaagggcgagcagctgagaatcctggaacagtctggcgagtggtggaaggcccagtctctgacaacaggccaagagggcttcatccccttcaacttcgtggccaaggccaacagcctggaacctgagccttggtttttcaagaacctgtccagaaaggacgccgagagacagctgctggcccctggaaatacccacggcagctttctgattagagagagcgagagcacagccggcagcttcagcctgagtgtgcgggactttgaccagaatcaaggcgaggtcgtgaagcactacaagatccggaacctggataacggcggcttctacatcagccccagaatcacctttcctggcctgcacgaactcgtgcggcactacacaaatgcctccgatggcctgtgcaccagactgagcagaccctgtcagacccagaagcctcagaaaccttggtgggaagatgagtgggaagtgcccagagaaaccctgaagctggtggaaagactcggagccggccagtttggagaagtgtggatgggctactacaatggccacaccaaggtggccgtgaagtctctgaagcagggctctatgagcccagatgcttttctggccgaggccaatctgatgaagcagctgcagcaccagagacttgtgcggctgtatgccgtggtcacccaagagcctatctacatcatcaccgagtacatggaaaacggcagcctggtggacttcctgaaaacccctagcggcatcaagctgaccattaacaagctgctggacatggccgctcagatcgccgaaggcatggcctttatcgaggaacggaactacatccacagggacctgagagccgccaatatcctggtgtctgacaccctgagctgcaagattgccgatttcggcctggccagactgatcgaggacaatgagtataccgccagagagggcgccaagtttcccatcaaatggacagcccctgaggccatcaactacggcaccttcaccatcaagagcgacgtgtggtccttcggcatcctgctgacagagatcgtgacacacggcagaatcccatatcctggcatgacaaaccccgaagtgatccagaatctggaacggggctacagaatggtccgacctgacaactgccccgaggaactgtaccagctgatgagactgtgctggaaagagaggcccgaggacagacccaccttcgactacctgagaagcgtgctggaagatttcttcaccgccaccgagggccagtaccagcctcagccagggaattccagggccaagcgatctggatctggagcaacaaacttctcactactcaaacaagcaggtgacgtggaggagaatcccgggcctactagtatggactggatttggcgcatccttttccttgtcggcgctgctaccggcgcgcattccttcgaacaagttcagcttcaacagcctggcgctgagctggtcaaacctggcgcttctgtgaagatgagctgcaaagccagcggctacgccttcagcagctactggatcaactggatgaagcagaaacccggccagggactcgaatggatcggccaaatctatcccggcgacggcgacaccaactacaacggcaagttcaagggcagagccacactgaccgccgatacctctagcagcacagcctacatgcagctgagcagcctgaccagcgaagatagcgccgtgtacttctgtgcccggtccatcacaacagtcgtgggctgcgctatggactattggggccagggaacaagcgtgaccgtgtctagtacgcgtatccagaaccctgatcctgccgtgtaccagctgcgggatagcaagagcagcgacaagagcgtgtgtctgttcaccgacttcgacagccagaccaacgtgtcccagagcaaggactccgacgtgtacatcaccgataagaccgtgctggacatgcggagcatggacttcaagagcaactccgccgtggcctggtccaacaagtccgatttcgcctgcgccaacgccttcaacaacagcattatccccgaggacacattcttcccaagccccgagagcagctgcggtaccatcactcaaggtttggcagtgtcaaccatctcatcattctttccacctggctaccaagtgtccttctgcctggtcatggtgctgctgttcgccgtggataccggcctgtacttcagcgtcaagaccaacatccggtccagcaccagagactggaaggaccacaagttcaagtggcggaaggaccctcaggacaagagggccaagcgatctggatctggagcaacaaacttctcactactcaaacaagcaggtgacgtggaggagaatcccgggccttctagaggccatatgaccgagtacaagcccacggtgcgcctcgccacccgcgacgacgtccccagggccgtacgcaccctcgccgccgcgttcgccgactaccccgccacgcgccacaccgtcgatccggaccgccacatcgagcgggtcaccgagctgcaagaactcttcctcacgcgcgtcgggctcgacatcggcaaggtgtgggtcgcggacgacggcgccgcggtggcggtctggaccacgccggagagcgtcgaagcgggggcggtgttcgccgagatcggcccgcgcatggccgagttgagcggttcccggctggccgcgcagcaacagatggaaggcctcctggcgccgcaccggcccaaggagcccgcgtggttcctggccaccgtcggcgtctcgcccgaccaccagggcaagggtctgggcagcgccgtcgtgctccccggagtggaggcggccgagcgcgccggggtgcccgccttcctggagacctccgcgccccgcaacctccccttctacgagcggctcggcttcaccgtcaccgccgacgtcgaggtgcccgaaggaccgcgcacctggtgcatgacccgcaagcccggtgcctga

SEQ ID NO: 40458 - DNA, 1869 bp, synthetic construct
  source 1..1869: mol_type = other DNA
atggccttaccagtgaccgccttgctcctgccgctggccttgctgctccacgccgccaggccggacgacatcgtgatgacacagagccctgatagcctggccgtgtctctgggagagagagccaccattaactgcaaggccagccagagcgtggactacgacggcgacagcttcctgaactggtatcagcagaagcccggccagcctcctaagctgctgatctacgccgccagcaatctggaaagcggcgtgccaagcagattttccggctctggcagcggcaccgatttcaccctgacaatatccagcctccagcctgaggacgtggccgtgtactactgccagcagagcaacgacgaccctctgacctttggacagggcaccaaggtggaaatcaaactcgaggacctgaagaacgtgttcccacctgaggtggccgtgttcgagcctagcgaggccgagatcagccacacccagaaagccaccctcgtgtgcctggctaccggcttctaccccgaccatgtggaactgtcttggtgggtcaacggcaaagaggtgcacagcggcgtgtgtaccgacccccagccactgaaagaacagcccgccctgaacgacagccggtactgcctgagcagcagactgagagtgtccgccaccttctggcagaacccccggaaccacttcagatgccaggtgcagttctacggcctgagcgagaacgacgagtggacccaggacagagccaagcccgtgacccagatcgtgtctgccgaagcctggggcagagccgattgcggctttaccagcgagagctaccagcagggcgtgctgagcgccaccatcctgtacgagatcctgctgggcaaggccaccctgtacgccgtgctggtgtctgccctggtgctgatggctatggtcaagcggaaggacagccggggaagggccaagcgatctggatctggagcaacaaacttctcactactcaaacaagcaggtgacgtggaggagaatcccgggcctactagtatggactggatttggcgcatccttttccttgtcggcgctgctaccggcgcgcattccttcgaagaagtccaacttgtggagtctggagggggcctggtgcagcccggcggctctctcagactgtcttgtgcggcaagcggctacaccttcacctcttactggatagaatgggtgaggcaggcacctggaaagggactggagtggattggagagattctgccaggagggggagatacaaattacaatgaaatcttcaaggggcgggccaccttttcagcggataccagcaagaatacagcttacctgcagatgaatagcctccgggcagaagataccgctgtttattattgcacgagacgggtgccaataagactggactattgggggcaagggactcttgtcaccgtcagttcaacgcgtatccagaaccctgatcctgccgtgtaccagctgcgggatagcaagagcagcgacaagagcgtgtgtctgttcaccgacttcgacagccagaccaacgtgtcccagagcaaggactccgacgtgtacatcaccgataagtgcgtgctggacatgcggagcatggacttcaagagcaactccgccgtggcctggtccaacaagtccgatttcgcctgcgccaacgccttcaacaacagcattatccccgaggacacattcttcccaagccccgagagcagctgcgacgtgaagctggtggaaaagagcttcgagacagacaccaacctgaacttccagaacctgagcgtgatcggcttcagaatcctgctgctgaaagtggccggctttaacctgctgatgaccctgcggctgtggtccagctaa

SEQ ID NO: 40459 - DNA, 2574 bp, synthetic construct
  source 1..2574: mol_type = other DNA
atggccttaccagtgaccgccttgctcctgccgctggccttgctgctccacgccgccaggccggacatccagatgacacagagccctagcagcctgtctgccagcgtgggagacagagtgaccatcacctgtagagccagccaggacatcagcagctacctgaactggtatcagcagaagcccggcaaggcccctaagctgctgatctactacaccagcagactgcacagcggcgtgcccagcagattttctggctctggcagcggcaccgacttcaccctgacaatatctagcctccagcctgaggacttcgccacctactattgccagcagggcaacaccctgccttacacatttggacagggcaccaaggtggaaatcaagagactcgaggacaagcagctggacgccgacgtgtcccccaagcctaccatcttcctgccctctatcgccgagacaaagctccagaaggccggcacctacctgtgcctgctggaaaagttcttcccagatgtgattaagatccactggcaggaaaagaagtccaacaccatcctgggcagccaggaaggcaacaccatgaagaccaacgacacctacatgaagttcagctggctgaccgtgcccgagaagtccctggacaaagaacacagatgcatcgtgcggcacgaaaacaacaagaacggcgtggaccaggaaatcatcttcccacccatcaagaccgatgtgattacaatggaccccaaggacaactgctccaaggacgccaacgataccctgctgctccagctgaccaacaccagcgccaccatcctgtacgagatcctgctgggcaaggccaccctgtacgccgtgctggtgtctgccctggtgctgatggctatggtcaagcggaaggacagccggggaagggccaagcgatctggatctggagcaacaaacttctcactactcaaacaagcaggtgacgtggaggagaatcccgggcctactagtatggactggatttggcgcatccttttccttgtcggcgctgctaccggcgcgcattccttcgaagtgcagctggttgaatcaggtggcggcctggttcaacctggcggatctctgagactgagctgtgccgccagcggctacaccttcagcgactactttatgagctgggtccgacaggcccctggcaaaggacttgaatgggtcgccaccatcagcaatggcggcacctacacttactaccccgacagcgtgaagggcagattcaccatctccagagacaacagcaagaacaccctgtacctccagatgaactccctgagagccgaggacaccgccgtgtactactgcgccagattcgacggctacatcttcgactattggggccagggcaccctggtcacagtctcttctacgcgtagccagcctcacaccaagcccagcgtgttcgtgatgaagaacggcaccaacgtggcctgcctcgtgaaagagttctaccccaaggacatcaggatcaacctggtgtccagcaagaagatcaccgagttcgaccccgccatcgtgatctcccccagcggcaagtacaacgccgtgaagctggggaagtacgaggacagcaacagcgtgacctgctccgtgcagcacgacaacaagaccgtgcacagcaccgactttgaagtgaaaaccgactccaccgaccacgtgaagcccaaagagacagagaacaccaagcagcccagcaagagctgccacaagcccaaggccatcgtgcacaccgagaaagtgaacatgatgagcctgaccgtgctgggcttcagaatcctgctgctgaaagtggccggctttaacctgctgatgaccctgcggctgtggtccagccgcgccaagagaagcggatctggcgtgaagcagaccctgaatttcgacctgctgaagctggctggcgacgtggaatccaacccaggcccttctagaggccatatgaccgagtacaagcccacggtgcgcctcgccacccgcgacgacgtccccagggccgtacgcaccctcgccgccgcgttcgccgactaccccgccacgcgccacaccgtcgatccggaccgccacatcgagcgggtcaccgagctgcaagaactcttcctcacgcgcgtcgggctcgacatcggcaaggtgtgggtcgcggacgacggcgccgcggtggcggtctggaccacgccggagagcgtcgaagcgggggcggtgttcgccgagatcggcccgcgcatggccgagttgagcggttcccggctggccgcgcagcaacagatggaaggcctcctggcgccgcaccggcccaaggagcccgcgtggttcctggccaccgtcggcgtctcgcccgaccaccagggcaagggtctgggcagcgccgtcgtgctccccggagtggaggcggccgagcgcgccggggtgcccgccttcctggagacctccgcgccccgcaacctccccttctacgagcggctcggcttcaccgtcaccgccgacgtcgaggtgcccgaaggaccgcgcacctggtgcatgacccgcaagcccggtgcctga

SEQ ID NO: 40460 - DNA, 2574 bp, synthetic construct
  source 1..2574: mol_type = other DNA
atggccttaccagtgaccgccttgctcctgccgctggccttgctgctccacgccgccaggccggacatccagatgacacagagccctagcagcctgtctgccagcgtgggagacagagtgaccatcacctgtagagccagccaggacatcagcagctacctgaactggtatcagcagaagcccggcaaggcccctaagctgctgatctactacaccagcagactgcacagcggcgtgcccagcagattttctggctctggcagcggcaccgacttcaccctgacaatatctagcctccagcctgaggacttcgccacctactattgccagcagggcaacaccctgccttacacatttggacagggcaccaaggtggaaatcaagagactcgaggacaagcagctggacgccgacgtgtcccccaagcctaccatcttcctgccctctatcgccgagacaaagctccagaaggccggcacctacctgtgcctgctggaaaagttcttcccagatgtgattaagatccactggcaggaaaagaagtccaacaccatcctgggcagccaggaaggcaacaccatgaagaccaacgacacctacatgaagttcagctggctgaccgtgcccgagaagtccctggacaaagaacacagatgcatcgtgcggcacgaaaacaacaagaacggcgtggaccaggaaatcatcttcccacccatcaagaccgatgtgattacaatggaccccaaggacaactgctccaaggacgccaacgataccctgctgctccagctgaccaacaccagcgcctactacatgtacgagatcctgctgggcaaggccaccctgtacgccgtgctggtgtctgccctggtgctgatggctatggtcaagcggaaggacagccggggaagggccaagcgatctggatctggagcaacaaacttctcactactcaaacaagcaggtgacgtggaggagaatcccgggcctactagtatggactggatttggcgcatccttttccttgtcggcgctgctaccggcgcgcattccttcgaagtgcagctggttgaatcaggtggcggcctggttcaacctggcggatctctgagactgagctgtgccgccagcggctacaccttcagcgactactttatgagctgggtccgacaggcccctggcaaaggacttgaatgggtcgccaccatcagcaatggcggcacctacacttactaccccgacagcgtgaagggcagattcaccatctccagagacaacagcaagaacaccctgtacctccagatgaactccctgagagccgaggacaccgccgtgtactactgcgccagattcgacggctacatcttcgactattggggccagggcaccctggtcacagtctcttctacgcgtagccagcctcacaccaagcccagcgtgttcgtgatgaagaacggcaccaacgtggcctgcctcgtgaaagagttctaccccaaggacatcaggatcaacctggtgtccagcaagaagatcaccgagttcgaccccgccatcgtgatctcccccagcggcaagtacaacgccgtgaagctggggaagtacgaggacagcaacagcgtgacctgctccgtgcagcacgacaacaagaccgtgcacagcaccgactttgaagtgaaaaccgactccaccgaccacgtgaagcccaaagagacagagaacaccaagcagcccagcaagagctgccacaagcccaaggccatcgtgcacaccgagaaagtgaacatgatgagcctgaccgtgctgggcttcagaatcctgctgctgaaagtggccggctttaacctgctgatgaccctgcggctgtggtccagccgcgccaagagaagcggatctggcgtgaagcagaccctgaatttcgacctgctgaagctggctggcgacgtggaatccaacccaggcccttctagaggccatatgaccgagtacaagcccacggtgcgcctcgccacccgcgacgacgtccccagggccgtacgcaccctcgccgccgcgttcgccgactaccccgccacgcgccacaccgtcgatccggaccgccacatcgagcgggtcaccgagctgcaagaactcttcctcacgcgcgtcgggctcgacatcggcaaggtgtgggtcgcggacgacggcgccgcggtggcggtctggaccacgccggagagcgtcgaagcgggggcggtgttcgccgagatcggcccgcgcatggccgagttgagcggttcccggctggccgcgcagcaacagatggaaggcctcctggcgccgcaccggcccaaggagcccgcgtggttcctggccaccgtcggcgtctcgcccgaccaccagggcaagggtctgggcagcgccgtcgtgctccccggagtggaggcggccgagcgcgccggggtgcccgccttcctggagacctccgcgccccgcaacctccccttctacgagcggctcggcttcaccgtcaccgccgacgtcgaggtgcccgaaggaccgcgcacctggtgcatgacccgcaagcccggtgcctga

SEQ ID NO: 40461 - DNA, 2592 bp, synthetic construct
  source 1..2592: mol_type = other DNA
atggccttaccagtgaccgccttgctcctgccgctggccttgctgctccacgccgccaggccgagctacgtgctgacacagcctccatccgtgtctgtggctccaggacagaccgccagaatcacatgcggcggcaacaacatcggcggcaagagcgtgcactggtatcagcagccacctggacaggctccagtggtggtggtgtacgacgacagcgatagacctagcggcatccccgagagattcagcggcagcaattccggcaataccgccacactgaccatcagcagagtggaagctggcgacgaggccgtgtactactgccaagtgtgggacagcagcagcgatcacgtggtgtttggcggcggaacaaagctgacagtgcttctcgaggacaagcagctggacgccgacgtgtcccccaagcctaccatcttcctgccctctatcgccgagacaaagctccagaaggccggcacctacctgtgcctgctggaaaagttcttcccagatgtgattaagatccactggcaggaaaagaagtccaacaccatcctgggcagccaggaaggcaacaccatgaagaccaacgacacctacatgaagttcagctggctgaccgtgcccgagaagtccctggacaaagaacacagatgcatcgtgcggcacgaaaacaacaagaacggcgtggaccaggaaatcatcttcccacccatcaagaccgatgtgattacaatggaccccaaggacaactgctccaaggacgccaacgataccctgctgctccagctgaccaacaccagcgccaccatcctgtacgagatcctgctgggcaaggccaccctgtacgccgtgctggtgtctgccctggtgctgatggctatggtcaagcggaaggacagccggggaagggccaagcgatctggatctggagcaacaaacttctcactactcaaacaagcaggtgacgtggaggagaatcccgggcctactagtatggactggatttggcgcatccttttccttgtcggcgctgctaccggcgcgcattccttcgaacaactccagctgcaagagtctggccctggcctggtcaagcctagcgaaacactgagcctgacctgtaccgtgtctggcggctctatcagctccagcagctatttctggggctggatcagacaacctcctggcaaaggactggaatggatcggctccatctactacagcggcatcacctactacaaccccagcctgaagtccagagtgaccatctccgtggacaccagcaagaaccagttctccctgaagctgagcagcgtgacagccgccgataccgccgtgtattattgtgccagacatgacggcgctgtggccggcctgtttgattattggggacagggcaccctggtcaccgtgtcatctgctacgcgtagccagcctcacaccaagcccagcgtgttcgtgatgaagaacggcaccaacgtggcctgcctcgtgaaagagttctaccccaaggacatcaggatcaacctggtgtccagcaagaagatcaccgagttcgaccccgccatcgtgatctcccccagcggcaagtacaacgccgtgaagctggggaagtacgaggacagcaacagcgtgacctgctccgtgcagcacgacaacaagaccgtgcacagcaccgactttgaagtgaaaaccgactccaccgaccacgtgaagcccaaagagacagagaacaccaagcagcccagcaagagctgccacaagcccaaggccatcgtgcacaccgagaaagtgaacatgatgagcctgaccgtgatcggcttcagaatcctgctgctgaaagtggccggctttaacctgctgatgaccctgcggctgtggtccagccgcgccaagagaagcggatctggcgtgaagcagaccctgaatttcgacctgctgaagctggctggcgacgtggaatccaacccaggcccttctagaggccatatgaccgagtacaagcccacggtgcgcctcgccacccgcgacgacgtccccagggccgtacgcaccctcgccgccgcgttcgccgactaccccgccacgcgccacaccgtcgatccggaccgccacatcgagcgggtcaccgagctgcaagaactcttcctcacgcgcgtcgggctcgacatcggcaaggtgtgggtcgcggacgacggcgccgcggtggcggtctggaccacgccggagagcgtcgaagcgggggcggtgttcgccgagatcggcccgcgcatggccgagttgagcggttcccggctggccgcgcagcaacagatggaaggcctcctggcgccgcaccggcccaaggagcccgcgtggttcctggccaccgtcggcgtctcgcccgaccaccagggcaagggtctgggcagcgccgtcgtgctccccggagtggaggcggccgagcgcgccggggtgcccgccttcctggagacctccgcgccccgcaacctccccttctacgagcggctcggcttcaccgtcaccgccgacgtcgaggtgcccgaaggaccgcgcacctggtgcatgacccgcaagcccggtgcctga

SEQ ID NO: 40462 - DNA, 2556 bp, synthetic construct
  source 1..2556: mol_type = other DNA
atggccttaccagtgaccgccttgctcctgccgctggccttgctgctccacgccgccaggccggacatccagatgacacagagccctagcagcctgtctgccagcgtgggagacagagtgaccatcacctgtagagccagccaggacatcagcagctacctgaactggtatcagcagaagcccggcaaggcccctaagctgctgatctactacaccagcagactgcacagcggcgtgcccagcagattttctggctctggcagcggcaccgacttcaccctgacaatatctagcctccagcctgaggacttcgccacctactattgccagcagggcaacaccctgccttacacatttggacagggcaccaaggtggaaatcaagagactcgaggacctgaagaacgtgttcccacctgaggtggccgtgttcgagcctagcgaggccgagatcagccacacccagaaagccaccctcgtgtgcctggctaccggcttctaccccgaccatgtggaactgtcttggtgggtcaacggcaaagaggtgcacagcggcgtgtgtaccgacccccagccactgaaagaacagcccgccctgaacgacagccggtactgcctgagcagcagactgagagtgtccgccaccttctggcagaacccccggaaccacttcagatgccaggtgcagttctacggcctgagcgagaacgacgagtggacccaggacagagccaagcccgtgacccagatcgtgtctgccgaagcctggggcagagccgattgcggctttaccagcgagagctaccagcagggcgtgctgagcgccaccatcctgtacttgttgctgctgctgaagtccgtggtgtacttcgccatcatcacatgctgcctgctgcggagaaccgccttctgctgcaacggcgagaagtctagggccaagcgatctggatctggagcaacaaacttctcactactcaaacaagcaggtgacgtggaggagaatcccgggcctactagtatggactggatttggcgcatccttttccttgtcggcgctgctaccggcgcgcattccttcgaagtgcagctggttgaatcaggtggcggcctggttcaacctggcggatctctgagactgagctgtgccgccagcggctacaccttcagcgactactttatgagctgggtccgacaggcccctggcaaaggacttgaatgggtcgccaccatcagcaatggcggcacctacacttactaccccgacagcgtgaagggcagattcaccatctccagagacaacagcaagaacaccctgtacctccagatgaactccctgagagccgaggacaccgccgtgtactactgcgccagattcgacggctacatcttcgactattggggccagggcaccctggtcacagtctcttctacgcgtatccagaaccctgatcctgccgtgtaccagctgcgggatagcaagagcagcgacaagagcgtgtgtctgttcaccgacttcgacagccagaccaacgtgtcccagagcaaggactccgacgtgtacatcaccgataagtgcgtgctggacatgcggagcatggacttcaagagcaactccgccgtggcctggtccaacaagtccgatttcgcctgcgccaacgccttcaacaacagcattatccccgaggacacattcttcccaagccccgagagcagctgcgacgtgaagctggtggaaaagagcttcgagacagacaccaacctgaacttccagaacctgagcgtgctgggcctgcggatgctgttcgccaaaaccgtggccgtgaacttcctgctgaccgccaagctgttcttcctccgcgccaagagaagcggatctggcgtgaagcagaccctgaatttcgacctgctgaagctggctggcgacgtggaatccaacccaggcccttctagaggccatatgaccgagtacaagcccacggtgcgcctcgccacccgcgacgacgtccccagggccgtacgcaccctcgccgccgcgttcgccgactaccccgccacgcgccacaccgtcgatccggaccgccacatcgagcgggtcaccgagctgcaagaactcttcctcacgcgcgtcgggctcgacatcggcaaggtgtgggtcgcggacgacggcgccgcggtggcggtctggaccacgccggagagcgtcgaagcgggggcggtgttcgccgagatcggcccgcgcatggccgagttgagcggttcccggctggccgcgcagcaacagatggaaggcctcctggcgccgcaccggcccaaggagcccgcgtggttcctggccaccgtcggcgtctcgcccgaccaccagggcaagggtctgggcagcgccgtcgtgctccccggagtggaggcggccgagcgcgccggggtgcccgccttcctggagacctccgcgccccgcaacctccccttctacgagcggctcggcttcaccgtcaccgccgacgtcgaggtgcccgaaggaccgcgcacctggtgcatgacccgcaagcccggtgcctga

SEQ ID NO: 40463 - DNA, 1872 bp, synthetic construct
  source 1..1872: mol_type = other DNA
atggccttaccagtgaccgccttgctcctgccgctggccttgctgctccacgccgccaggccggacatccagttgacccagtcccccagctcactcagcgccagtgtgggggaccgggtgaccattacctgtaaagccagtcagagtgtggactatgacggggatagcttcctgaattggtatcagcagaagcctggcaaagccccaaagctgctgatctacgctgcatctaatctggagtcaggcgtgccttccaggttctccggtagtgggtctgggaccgatttcacattgaccatttcatccctccaacccgaggatttcgctacatattactgtcagcagtccaatgaggaccctctcacctttggccagggcaccaaagttgaaattaagagactcgaggacctgaagaacgtgttcccacctgaggtggccgtgttcgagcctagcgaggccgagatcagccacacccagaaagccaccctcgtgtgcctggctaccggcttctaccccgaccatgtggaactgtcttggtgggtcaacggcaaagaggtgcacagcggcgtgtgtaccgacccccagccactgaaagaacagcccgccctgaacgacagccggtactgcctgagcagcagactgagagtgtccgccaccttctggcagaacccccggaaccacttcagatgccaggtgcagttctacggcctgagcgagaacgacgagtggacccaggacagagccaagcccgtgacccagatcgtgtctgccgaagcctggggcagagccgattgcggctttaccagcgagagctaccagcagggcgtgctgagcgccaccatcctgtacttgttgctgctgctgaagtccgtggtgtacttcgccatcatcacatgctgcctgctgcggagaaccgccttctgctgcaacggcgagaagtctagggccaagcgatctggatctggagcaacaaacttctcactactcaaacaagcaggtgacgtggaggagaatcccgggcctactagtatggactggatttggcgcatccttttccttgtcggcgctgctaccggcgcgcattccttcgaagaagtccaacttgtggagtctggagggggcctggtgcagcccggcggctctctcagactgtcttgtgcggcaagcggctacaccttcacctcttactggatagaatgggtgaggcaggcacctggaaagggactggagtggattggagagattctgccaggagggggagatacaaattacaatgaaatcttcaaggggcgggccaccttttcagcggataccagcaagaatacagcttacctgcagatgaatagcctccgggcagaagataccgctgtttattattgcacgagacgggtgccaataagactggactattgggggcaagggactcttgtcaccgtcagttcaacgcgtatccagaaccctgatcctgccgtgtaccagctgcgggatagcaagagcagcgacaagagcgtgtgtctgttcaccgacttcgacagccagaccaacgtgtcccagagcaaggactccgacgtgtacatcaccgataagtgcgtgctggacatgcggagcatggacttcaagagcaactccgccgtggcctggtccaacaagtccgatttcgcctgcgccaacgccttcaacaacagcattatccccgaggacacattcttcccaagccccgagagcagctgcgacgtgaagctggtggaaaagagcttcgagacagacaccaacctgaacttccagaacctgagcgtgatcggcttcagaatcctgctgctgaaagtggccggctttaacctgctgatgaccctgcggctgtggtccagctaa

SEQ ID NO: 40464 - DNA, 2286 bp, synthetic construct; identical to SEQ ID NO: 32425
  source 1..2286: mol_type = other DNA

SEQ ID NO: 40465 - DNA, 2211 bp, synthetic construct
  source 1..2211: mol_type = other DNA
atggccttaccagtgaccgccttgctcctgccgctggccttgctgctccacgccgccaggccggacatccagatgacacagagccctagcagcctgtctgccagcgtgggagacagagtgaccatcacatgcaagagcagccagagcctgctggactccgatggcaagacctacctgaactggtatcagcagaagcccggcaaggcccctaagctgctgatctacctggtgtccaagctggatagcggcgtgcccagcagattttctggcagcggcagcggaaccgacttcaccctgacaatatccagcctccagcctgaggacttcgccacctactactgcttccaaggcacccactttccatacaccttcggccagggcaccaaggtggaaatcaaaagactcgaggacctgaagaacgtgttcccacctgaggtggccgtgttcgagcctagcgaggccgagatcagccacacccagaaagccaccctcgtgtgcctggctaccggcttctaccccgaccatgtggaactgtcttggtgggtcaacggcaaagaggtgcacagcggcgtgtctaccgacccccagccactgaaagaacagcccgccctgaacgacagccggtactgcctgagcagcagactgagagtgtccgccaccttctggcagaacccccggaaccacttcagatgccaggtgcagttctacggcctgagcgagaacgacgagtggacccaggacagagccaagcccgtgacccagatcgtgtctgccgaagcctggggcagagccgattgcggatcccagagcttcggcctgctggaccccaagctgtgctacctgctggatggcatcctgttcatctacggcgtgatcctgaccgccctgttcctgagagtgaagttcagcagaagcgccgacgcccctgcctaccagcagggacagaaccaactgtacaacgagctgaacctgggcagacgggaagagtacgacgtgctggacaagcggagaggcagggaccctgagatgggcggaaagccccggagaaagaacccccaggaaggactgtataacgaactccagaaagacaagatggccgaagcctacagcgagatcggcatgaagggcgagcggagaagaggcaagggccacgatggcctgtaccagggcctgagcaccgccaccaaggacacctatgacgccctgcacatgcaggccctgcctccaagaagggccaagcgatctggatctggagcaacaaacttctcactactcaaacaagcaggtgacgtggaggagaatcccgggcctactagtatggactggatttggcgcatccttttccttgtcggcgctgctaccggcgcgcattccttcgaacaggtgcaactgcagcagcctggcgctgaacttgtgcggccaggcgcctctgtgaagctgagctgtaaagccagcggctacaccttcaccagctactggatgaactgggtcaagcagcgcccaggccagggcctggaatggatcggaatgatcgaccccagcgacagcgagacacactacaaccacatcttcaaggacaaggccaccctgaccgtggacaagtccagcagcacagcctacctgcaactgtccagcctgaccagcgaggacagcgccgtgtactactgcgcccggaacctgtatctgtggggccagggaacaagcgtgaccgtgtctagcacgcgtatccagaaccctgatcctgccgtgtaccagctgcgggatagcaagagcagcgacaagagcgtgtgtctgttcaccgacttcgacagccagaccaacgtgtcccagagcaaggactccgacgtgtacatcaccgataagaccgtgctggacatgcggagcatggacttcaagagcaactccgccgtggcctggtccaacaagtccgatttcgcctgcgccaacgccttcaacaacagcattatccccgaggacacattcttcccaagccccgagagcagctgcggtaccatcactcaaggtttggcagtgtcaaccatctcatcattctttccacctggctaccaagtgtccttctgcctggtcatggtgctgctgttcgccgtggataccggcctgtacttcagcgtcaagaccaacatccggtccagcaccagagactggaaggaccacaagttcaagtggcggaaggacccccaggacaagtaa

SEQ ID NO: 40466 - DNA, 2919 bp, synthetic construct
  source 1..2919: mol_type = other DNA
atggccttaccagtgaccgccttgctcctgccgctggccttgctgctccacgccgccaggccggacatccagatgacacagagccctagcagcctgtctgccagcgtgggagacagagtgaccatcacatgcaagagcagccagagcctgctggactccgatggcaagacctacctgaactggtatcagcagaagcccggcaaggcccctaagctgctgatctacctggtgtccaagctggatagcggcgtgcccagcagattttctggcagcggcagcggaaccgacttcaccctgacaatatccagcctccagcctgaggacttcgccacctactactgcttccaaggcacccactttccatacaccttcggccagggcaccaaggtggaaatcaaaagactcgaggacctgaagaacgtgttcccacctgaggtggccgtgttcgagcctagcgaggccgagatcagccacacccagaaagccaccctcgtgtgcctggctaccggcttctaccccgaccatgtggaactgtcttggtgggtcaacggcaaagaggtgcacagcggcgtgtctaccgacccccagccactgaaagaacagcccgccctgaacgacagccggtactgcctgagcagcagactgagagtgtccgccaccttctggcagaacccccggaaccacttcagatgccaggtgcagttctacggcctgagcgagaacgacgagtggacccaggacagagccaagcccgtgacccagatcgtgtctgccgaagcctggggcagagccgattgcggatcccagagcttcggcctgctggaccccaagctgtgctacctgctggatggcatcctgttcatctacggcgtgatcctgaccgccctgttcctgagagtgaagttcagcagaagcgccgacgcccctgcctaccagcagggacagaaccaactgtacaacgagctgaacctgggcagacgggaagagtacgacgtgctggacaagcggagaggcagggaccctgagatgggcggaaagccccagcggagaaagaacccccaggaaggactgtataacgaactccagaaagacaagatggccgaagcctacagcgagatcggcatgaagggcgagcggagaagaggcaagggccacgatggcctgtaccagggcctgagcaccgccaccaaggacacctatgacgccctgcacatgcaggccctgcctccaagaagggccaagcgatctggatctggagcaacaaacttctcactactcaaacaagcaggtgacgtggaggagaatcccgggcctactagtatggactggatttggcgcatccttttccttgtcggcgctgctaccggcgcgcattccttcgaacaggtgcaactgcagcagcctggcgctgaacttgtgcggccaggcgcctctgtgaagctgagctgtaaagccagcggctacaccttcaccagctactggatgaactgggtcaagcagcgcccaggccagggcctggaatggatcggaatgatcgaccccagcgacagcgagacacactacaaccacatcttcaaggacaaggccaccctgaccgtggacaagtccagcagcacagcctacctgcaactgtccagcctgaccagcgaggacagcgccgtgtactactgcgcccggaacctgtatctgtggggccagggaacaagcgtgaccgtgtctagcacgcgtatccagaaccctgatcctgccgtgtaccagctgcgggatagcaagagcagcgacaagagcgtgtgtctgttcaccgacttcgacagccagaccaacgtgtcccagagcaaggactccgacgtgtacatcaccgataagaccgtgctggacatgcggagcatggacttcaagagcaactccgccgtggcctggtccaacaagtccgatttcgcctgcgccaacgccttcaacaacagcattatccccgaggacacattcttcccaagccccgagagcagctgcggtaccatcactcaaggtttggcagtgtcaaccatctcatcattctttccacctggctaccaagtgtccttctgcctggtcatggtgctgctgttcgccgtggataccggcctgtacttcagcgtcaagaccaacatccggtccagcaccagagactggaaggaccacaagttcaagtggcggaaggaccctcaggacaagagggccaagcgatctggatctggagcaacaaacttctcactactcaaacaagcaggtgacgtggaggagaatcccgggccttctagaatgtaccggatgcagctgctgagctgtatcgccctgtctctggccctggtcacaaatagcaactgggttaacgtgatctccgacctgaagaagatcgaggacctgatccagtccatgcacatcgacgccacactgtacaccgagagcgacgtgcaccctagctgtaaagtgaccgccatgaagtgctttctgctggaactgcaagtgatctccctggaaagcggcgacgccagcatccacgacaccgtgaagaacctgattatcctggctaacaacagcctgagcagcaacggcaacgtgaccgagtccggctgtaaagagtgcgaggaactggaagagaagaatatcaaagagttcctccagagcttcgtgcacatcgtgcagatgttcatcaacaccagcaagatcgaagtgatgtaccctcctccttacctggacaacgagaagtccaacggcaccatcatccacgtgaagggcaagcacctgtgtccttctccactgttccccggacctagcaagcctttctgggtgctcgttgttgttggcggcgtgctggcctgttacagcctgctggttaccgtggccttcatcatcttttgggtccgaagcaagcggagctaa

SEQ ID NO: 40467 - DNA, 2223 bp, synthetic construct
  source 1..2223: mol_type = other DNA
atggccttaccagtgaccgccttgctcctgccgctggccttgctgctccacgccgccaggccggacatccagatgacacagagccctagcagcctgtctgccagcgtgggagacagagtgaccatcacatgcaagagcagccagagcctgctggactccgatggcaagacctacctgaactggtatcagcagaagcccggcaaggcccctaagctgctgatctacctggtgtccaagctggatagcggcgtgcccagcagattttctggcagcggcagcggaaccgacttcaccctgacaatatccagcctccagcctgaggacttcgccacctactactgcttccaaggcacccactttccattcaccttcggccagggcaccaaggtggaaatcaaaagactcgaggacctgaagaacgtgttcccacctgaggtggccgtgttcgagcctagcgaggccgagatcagccacacccagaaagccaccctcgtgtgcctggctaccggcttctaccccgaccatgtggaactgtcttggtgggtcaacggcaaagaggtgcacagcggcgtgtctaccgacccccagccactgaaagaacagcccgccctgaacgacagccggtactgcctgagcagcagactgagagtgtccgccaccttctggcagaacccccggaaccacttcagatgccaggtgcagttctacggcctgagcgagaacgacgagtggacccaggacagagccaagcccgtgacccagatcgtgtctgccgaagcctggggcagagccgattgcggatcccagagcttcggcctgctggaccccaagctgtgctacctgctggatggcatcctgttcatctacggcgtgatcctgaccgccctgttcctgagagtgaagttcagcagaagcgccgacgcccctgcctaccagcagggacagaaccaactgtacaacgagctgaacctgggcagacgggaagagtacgacgtgctggacaagcggagaggcagggaccctgagatgggcggaaagccccggagaaagaacccccaggaaggactgtataacgaactccagaaagacaagatggccgaagcctacagcgagatcggcatgaagggcgagcggagaagaggcaagggccacgatggcctgtaccagggcctgagcaccgccaccaaggacacctatgacgccctgcacatgcaggccctgcctccaagaagggccaagcgatctggatctggagcaacaaacttctcactactcaaacaagcaggtgacgtggaggagaatcccgggcctactagtatggactggatttggcgcatccttttccttgtcggcgctgctaccggcgcgcattccttcgaagaagtccaacttgtggagtctggagggggcctggtgcagcccggcggctctctcagactgtcttgtgcggcaagcggctacaccttcagctcttactggatagaatgggtgaggcaggcacctggaaagggactggagtggattggagagattctgccaggagggggagatacaaattacaatgaaatcttcaaggggcgggccaccttttcagcggataccagcaagaatacagcttacctgcagatgaatagcctccgggcagaagataccgctgtttattattgcacgagacgggtgccaataagactggactattgggggcaagggactcttgtcaccgtcagttcaacgcgtatccagaaccctgatcctgccgtgtaccagctgcgggatagcaagagcagcgacaagagcgtgtgtctgttcaccgacttcgacagccagaccaacgtgtcccagagcaaggactccgacgtgtacatcaccgataagaccgtgctggacatgcggagcatggacttcaagagcaactccgccgtggcctggtccaacaagtccgatttcgcctgcgccaacgccttcaacaacagcattatccccgaggacacattcttcccaagccccgagagcagctgcggtaccatcactcaaggtttggcagtgtcaaccatctcatcattctttccacctggctaccaagtgtccttctgcctggtcatggtgctgctgttcgccgtggataccggcctgtacttcagcgtcaagaccaacatccggtccagcaccagagactggaaggaccacaagttcaagtggcggaaggaccctcaggacaagtaa

SEQ ID NO: 40468 - DNA, 1875 bp, synthetic construct
  source 1..1875: mol_type = other DNA
atggccttaccagtgaccgccttgctcctgccgctggccttgctgctccacgccgccaggccggacatccagatgacacagagccctagcagcctgtctgccagcgtgggagacagagtgaccatcacatgcaagagcagccagagcctgctggactccgatggcaagacctacctgaactggtatcagcagaagcccggcaaggcccctaagctgctgatctacctggtgtccaagctggatagcggcgtgcccagcagattttctggcagcggcagcggaaccgacttcaccctgacaatatccagcctccagcctgaggacttcgccacctactactgcttccaaggcacccactttccattcaccttcggccagggcaccaaggtggaaatcaaaagactcgaggacctgaagaacgtgttcccacctgaggtggccgtgttcgagcctagcgaggccgagatcagccacacccagaaagccaccctcgtgtgcctggctaccggcttctaccccgaccatgtggaactgtcttggtgggtcaacggcaaagaggtgcacagcggcgtgtgtaccgacccccagccactgaaagaacagcccgccctgaacgacagccggtactgcctgagcagcagactgagagtgtccgccaccttctggcagaacccccggaaccacttcagatgccaggtgcagttctacggcctgagcgagaacgacgagtggacccaggacagagccaagcccgtgacccagatcgtgtctgccgaagcctggggcagagccgattgcggctttaccagcgagagctaccagcagggcgtgctgagcgcctactacatgtacttgttgctgctgctgaagtccgtggtgtacttcgccatcatcacatgctgcctgctgcggagaaccgccttctgctgcaacggcgagaagtctagggccaagcgatctggatctggagcaacaaacttctcactactcaaacaagcaggtgacgtggaggagaatcccgggcctactagtatggactggatttggcgcatccttttccttgtcggcgctgctaccggcgcgcattccttcgaagaagtccaacttgtggagtctggagggggcctggtgcagcccggcggctctctcagactgtcttgtgcggcaagcggctacaccttcagctcttactggatagaatgggtgaggcaggcacctggaaagggactggagtggattggagagattctgccaggagggggagatacaaattacaatgaaatcttcaaggggcgggccaccttttcagcggataccagcaagaatacagcttacctgcagatgaatagcctccgggcagaagataccgctgtttattattgcacgagacgggtgccaataagactggactattgggggcaagggactcttgtcaccgtcagttcaacgcgtatccagaaccctgatcctgccgtgtaccagctgcgggatagcaagagcagcgacaagagcgtgtgtctgttcaccgacttcgacagccagaccaacgtgtcccagagcaaggactccgacgtgtacatcaccgataagtgcgtgctggacatgcggagcatggacttcaagagcaactccgccgtggcctggtccaacaagtccgatttcgcctgcgccaacgccttcaacaacagcattatccccgaggacacattcttcccaagccccgagagcagctgcgacgtgaagctggtggaaaagagcttcgagacagacaccaacctgaacttccagaacctgagcgtgatcggcttcagaatcctgctgctgaaagtggccggctttaacctgctgatgaccctgcggctgtggtccagctaa

SEQ ID NO: 40469 - DNA, 2211 bp, synthetic construct
  source 1..2211: mol_type = other DNA
atggccttaccagtgaccgccttgctcctgccgctggccttgctgctccacgccgccaggccggacatccagatgacacagagccctagcagcctgtctgccagcgtgggagacagagtgaccatcacatgcaagagcagccagagcctgctggactccgatggcaagacctacctgaactggtatcagcagaagcccggcaaggcccctaagctgctgatctacctggtgtccaagctggatagcggcgtgcccagcagattttctggcagcggcagcggaaccgacttcaccctgacaatatccagcctccagcctgaggacttcgccacctactactgcttccaaggcacccactttccattcaccttcggccagggcaccaaggtggaaatcaaaagactcgaggacctgaagaacgtgttcccacctgaggtggccgtgttcgagcctagcgaggccgagatcagccacacccagaaagccaccctcgtgtgcctggctaccggcttctaccccgaccatgtggaactgtcttggtgggtcaacggcaaagaggtgcacagcggcgtgtctaccgacccccagccactgaaagaacagcccgccctgaacgacagccggtactgcctgagcagcagactgagagtgtccgccaccttctggcagaacccccggaaccacttcagatgccaggtgcagttctacggcctgagcgagaacgacgagtggacccaggacagagccaagcccgtgacccagatcgtgtctgccgaagcctggggcagagccgattgcggatcccagagcttcggcctgctggaccccaagctgtgctacctgctggatggcatcctgttcatctacggcgtgatcctgaccgccctgttcctgagagtgaagttcagcagaagcgccgacgcccctgcctaccagcagggacagaaccaactgtacaacgagctgaacctgggcagacgggaagagtacgacgtgctggacaagcggagaggcagggaccctgagatgggcggaaagccccggagaaagaacccccaggaaggactgtataacgaactccagaaagacaagatggccgaagcctacagcgagatcggcatgaagggcgagcggagaagaggcaagggccacgatggcctgtaccagggcctgagcaccgccaccaaggacacctatgacgccctgcacatgcaggccctgcctccaagaagggccaagcgatctggatctggagcaacaaacttctcactactcaaacaagcaggtgacgtggaggagaatcccgggcctactagtatggactggatttggcgcatccttttccttgtcggcgctgctaccggcgcgcattccttcgaacaggtgcaactgcagcagcctggcgctgaacttgtgcggccaggcgcctctgtgaagctgagctgtaaagccagcggctacaccttcaccagctactggatgaactgggtcaagcagcgcccaggccagggcctggaatggatcggaatgatcgaccccagcgacagcgagacacactacaaccacatcttcaaggacaaggccaccctgaccgtggacaagtccagcagcacagcctacctgcaactgtccagcctgaccagcgaggacagcgccgtgtactactgcgcccggaacctgtatctgtggggccagggaacaagcgtgaccgtgtctagcacgcgtatccagaaccctgatcctgccgtgtaccagctgcgggatagcaagagcagcgacaagagcgtgtgtctgttcaccgacttcgacagccagaccaacgtgtcccagagcaaggactccgacgtgtacatcaccgataagaccgtgctggacatgcggagcatggacttcaagagcaactccgccgtggcctggtccaacaagtccgatttcgcctgcgccaacgccttcaacaacagcattatccccgaggacacattcttcccaagccccgagagcagctgcggtaccatcactcaaggtttggcagtgtcaaccatctcatcattctttccacctggctaccaagtgtccttctgcctggtcatggtgctgctgttcgccgtggataccggcctgtacttcagcgtcaagaccaacatccggtccagcaccagagactggaaggaccacaagttcaagtggcggaaggacccccaggacaagtaa

SEQ ID NO: 40470 - DNA, 2211 bp, synthetic construct
  source 1..2211: mol_type = other DNA
atggccttaccagtgaccgccttgctcctgccgctggccttgctgctccacgccgccaggccggacatccagatgacacagagccctagcagcctgtctgccagcgtgggagacagagtgaccatcacatgcaagagcagccagagcctgctggactccgatggcaagacctacctgaactggtatcagcagaagcccggcaaggcccctaagctgctgatctacctggtgtccaagctggatagcggcgtgcccagcagattttctggcagcggcagcggaaccgacttcaccctgacaatatccagcctccagcctgaggacttcgccacctactactgctggcaaggcacccactttccattcaccttcggccagggcaccaaggtggaaatcaaaagactcgaggacctgaagaacgtgttcccacctgaggtggccgtgttcgagcctagcgaggccgagatcagccacacccagaaagccaccctcgtgtgcctggctaccggcttctaccccgaccatgtggaactgtcttggtgggtcaacggcaaagaggtgcacagcggcgtgtctaccgacccccagccactgaaagaacagcccgccctgaacgacagccggtactgcctgagcagcagactgagagtgtccgccaccttctggcagaacccccggaaccacttcagatgccaggtgcagttctacggcctgagcgagaacgacgagtggacccaggacagagccaagcccgtgacccagatcgtgtctgccgaagcctggggcagagccgattgcggatcccagagcttcggcctgctggaccccaagctgtgctacctgctggatggcatcctgttcatctacggcgtgatcctgaccgccctgttcctgagagtgaagttcagcagaagcgccgacgcccctgcctaccagcagggacagaaccaactgtacaacgagctgaacctgggcagacgggaagagtacgacgtgctggacaagcggagaggcagggaccctgagatgggcggaaagccccggagaaagaacccccaggaaggactgtataacgaactccagaaagacaagatggccgaagcctacagcgagatcggcatgaagggcgagcggagaagaggcaagggccacgatggcctgtaccagggcctgagcaccgccaccaaggacacctatgacgccctgcacatgcaggccctgcctccaagaagggccaagcgatctggatctggagcaacaaacttctcactactcaaacaagcaggtgacgtggaggagaatcccgggcctactagtatggactggatttggcgcatccttttccttgtcggcgctgctaccggcgcgcattccttcgaacaggtgcaactgcagcagcctggcgctgaacttgtgcggccaggcgcctctgtgaagctgagctgtaaagccagcggctacaccttcaccagctactggatgaactgggtcaagcagcgcccaggccagggcctggaatggatcggaatgatcgaccccagcgacagcgagacacactacaaccacatcttcaaggacaaggccaccctgaccgtggacaagtccagcagcacagcctacctgcaactgtccagcctgaccagcgaggacagcgccgtgtactactgcgcccggaacctgtatctgtggggccagggaacaagcgtgaccgtgtctagcacgcgtatccagaaccctgatcctgccgtgtaccagctgcgggatagcaagagcagcgacaagagcgtgtgtctgttcaccgacttcgacagccagaccaacgtgtcccagagcaaggactccgacgtgtacatcaccgataagaccgtgctggacatgcggagcatggacttcaagagcaactccgccgtggcctggtccaacaagtccgatttcgcctgcgccaacgccttcaacaacagcattatccccgaggacacattcttcccaagccccgagagcagctgcggtaccatcactcaaggtttggcagtgtcaaccatctcatcattctttccacctggctaccaagtgtccttctgcctggtcatggtgctgctgttcgccgtggataccggcctgtacttcagcgtcaagaccaacatccggtccagcaccagagactggaaggaccacaagttcaagtggcggaaggacccccaggacaagtaa

SEQ ID NO: 40471 - DNA, 2919 bp, synthetic construct
  source 1..2919: mol_type = other DNA
atggccttaccagtgaccgccttgctcctgccgctggccttgctgctccacgccgccaggccggacatccagatgacacagagccctagcagcctgtctgccagcgtgggagacagagtgaccatcacatgcaagagcagccagagcctgctggactccgatggcaagacctacctgaactggtatcagcagaagcccggcaaggcccctaagctgctgatctacctggtgtccaagctggatagcggcgtgcccagcagattttctggcagcggcagcggaaccgacttcaccctgacaatatccagcctccagcctgaggacttcgccacctactactgctggcaaggcacccactttccattcaccttcggccagggcaccaaggtggaaatcaaaagactcgaggacctgaagaacgtgttcccacctgaggtggccgtgttcgagcctagcgaggccgagatcagccacacccagaaagccaccctcgtgtgcctggctaccggcttctaccccgaccatgtggaactgtcttggtgggtcaacggcaaagaggtgcacagcggcgtgtctaccgacccccagccactgaaagaacagcccgccctgaacgacagccggtactgcctgagcagcagactgagagtgtccgccaccttctggcagaacccccggaaccacttcagatgccaggtgcagttctacggcctgagcgagaacgacgagtggacccaggacagagccaagcccgtgacccagatcgtgtctgccgaagcctggggcagagccgattgcggatcccagagcttcggcctgctggaccccaagctgtgctacctgctggatggcatcctgttcatctacggcgtgatcctgaccgccctgttcctgagagtgaagttcagcagaagcgccgacgcccctgcctaccagcagggacagaaccaactgtacaacgagctgaacctgggcagacgggaagagtacgacgtgctggacaagcggagaggcagggaccctgagatgggcggaaagccccagcggagaaagaacccccaggaaggactgtataacgaactccagaaagacaagatggccgaagcctacagcgagatcggcatgaagggcgagcggagaagaggcaagggccacgatggcctgtaccagggcctgagcaccgccaccaaggacacctatgacgccctgcacatgcaggccctgcctccaagaagggccaagcgatctggatctggagcaacaaacttctcactactcaaacaagcaggtgacgtggaggagaatcccgggcctactagtatggactggatttggcgcatccttttccttgtcggcgctgctaccggcgcgcattccttcgaacaggtgcaactgcagcagcctggcgctgaacttgtgcggccaggcgcctctgtgaagctgagctgtaaagccagcggctacaccttcaccagctactggatgaactgggtcaagcagcgcccaggccagggcctggaatggatcggaatgatcgaccccagcgacagcgagacacactacaaccacatcttcaaggacaaggccaccctgaccgtggacaagtccagcagcacagcctacctgcaactgtccagcctgaccagcgaggacagcgccgtgtactactgcgcccggaacctgtatctgtggggccagggaacaagcgtgaccgtgtctagcacgcgtatccagaaccctgatcctgccgtgtaccagctgcgggatagcaagagcagcgacaagagcgtgtgtctgttcaccgacttcgacagccagaccaacgtgtcccagagcaaggactccgacgtgtacatcaccgataagaccgtgctggacatgcggagcatggacttcaagagcaactccgccgtggcctggtccaacaagtccgatttcgcctgcgccaacgccttcaacaacagcattatccccgaggacacattcttcccaagccccgagagcagctgcggtaccatcactcaaggtttggcagtgtcaaccatctcatcattctttccacctggctaccaagtgtccttctgcctggtcatggtgctgctgttcgccgtggataccggcctgtacttcagcgtcaagaccaacatccggtccagcaccagagactggaaggaccacaagttcaagtggcggaaggaccctcaggacaagagggccaagcgatctggatctggagcaacaaacttctcactactcaaacaagcaggtgacgtggaggagaatcccgggccttctagaatgtaccggatgcagctgctgagctgtatcgccctgtctctggccctggtcacaaatagcaactgggttaacgtgatctccgacctgaagaagatcgaggacctgatccagtccatgcacatcgacgccacactgtacaccgagagcgacgtgcaccctagctgtaaagtgaccgccatgaagtgctttctgctggaactgcaagtgatctccctggaaagcggcgacgccagcatccacgacaccgtgaagaacctgattatcctggctaacaacagcctgagcagcaacggcaacgtgaccgagtccggctgtaaagagtgcgaggaactggaagagaagaatatcaaagagttcctccagagcttcgtgcacatcgtgcagatgttcatcaacaccagcaagatcgaagtgatgtaccctcctccttacctggacaacgagaagtccaacggcaccatcatccacgtgaagggcaagcacctgtgtccttctccactgttccccggacctagcaagcctttctgggtgctcgttgttgttggcggcgtgctggcctgttacagcctgctggttaccgtggccttcatcatcttttgggtccgaagcaagcggagctaa

SEQ ID NO: 40472 - DNA, 2220 bp, synthetic construct
  source 1..2220: mol_type = other DNA
atggccttaccagtgaccgccttgctcctgccgctggccttgctgctccacgccgccaggccggacatccagttgacccagtcccccagctcactcagcgccagtgtgggggaccgggtgaccattacctgtaaagccagtcagagtgtggactatgagggggatagcttcctgaattggtatcagcagaagcctggcaaagccccaaagctgctgatctacgctgcatctaatctggagtcaggcgtgccttctaggttctccggtagtgggtctgggaccgatttcacattgaccatttcatccctccaacccgaggatttcgctacatattactgtcagcagtccaatgaggaccctctcacctttggccagggcaccaaagttgaaattaagagactcgaggacctgaagaacgtgttcccacctgaggtggccgtgttcgagcctagcgaggccgagatcagccacacccagaaagccaccctcgtgtgcctggctaccggcttctaccccgaccatgtggaactgtcttggtgggtcaacggcaaagaggtgcacagcggcgtgtctaccgacccccagccactgaaagaacagcccgccctgaacgacagccggtactgcctgagcagcagactgagagtgtccgccaccttctggcagaacccccggaaccacttcagatgccaggtgcagttctacggcctgagcgagaacgacgagtggacccaggacagagccaagcccgtgacccagatcgtgtctgccgaagcctggggcagagccgattgcggatcccagagcttcggcctgctggaccccaagctgtgctacctgctggatggcatcctgttcatctacggcgtgatcctgaccgccctgttcctgagagtgaagttcagcagaagcgccgacgcccctgcctaccagcagggacagaaccaactgtacaacgagctgaacctgggcagacgggaagagtacgacgtgctggacaagcggagaggcagggaccctgagatgggcggaaagccccggagaaagaacccccaggaaggactgtataacgaactccagaaagacaagatggccgaagcctacagcgagatcggcatgaagggcgagcggagaagaggcaagggccacgatggcctgtaccagggcctgagcaccgccaccaaggacacctatgacgccctgcacatgcaggccctgcctccaagaagggccaagcgatctggatctggagcaacaaacttctcactactcaaacaagcaggtgacgtggaggagaatcccgggcctactagtatggactggatttggcgcatccttttccttgtcggcgctgctaccggcgcgcattccttcgaagaagtccaacttgtggagtctggagggggcctggtgcagcccggcggctctctcagactgtcttgtgcggcaagcggctacaccttcagctcttactggatagaatgggtgaggcaggcacctggaaagggactggagtggattggagagattctgccaggagggggagatacaaattacaatgaaatcttcaaggggcgggccaccttttcagcggataccagcaagaatacagcttacctgcagatgaatagcctccgggcagaagataccgctgtttattattgcacgagacgggtgccaataagactggactattgggggcaagggactcttgtcaccgtcagttcaacgcgtatccagaaccctgatcctgccgtgtaccagctgcgggatagcaagagcagcgacaagagcgtgtgtctgttcaccgacttcgacagccagaccaacgtgtcccagagcaaggactccgacgtgtacatcaccgataagaccgtgctggacatgcggagcatggacttcaagagcaactccgccgtggcctggtccaacaagtccgatttcgcctgcgccaacgccttcaacaacagcattatccccgaggacacattcttcccaagccccgagagcagctgcggtaccatcactcaaggtttggcagtgtcaaccatctcatcattctttccacctggctaccaagtgtccttctgcctggtcatggtgctgctgttcgccgtggataccggcctgtacttcagcgtcaagaccaacatccggtccagcaccagagactggaaggaccacaagttcaagtggcggaaggaccctcaggacaagtaa

SEQ ID NO: 40473 - DNA, 1872 bp, synthetic construct
  source 1..1872: mol_type = other DNA
atggccttaccagtgaccgccttgctcctgccgctggccttgctgctccacgccgccaggccggacatccagttgacccagtcccccagctcactcagcgccagtgtgggggaccgggtgaccattacctgtaaagccagtcagagtgtggactatgagggggatagcttcctgaattggtatcagcagaagcctggcaaagccccaaagctgctgatctacgctgcatctaatctggagtcaggcgtgccttctaggttctccggtagtgggtctgggaccgatttcacattgaccatttcatccctccaacccgaggatttcgctacatattactgtcagcagtccaatgaggaccctctcacctttggccagggcaccaaagttgaaattaagagactcgaggacctgaagaacgtgttcccacctgaggtggccgtgttcgagcctagcgaggccgagatcagccacacccagaaagccaccctcgtgtgcctggctaccggcttctaccccgaccatgtggaactgtcttggtgggtcaacggcaaagaggtgcacagcggcgtgtgtaccgacccccagccactgaaagaacagcccgccctgaacgacagccggtactgcctgagcagcagactgagagtgtccgccaccttctggcagaacccccggaaccacttcagatgccaggtgcagttctacggcctgagcgagaacgacgagtggacccaggacagagccaagcccgtgacccagatcgtgtctgccgaagcctggggcagagccgattgcggctttaccagcgagagctaccagcagggcgtgctgagcgcctactacatgtacttgttgctgctgctgaagtccgtggtgtacttcgccatcatcacatgctgcctgctgcggagaaccgccttctgctgcaacggcgagaagtctagggccaagcgatctggatctggagcaacaaacttctcactactcaaacaagcaggtgacgtggaggagaatcccgggcctactagtatggactggatttggcgcatccttttccttgtcggcgctgctaccggcgcgcattccttcgaagaagtccaacttgtggagtctggagggggcctggtgcagcccggcggctctctcagactgtcttgtgcggcaagcggctacaccttcagctcttactggatagaatgggtgaggcaggcacctggaaagggactggagtggattggagagattctgccaggagggggagatacaaattacaatgaaatcttcaaggggcgggccaccttttcagcggataccagcaagaatacagcttacctgcagatgaatagcctccgggcagaagataccgctgtttattattgcacgagacgggtgccaataagactggactattgggggcaagggactcttgtcaccgtcagttcaacgcgtatccagaaccctgatcctgccgtgtaccagctgcgggatagcaagagcagcgacaagagcgtgtgtctgttcaccgacttcgacagccagaccaacgtgtcccagagcaaggactccgacgtgtacatcaccgataagtgcgtgctggacatgcggagcatggacttcaagagcaactccgccgtggcctggtccaacaagtccgatttcgcctgcgccaacgccttcaacaacagcattatccccgaggacacattcttcccaagccccgagagcagctgcgacgtgaagctggtggaaaagagcttcgagacagacaccaacctgaacttccagaacctgagcgtgatcggcttcagaatcctgctgctgaaagtggccggctttaacctgctgatgaccctgcggctgtggtccagctaa

SEQ ID NO: 40474 - DNA, 1857 bp, synthetic construct
  source 1..1857: mol_type = other DNA
atggccttaccagtgaccgccttgctcctgccgctggccttgctgctccacgccgccaggccggacatccagatgacacagagccctagcagcctgtctgccagcgtgggagacagagtgaccatcacatgcaagagcagccagagcctgctggactccgatggcaagacctacctgaactggtatcagcagaagcccggcaaggcccctaagctgctgatctacctggtgtccaagctggatagcggcgtgcccagcagattttctggcagcggcagcggaaccgacttcaccctgacaatatccagcctccagcctgaggacttcgccacctactactgctggcaaggcacccactttccattcaccttcggccagggcaccaaggtggaaatcaaaagactcgaggacctgaagaacgtgttcccacctgaggtggccgtgttcgagcctagcgaggccgagatcagccacacccagaaagccaccctcgtgtgcctggctaccggcttctaccccgaccatgtggaactgtcttggtgggtcaacggcaaagaggtgcacagcggcgtgtgtaccgacccccagccactgaaagaacagcccgccctgaacgacagccggtactgcctgagcagcagactgagagtgtccgccaccttctggcagaacccccggaaccacttcagatgccaggtgcagttctacggcctgagcgagaacgacgagtggacccaggacagagccaagcccgtgacccagatcgtgtctgccgaagcctggggcagagccgattgcggctttaccagcgagagctaccagcagggcgtgctgagcgccaccatcctgtacgagatcctgctgggcaaggccaccctgtacgccgtgctggtgtctgccctggtgctgatggctatggtcaagcggaaggacagccggggaagggccaagcgatctggatctggagcaacaaacttctcactactcaaacaagcaggtgacgtggaggagaatcccgggcctactagtatggactggatttggcgcatccttttccttgtcggcgctgctaccggcgcgcattccttcgaagtgcagctggttgaatcaggcggaggactggttcagcctggcggatctctgagactgtcttgtgccgccagcggctacaccttcagcagctactggatgaactgggtccgacaggcccctggcaaaggactggaatgggtcggaatgatcgaccccagcgacagcgagacacactacaaccacatcttcaaggaccgcttcaccatcagcgccgacaccagcaagaataccgcctacctccagatgaactccctgagagccgaggacaccgccgtgtactactgcgccagaaacctgtatctgtggggccagggaaccctggtcacagtgtcatctacgcgtatccagaaccctgatcctgccgtgtaccagctgcgggatagcaagagcagcgacaagagcgtgtgtctgttcaccgacttcgacagccagaccaacgtgtcccagagcaaggactccgacgtgtacatcaccgataagtgcgtgctggacatgcggagcatggacttcaagagcaactccgccgtggcctggtccaacaagtccgatttcgcctgcgccaacgccttcaacaacagcattatccccgaggacacattcttcccaagccccgagagcagctgcgacgtgaagctggtggaaaagagcttcgagacagacaccaacctgaacttccagaacctgagcgtgatcggcttcagaatcctgctgctgaaagtggccggctttaacctgctgatgaccctgcggctgtggtccagctaa

SEQ ID NO: 40475 - DNA, 1860 bp, synthetic construct
  source 1..1860: mol_type = other DNA
atggccttaccagtgaccgccttgctcctgccgctggccttgctgctccacgccgccaggccggacatccagatgacacagagccctagcagcctgtctgccagcgtgggagacagagtgaccatcacatgcaagagcagccagagcctgctggactccgatggcaagacctacctgaactggtatcagcagaagcccggcaaggcccctaagctgctgatctacctggtgtccaagctggatagcggcgtgcccagcagattttctggcagcggcagcggaaccgacttcaccctgacaatatccagcctccagcctgaggacttcgccacctactactgcttccaaggcacccactttccattcaccttcggccagggcaccaaggtggaaatcaaaagactcgaggacctgaagaacgtgttcccacctgaggtggccgtgttcgagcctagcgaggccgagatcagccacacccagaaagccaccctcgtgtgcctggctaccggcttctaccccgaccatgtggaactgtcttggtgggtcaacggcaaagaggtgcacagcggcgtgtgtaccgacccccagccactgaaagaacagcccgccctgaacgacagccggtactgcctgagcagcagactgagagtgtccgccaccttctggcagaacccccggaaccacttcagatgccaggtgcagttctacggcctgagcgagaacgacgagtggacccaggacagagccaagcccgtgacccagatcgtgtctgccgaagcctggggcagagccgattgcggctttaccagcgagagctaccagcagggcgtgctgagcgcctactacatgtacttgttgctgctgctgaagtccgtggtgtacttcgccatcatcacatgctgcctgctgcggagaaccgccttctgctgcaacggcgagaagtctagggccaagcgatctggatctggagcaacaaacttctcactactcaaacaagcaggtgacgtggaggagaatcccgggcctactagtatggactggatttggcgcatccttttccttgtcggcgctgctaccggcgcgcattccttcgaagtgcagctggttgaatcaggcggaggactggttcagcctggcggatctctgagactgtcttgtgccgccagcggctacaccttcagcagctactggatgaactgggtccgacaggcccctggcaaaggactggaatgggtcggaatgatcgaccccagcgacagcgagacacactacaaccacatcttcaaggaccgcttcaccatcagcgccgacaccagcaagaataccgcctacctccagatgaactccctgagagccgaggacaccgccgtgtactactgcgccagaaacctgtatctgtggggccagggaaccctggtcacagtgtcatctacgcgtatccagaaccctgatcctgccgtgtaccagctgcgggatagcaagagcagcgacaagagcgtgtgtctgttcaccgacttcgacagccagaccaacgtgtcccagagcaaggactccgacgtgtacatcaccgataagtgcgtgctggacatgcggagcatggacttcaagagcaactccgccgtggcctggtccaacaagtccgatttcgcctgcgccaacgccttcaacaacagcattatccccgaggacacattcttcccaagccccgagagcagctgcgacgtgaagctggtggaaaagagcttcgagacagacaccaacctgaacttccagaacctgagcgtgatcggcttcagaatcctgctgctgaaagtggccggctttaacctgctgatgaccctgcggctgtggtccagctaa

SEQ ID NO: 40476 - DNA, 2208 bp, synthetic construct
  source 1..2208: mol_type = other DNA
atggccttaccagtgaccgccttgctcctgccgctggccttgctgctccacgccgccaggccggacatccagatgacacagagccctagcagcctgtctgccagcgtgggagacagagtgaccatcacatgcaagagcagccagagcctgctggactccgatggcaagacctacctgaactggtatcagcagaagcccggcaaggcccctaagctgctgatctacctggtgtccaagctggatagcggcgtgcccagcagattttctggcagcggcagcggaaccgacttcaccctgacaatatccagcctccagcctgaggacttcgccacctactactgcttccaaggcacccactttccatacaccttcggccagggcaccaaggtggaaatcaaaagactcgaggacctgaagaacgtgttcccacctgaggtggccgtgttcgagcctagcgaggccgagatcagccacacccagaaagccaccctcgtgtgcctggctaccggcttctaccccgaccatgtggaactgtcttggtgggtcaacggcaaagaggtgcacagcggcgtgtctaccgacccccagccactgaaagaacagcccgccctgaacgacagccggtactgcctgagcagcagactgagagtgtccgccaccttctggcagaacccccggaaccacttcagatgccaggtgcagttctacggcctgagcgagaacgacgagtggacccaggacagagccaagcccgtgacccagatcgtgtctgccgaagcctggggcagagccgattgcggatcccagagcttcggcctgctggaccccaagctgtgctacctgctggatggcatcctgttcatctacggcgtgatcctgaccgccctgttcctgagagtgaagttcagcagaagcgccgacgcccctgcctaccagcagggacagaaccaactgtacaacgagctgaacctgggcagacgggaagagtacgacgtgctggacaagcggagaggcagggaccctgagatgggcggaaagccccggagaaagaacccccaggaaggactgtataacgaactccagaaagacaagatggccgaagcctacagcgagatcggcatgaagggcgagcggagaagaggcaagggccacgatggcctgtaccagggcctgagcaccgccaccaaggacacctatgacgccctgcacatgcaggccctgcctccaagaagggccaagcgatctggatctggagcaacaaacttctcactactcaaacaagcaggtgacgtggaggagaatcccgggcctactagtatggactggatttggcgcatccttttccttgtcggcgctgctaccggcgcgcattccttcgaagtgcagctggttgaatcaggcggaggactggttcagcctggcggatctctgagactgtcttgtgccgccagcggctacaccttcaccagctactggatgaactgggtccgacaggcccctggcaaaggactggaatgggtcggaatgatcgaccccagcgacagcgagacacactacaaccacatcttcaaggaccgcttcaccatcagcgccgacaccagcaagaataccgcctacctccagatgaactccctgagagccgaggacaccgccgtgtactactgcgccagaaacctgtatctgttcggccagggaaccctggtcacagtgtcatctacgcgtatccagaaccctgatcctgccgtgtaccagctgcgggatagcaagagcagcgacaagagcgtgtgtctgttcaccgacttcgacagccagaccaacgtgtcccagagcaaggactccgacgtgtacatcaccgataagaccgtgctggacatgcggagcatggacttcaagagcaactccgccgtggcctggtccaacaagtccgatttcgcctgcgccaacgccttcaacaacagcattatccccgaggacacattcttcccaagccccgagagcagctgcggtaccatcactcaaggtttggcagtgtcaaccatctcatcattctttccacctggctaccaagtgtccttctgcctggtcatggtgctgctgttcgccgtggataccggcctgtacttcagcgtcaagaccaacatccggtccagcaccagagactggaaggaccacaagttcaagtggcggaaggacccccaggacaagtaa

SEQ ID NO: 40477 - DNA, 2208 bp, synthetic construct
  source 1..2208: mol_type = other DNA
atggccttaccagtgaccgccttgctcctgccgctggccttgctgctccacgccgccaggccggacatccagatgacacagagccctagcagcctgtctgccagcgtgggagacagagtgaccatcacatgcaagagcagccagagcctgctggactccgatggcaagacctacctgaactggtatcagcagaagcccggcaaggcccctaagctgctgatctacctggtgtccaagctggatagcggcgtgcccagcagattttctggcagcggcagcggaaccgacttcaccctgacaatatccagcctccagcctgaggacttcgccacctactactgctggcaaggcacccactttccattcaccttcggccagggcaccaaggtggaaatcaaaagactcgaggacctgaagaacgtgttcccacctgaggtggccgtgttcgagcctagcgaggccgagatcagccacacccagaaagccaccctcgtgtgcctggctaccggcttctaccccgaccatgtggaactgtcttggtgggtcaacggcaaagaggtgcacagcggcgtgtctaccgacccccagccactgaaagaacagcccgccctgaacgacagccggtactgcctgagcagcagactgagagtgtccgccaccttctggcagaacccccggaaccacttcagatgccaggtgcagttctacggcctgagcgagaacgacgagtggacccaggacagagccaagcccgtgacccagatcgtgtctgccgaagcctggggcagagccgattgcggatcccagagcttcggcctgctggaccccaagctgtgctacctgctggatggcatcctgttcatctacggcgtgatcctgaccgccctgttcctgagagtgaagttcagcagaagcgccgacgcccctgcctaccagcagggacagaaccaactgtacaacgagctgaacctgggcagacgggaagagtacgacgtgctggacaagcggagaggcagggaccctgagatgggcggaaagccccggagaaagaacccccaggaaggactgtataacgaactccagaaagacaagatggccgaagcctacagcgagatcggcatgaagggcgagcggagaagaggcaagggccacgatggcctgtaccagggcctgagcaccgccaccaaggacacctatgacgccctgcacatgcaggccctgcctccaagaagggccaagcgatctggatctggagcaacaaacttctcactactcaaacaagcaggtgacgtggaggagaatcccgggcctactagtatggactggatttggcgcatccttttccttgtcggcgctgctaccggcgcgcattccttcgaagtgcagctggttgaatcaggcggaggactggttcagcctggcggatctctgagactgtcttgtgccgccagcggctacaccttcaccagctactggatgaactgggtccgacaggcccctggcaaaggactggaatgggtcggaatgatcgaccccagcgacagcgagacacactacaaccacatcttcaaggaccgcttcaccatcagcgccgacaccagcaagaataccgcctacctccagatgaactccctgagagccgaggacaccgccgtgtactactgcgccagaaacctgtatctgttcggccagggaaccctggtcacagtgtcatctacgcgtatccagaaccctgatcctgccgtgtaccagctgcgggatagcaagagcagcgacaagagcgtgtgtctgttcaccgacttcgacagccagaccaacgtgtcccagagcaaggactccgacgtgtacatcaccgataagaccgtgctggacatgcggagcatggacttcaagagcaactccgccgtggcctggtccaacaagtccgatttcgcctgcgccaacgccttcaacaacagcattatccccgaggacacattcttcccaagccccgagagcagctgcggtaccatcactcaaggtttggcagtgtcaaccatctcatcattctttccacctggctaccaagtgtccttctgcctggtcatggtgctgctgttcgccgtggataccggcctgtacttcagcgtcaagaccaacatccggtccagcaccagagactggaaggaccacaagttcaagtggcggaaggacccccaggacaagtaa

SEQ ID NO: 40478 - DNA, 1857 bp, synthetic construct
  source 1..1857: mol_type = other DNA
atggccttaccagtgaccgccttgctcctgccgctggccttgctgctccacgccgccaggccggacatccagatgacacagagccctagcagcctgtctgccagcgtgggagacagagtgaccatcacatgcaagagcagccagagcctgctggactccgatggcaagacctacctgaactggtatcagcagaagcccggcaaggcccctaagctgctgatctacctggtgtccaagctggatagcggcgtgcccagcagattttctggcagcggcagcggaaccgacttcaccctgacaatatccagcctccagcctgaggacttcgccacctactactgctggcaaggcacccactttccattcaccttcggccagggcaccaaggtggaaatcaaaagactcgaggacctgaagaacgtgttcccacctgaggtggccgtgttcgagcctagcgaggccgagatcagccacacccagaaagccaccctcgtgtgcctggctaccggcttctaccccgaccatgtggaactgtcttggtgggtcaacggcaaagaggtgcacagcggcgtgtgtaccgacccccagccactgaaagaacagcccgccctgaacgacagccggtactgcctgagcagcagactgagagtgtccgccaccttctggcagaacccccggaaccacttcagatgccaggtgcagttctacggcctgagcgagaacgacgagtggacccaggacagagccaagcccgtgacccagatcgtgtctgccgaagcctggggcagagccgattgcggctttaccagcgagagctaccagcagggcgtgctgagcgccaccatcctgtacgagatcctgctgggcaaggccaccctgtacgccgtgctggtgtctgccctggtgctgatggctatggtcaagcggaaggacagccggggaagggccaagcgatctggatctggagcaacaaacttctcactactcaaacaagcaggtgacgtggaggagaatcccgggcctactagtatggactggatttggcgcatccttttccttgtcggcgctgctaccggcgcgcattccttcgaagtgcagctggttgaatcaggcggaggactggttcagcctggcggatctctgagactgtcttgtgccgccagcggctacaccttcaccaactactggatgaactgggtccgacaggcccctggcaaaggactggaatgggtcggaatgatcgaccccagcgacagcgagacacactacaaccacatcttcaaggaccgcttcaccatcagcgccgacaccagcaagaataccgcctacctccagatgaactccctgagagccgaggacaccgccgtgtactactgcgccagaaacctgtatctgtggggccagggaaccctggtcacagtgtcatctacgcgtatccagaaccctgatcctgccgtgtaccagctgcgggatagcaagagcagcgacaagagcgtgtgtctgttcaccgacttcgacagccagaccaacgtgtcccagagcaaggactccgacgtgtacatcaccgataagtgcgtgctggacatgcggagcatggacttcaagagcaactccgccgtggcctggtccaacaagtccgatttcgcctgcgccaacgccttcaacaacagcattatccccgaggacacattcttcccaagccccgagagcagctgcgacgtgaagctggtggaaaagagcttcgagacagacaccaacctgaacttccagaacctgagcgtgatcggcttcagaatcctgctgctgaaagtggccggctttaacctgctgatgaccctgcggctgtggtccagctaa

SEQ ID NO: 40479 - DNA, 1860 bp, synthetic construct
  source 1..1860: mol_type = other DNA
atggccttaccagtgaccgccttgctcctgccgctggccttgctgctccacgccgccaggccggacatccagatgacacagagccctagcagcctgtctgccagcgtgggagacagagtgaccatcacatgcaagagcagccagagcctgctggactccgatggcaagacctacctgaactggtatcagcagaagcccggcaaggcccctaagctgctgatctacctggtgtccaagctggatagcggcgtgcccagcagattttctggcagcggcagcggaaccgacttcaccctgacaatatccagcctccagcctgaggacttcgccacctactactgctggcaaggcacccactttccattcaccttcggccagggcaccaaggtggaaatcaaaagactcgaggacctgaagaacgtgttcccacctgaggtggccgtgttcgagcctagcgaggccgagatcagccacacccagaaagccaccctcgtgtgcctggctaccggcttctaccccgaccatgtggaactgtcttggtgggtcaacggcaaagaggtgcacagcggcgtgtgtaccgacccccagccactgaaagaacagcccgccctgaacgacagccggtactgcctgagcagcagactgagagtgtccgccaccttctggcagaacccccggaaccacttcagatgccaggtgcagttctacggcctgagcgagaacgacgagtggacccaggacagagccaagcccgtgacccagatcgtgtctgccgaagcctggggcagagccgattgcggctttaccagcgagagctaccagcagggcgtgctgagcgcctactacatgtacttgttgctgctgctgaagtccgtggtgtacttcgccatcatcacatgctgcctgctgcggagaaccgccttctgctgcaacggcgagaagtctagggccaagcgatctggatctggagcaacaaacttctcactactcaaacaagcaggtgacgtggaggagaatcccgggcctactagtatggactggatttggcgcatccttttccttgtcggcgctgctaccggcgcgcattccttcgaagtgcagctggttgaatcaggcggaggactggttcagcctggcggatctctgagactgtcttgtgccgccagcggctacaccttcaccaactactggatgaactgggtccgacaggcccctggcaaaggactggaatgggtcggaatgatcgaccccagcgacagcgagacacactacaaccacatcttcaaggaccgcttcaccatcagcgccgacaccagcaagaataccgcctacctccagatgaactccctgagagccgaggacaccgccgtgtactactgcgccagaaacctgtatctgtggggccagggaaccctggtcacagtgtcatctacgcgtatccagaaccctgatcctgccgtgtaccagctgcgggatagcaagagcagcgacaagagcgtgtgtctgttcaccgacttcgacagccagaccaacgtgtcccagagcaaggactccgacgtgtacatcaccgataagtgcgtgctggacatgcggagcatggacttcaagagcaactccgccgtggcctggtccaacaagtccgatttcgcctgcgccaacgccttcaacaacagcattatccccgaggacacattcttcccaagccccgagagcagctgcgacgtgaagctggtggaaaagagcttcgagacagacaccaacctgaacttccagaacctgagcgtgatcggcttcagaatcctgctgctgaaagtggccggctttaacctgctgatgaccctgcggctgtggtccagctaa

SEQ ID NO: 40480 - DNA, 22 bp, synthetic construct
  source 1..22: mol_type = other DNA
gggggggggggggggggggggg

SEQ ID NO: 40481 - DNA, 4419 bp, synthetic construct
  source 1..4419: mol_type = other DNA
atggccttaccagtgaccgccttgctcctgccgctggccttgctgctccacgccgccaggccggacgagatcgtgctgacacagagccccgccaccctgtcactgtctccaggcgaaagagccaccctgagctgtagcgccagcagcagcgtgtcctacatgcactggtatcagcagaagcccggccaggcccccagactgctgatctacgataccagcaagctggcctccggcatccccgccagattttctggcagcggctccggcaccgacttcaccctgacaatcagcagcctggaacccgaggacgtggccgtgtactactgttttcaaggcagcgtgtaccccttcaccttcggccagggcaccaagctggaaatcaagagaggtggcggtggctcgggcggtggtgggtcgggtggcggcggatctcaggtgcagctccaggaatctggccctggcctcgtgaagcctagccagaccctgagcctgacctgtaccgtgtctggcggcagcatcagcacaagcggcatgggcgtgggctggatcagacagcaccctggcaagggcctggaatggatcggccacatttggtgggacgacgacaagcggtacaaccccgccctgaagtccagagtgaccatcagcgtggacaccagcaagaaccagttcagcctgaagctgagcagcgtgacagccgccgataccgccgtgtattattgcgcccggatggaactgtggtcctactacttcgactactggggccagggaaccctcgtgaccgtgtctagtctcgaggacctgaagaacgtgttcccacctgaggtggccgtgttcgagcctagcgaggccgagatcagccacacccagaaagccaccctcgtgtgcctggctaccggcttctaccccgaccatgtggaactgtcttggtgggtcaacggcaaagaggtgcacagcggcgtgtctaccgacccccagccactgaaagaacagcccgccctgaacgacagccggtactgcctgagcagcagactgagagtgtccgccaccttctggcagaacccccggaaccacttcagatgccaggtgcagttctacggcctgagcgagaacgacgagtggacccaggacagagccaagcccgtgacccagatcgtgtctgccgaagcctggggcagagccgattgcggatcccagagcttcggcctgctggaccccaagctgtgctacctgctggatggcatcctgttcatctacggcgtgatcctgaccgccctgttcctgggcggtggaggctctatccggaacggctctgaagttcgcgatcctctggtcacctacgagggcagcaatcctcctgccagtcctctgcaggataacctcgtgatcgccctgcacagctacgagccttctcatgatggcgacctgggctttgagaagggcgagcagctgagaatcctggaacagtctggcgagtggtggaaggcccagtctctgacaacaggccaagagggcttcatccccttcaacttcgtggccaaggccaacagcctggaacctgagccttggtttttcaagaacctgtccagaaaggacgccgagagacagctgctggcccctggaaatacccacggcagctttctgattagagagagcgagagcacagccggcagcttcagcctgagtgtgcgggactttgaccagaatcaaggcgaggtcgtgaagcactacaagatccggaacctggataacggcggcttctacatcagccccagaatcacctttcctggcctgcacgaactcgtgcggcactacacaaatgcctccgatggcctgtgcaccagactgagcagaccctgtcagacccagaagcctcagaaaccttggtgggaagatgagtgggaagtgcccagagaaaccctgaagctggtggaaagactcggagccggccagtttggagaagtgtggatgggctactacaatggccacaccaaggtggccgtgaagtctctgaagcagggctctatgagcccagatgcttttctggccgaggccaatctgatgaagcagctgcagcaccagagacttgtgcggctgtatgccgtggtcacccaagagcctatctacatcatcaccgagtacatggaaaacggcagcctggtggacttcctgaaaacccctagcggcatcaagctgaccattaacaagctgctggacatggccgctcagatcgccgaaggcatggcctttatcgaggaacggaactacatccacagggacctgagagccgccaatatcctggtgtctgacaccctgagctgcaagattgccgatttcggcctggccagactgatcgaggacaatgagtataccgccagagagggcgccaagtttcccatcaaatggacagcccctgaggccatcaactacggcaccttcaccatcaagagcgacgtgtggtccttcggcatcctgctgacagagatcgtgacacacggcagaatcccatatcctggcatgacaaaccccgaagtgatccagaatctggaacggggctacagaatggtccgacctgacaactgccccgaggaactgtaccagctgatgagactgtgctggaaagagaggcccgaggacagacccaccttcgactacctgagaagcgtgctggaagatttcttcaccgccaccgagggccagtaccagcctcagccagggaattccagggccaagcgatctggatctggagcaacaaacttctcactactcaaacaagcaggtgacgtggaggagaatcccgggcctactagtatggactggatttggcgcatccttttccttgtcggcgctgctaccggcgcgcattccttcgaacaagttcagcttcaacagcctggcgctgagctggtcaaacctggcgcttctgtgaagatgagctgcaaagccagcggctacgccttcagcagctactggatcaactggatgaagcagaaacccggccagggactcgaatggatcggccaaatctatcccggcgacggcgacaccaactacaacggcaagttcaagggcagagccacactgaccgccgatacctctagcagcacagcctacatgcagctgagcagcctgaccagcgaagatagcgccgtgtacttctgtgcccggtccatcacaacagtcgtgggctgcgctatggactattggggccagggaacaagcgtgaccgtgtctagtacgcgtatccagaaccctgatcctgccgtgtaccagctgcgggatagcaagagcagcgacaagagcgtgtgtctgttcaccgacttcgacagccagaccaacgtgtcccagagcaaggactccgacgtgtacatcaccgataagaccgtgctggacatgcggagcatggacttcaagagcaactccgccgtggcctggtccaacaagtccgatttcgcctgcgccaacgccttcaacaacagcattatccccgaggacacattcttcccaagccccgagagcagctgcggtaccatcactcaaggtttggcagtgtcaaccatctcatcattctttccacctggctaccaagtgtccttctgcctggtcatggtgctgctgttcgccgtggataccggcctgtacttcagcgtcaagaccaacatccggtccagcaccagagactggaaggaccacaagttcaagtggcggaaggaccctcaggacaagagggccaagcgatctggatctggagcaacaaacttctcactactcaaacaagcaggtgacgtggaggagaatcccgggccttctagaggccatatgaccgagtacaagcccacggtgcgcctcgccacccgcgacgacgtccccagggccgtacgcaccctcgccgccgcgttcgccgactaccccgccacgcgccacaccgtcgatccggaccgccacatcgagcgggtcaccgagctgcaagaactcttcctcacgcgcgtcgggctcgacatcggcaaggtgtgggtcgcggacgacggcgccgcggtggcggtctggaccacgccggagagcgtcgaagcgggggcggtgttcgccgagatcggcccgcgcatggccgagttgagcggttcccggctggccgcgcagcaacagatggaaggcctcctggcgccgcaccggcccaaggagcccgcgtggttcctggccaccgtcggcgtctcgcccgaccaccagggcaagggtctgggcagcgccgtcgtgctccccggagtggaggcggccgagcgcgccggggtgcccgccttcctggagacctccgcgccccgcaacctccccttctacgagcggctcggcttcaccgtcaccgccgacgtcgaggtgcccgaaggaccgcgcacctggtgcatgacccgcaagcccggtgcctga

SEQ ID NO: 40482 - DNA, 3408 bp, synthetic construct
  source 1..3408: mol_type = other DNA
atggccttaccagtgaccgccttgctcctgccgctggccttgctgctccacgccgccaggccggacgagatcgtgctgacacagagccccgccaccctgtcactgtctccaggcgaaagagccaccctgagctgtagcgccagcagcagcgtgtcctacatgcactggtatcagcagaagcccggccaggcccccagactgctgatctacgataccagcaagctggcctccggcatccccgccagattttctggcagcggctccggcaccgacttcaccctgacaatcagcagcctggaacccgaggacgtggccgtgtactactgttttcaaggcagcgtgtaccccttcaccttcggccagggcaccaagctggaaatcaagagaggtggcggtggctcgggcggtggtgggtcgggtggcggcggatctcaggtgcagctccaggaatctggccctggcctcgtgaagcctagccagaccctgagcctgacctgtaccgtgtctggcggcagcatcagcacaagcggcatgggcgtgggctggatcagacagcaccctggcaagggcctggaatggatcggccacatttggtgggacgacgacaagcggtacaaccccgccctgaagtccagagtgaccatcagcgtggacaccagcaagaaccagttcagcctgaagctgagcagcgtgacagccgccgataccgccgtgtattattgcgcccggatggaactgtggtcctactacttcgactactggggccagggaaccctcgtgaccgtgtctagtctcgaggacctgaagaacgtgttcccacctgaggtggccgtgttcgagcctagcgaggccgagatcagccacacccagaaagccaccctcgtgtgcctggctaccggcttctaccccgaccatgtggaactgtcttggtgggtcaacggcaaagaggtgcacagcggcgtgtctaccgacccccagccactgaaagaacagcccgccctgaacgacagccggtactgcctgagcagcagactgagagtgtccgccaccttctggcagaacccccggaaccacttcagatgccaggtgcagttctacggcctgagcgagaacgacgagtggacccaggacagagccaagcccgtgacccagatcgtgtctgccgaagcctggggcagagccgattgcggatcccagagcttcggcctgctggaccccaagctgtgctacctgctggatggcatcctgttcatctacggcgtgatcctgaccgccctgttcctgggcggtggaggctctatccggaacggctctgaagttcgcgatcctctggtcacctacgagggcagcaatcctcctgccagtcctctgcaggataacctcgtgatcgccctgcacagctacgagccttctcatgatggcgacctgggctttgagaagggcgagcagctgagaatcctggaacagtctggcgagtggtggaaggcccagtctctgacaacaggccaagagggcttcatccccttcaacttcgtggccaaggccaacagcctggaacctgagccttggtttttcaagaacctgtccagaaaggacgccgagagacagctgctggcccctggaaatacccacggcagctttctgattagagagagcgagagcacagccggcagcttcagcctgagtgtgcgggactttgaccagaatcaaggcgaggtcgtgaagcactacaagatccggaacctggataacggcggcttctacatcagccccagaatcacctttcctggcctgcacgaactcgtgcggcactacacaaatgcctccgatggcctgtgcaccagactgagcagaccctgtcagacccagaagcctcagaaaccttggtgggaagatgagtgggaagtgcccagagaaaccctgaagctggtggaaagactcggagccggccagtttggagaagtgtggatgggctactacaatggccacaccaaggtggccgtgaagtctctgaagcagggctctatgagcccagatgcttttctggccgaggccaatctgatgaagcagctgcagcaccagagacttgtgcggctgtatgccgtggtcacccaagagcctatctacatcatcatcgagtacatggaaaacggcagcctggtggacttcctgaaaacccctagcggcatcaagctgaccattaacaagctgctggacatggccgctcagatcgccgaaggcatggcctttatcgaggaacggaactacatccacagggacctgagagccgccaatatcctggtgtctgacaccctgagctgcaagattgccgatttcggcctggccagactgatcgaggacaatgagtataccgccagagagggcgccaagtttcccatcaaatggacagcccctgaggccatcaactacggcaccttcaccatcaagagcgacgtgtggtccttcggcatcctgctgacagagatcgtgacacacggcagaatcccatatcctggcatgacaaaccccgaagtgatccagaatctggaacggggctacagaatggtccgacctgacaactgccccgaggaactgtaccagctgatgagactgtgctggaaagagaggcccgaggacagacccaccttcgactacctgagaagcgtgctggaagatttcttcaccgccaccgagggccagtaccagcctcagccaagggccaagcgatctggatctggagcaacaaacttctcactactcaaacaagcaggtgacgtggaggagaatcccgggcctactagagaccatatgaccgagtacaagcccacggtgcgcctcgccacccgcgacgacgtccccagggccgtacgcaccctcgccgccgcgttcgccgactaccccgccacgcgccacaccgtcgatccggaccgccacatcgagcgggtcaccgagctgcaagaactcttcctcacgcgcgtcgggctcgacatcggcaaggtgtgggtcgcggacgacggcgccgcggtggcggtctggaccacgccggagagcgtcgaagcgggggcggtgttcgccgagatcggcccgcgcatggccgagttgagcggttcccggctggccgcgcagcaacagatggaaggcctcctggcgccgcaccggcccaaggagcccgcgtggttcctggccaccgtcggcgtctcgcccgaccaccagggcaagggtctgggcagcgccgtcgtgctccccggagtggaggcggccgagcgcgccggggtgcccgccttcctggagacctccgcgccccgcaacctccccttctacgagcggctcggcttcaccgtcaccgccgacgtcgaggtgcccgaaggaccgcgcacctggtgcatgacccgcaagcccggtgcctga

SEQ ID NO: 40483 - DNA, 3417 bp, synthetic construct
  source 1..3417: mol_type = other DNA
atggccttaccagtgaccgccttgctcctgccgctggccttgctgctccacgccgccaggccggacgagatcgtgctgacacagagccccgccaccctgtcactgtctccaggcgaaagagccaccctgagctgtagcgccagcagcagcgtgtcctacatgcactggtatcagcagaagcccggccaggcccccagactgctgatctacgataccagcaagctggcctccggcatccccgccagattttctggcagcggctccggcaccgacttcaccctgacaatcagcagcctggaacccgaggacgtggccgtgtactactgttttcaaggcagcgtgtaccccttcaccttcggccagggcaccaagctggaaatcaagagaggtggcggtggctcgggcggtggtgggtcgggtggcggcggatctcaggtgcagctccaggaatctggccctggcctcgtgaagcctagccagaccctgagcctgacctgtaccgtgtctggcggcagcatcagcacaagcggcatgggcgtgggctggatcagacagcaccctggcaagggcctggaatggatcggccacatttggtgggacgacgacaagcggtacaaccccgccctgaagtccagagtgaccatcagcgtggacaccagcaagaaccagttcagcctgaagctgagcagcgtgacagccgccgataccgccgtgtattattgcgcccggatggaactgtggtcctactacttcgactactggggccagggaaccctcgtgaccgtgtctagtctcgaggacctgaagaacgtgttcccacctgaggtggccgtgttcgagcctagcgaggccgagatcagccacacccagaaagccaccctcgtgtgcctggctaccggcttctaccccgaccatgtggaactgtcttggtgggtcaacggcaaagaggtgcacagcggcgtgtctaccgacccccagccactgaaagaacagcccgccctgaacgacagccggtactgcctgagcagcagactgagagtgtccgccaccttctggcagaacccccggaaccacttcagatgccaggtgcagttctacggcctgagcgagaacgacgagtggacccaggacagagccaagcccgtgacccagatcgtgtctgccgaagcctggggcagagccgattgcggatcccagagcttcggcctgctggaccccaagctgtgctacctgctggatggcatcctgttcatctacggcgtgatcctgaccgccctgttcctgggcggtggaggctctatccggaacggctctgaagttcgcgatcctctggtcacctacgagggcagcaatcctcctgccagtcctctgcaggataacctcgtgatcgccctgcacagctacgagccttctcatgatggcgacctgggctttgagaagggcgagcagctgagaatcctggaacagtctggcgagtggtggaaggcccagtctctgacaacaggccaagagggcttcatccccttcaacttcgtggccaaggccaacagcctggaacctgagccttggtttttcaagaacctgtccagaaaggacgccgagagacagctgctggcccctggaaatacccacggcagctttctgattagagagagcgagagcacagccggcagcttcagcctgagtgtgcgggactttgaccagaatcaaggcgaggtcgtgaagcactacaagatccggaacctggataacggcggcttctacatcagccccagaatcacctttcctggcctgcacgaactcgtgcggcactacacaaatgcctccgatggcctgtgcaccagactgagcagaccctgtcagacccagaagcctcagaaaccttggtgggaagatgagtgggaagtgcccagagaaaccctgaagctggtggaaagactcggagccggccagtttggagaagtgtggatgggctactacaatggccacaccaaggtggccgtgaagtctctgaagcagggctctatgagcccagatgcttttctggccgaggccaatctgatgaagcagctgcagcaccagagacttgtgcggctgtatgccgtggtcacccaagagcctatctacatcatcaccgagtacatggaaaacggcagcctggtggacttcctgaaaacccctagcggcatcaagctgaccattaacaagctgctggacatggccgctcagatcgccgaaggcatggcctttatcgaggaacggaactacatccacagggacctgagagccgccaatatcctggtgtctgacaccctgagctgcaagattgccgatttcggcctggccagactgatcgaggacaatgagtataccgccagagagggcgccaagtttcccatcaaatggacagcccctgaggccatcaactacggcaccttcaccatcaagagcgacgtgtggtccttcggcatcctgctgacagagatcgtgacacacggcagaatcccatatcctggcatgacaaaccccgaagtgatccagaatctggaacggggctacagaatggtccgacctgacaactgccccgaggaactgtaccagctgatgagactgtgctggaaagagaggcccgaggacagacccaccttcgactacctgagaagcgtgctggaagatttcttcaccgccaccgagggccagtaccagcctcagccagggaattccagggccaagcgatctggatctggagcaacaaacttctcactactcaaacaagcaggtgacgtggaggagaatcccgggcctactagagaccatatgaccgagtacaagcccacggtgcgcctcgccacccgcgacgacgtccccagggccgtacgcaccctcgccgccgcgttcgccgactaccccgccacgcgccacaccgtcgatccggaccgccacatcgagcgggtcaccgagctgcaagaactcttcctcacgcgcgtcgggctcgacatcggcaaggtgtgggtcgcggacgacggcgccgcggtggcggtctggaccacgccggagagcgtcgaagcgggggcggtgttcgccgagatcggcccgcgcatggccgagttgagcggttcccggctggccgcgcagcaacagatggaaggcctcctggcgccgcaccggcccaaggagcccgcgtggttcctggccaccgtcggcgtctcgcccgaccaccagggcaagggtctgggcagcgccgtcgtgctccccggagtggaggcggccgagcgcgccggggtgcccgccttcctggagacctccgcgccccgcaacctccccttctacgagcggctcggcttcaccgtcaccgccgacgtcgaggtgcccgaaggaccgcgcacctggtgcatgacccgcaagcccggtgcctga

SEQ ID NO: 40484 - DNA, 2655 bp, synthetic construct
  source 1..2655: mol_type = other DNA
atggccttaccagtgaccgccttgctcctgccgctggccttgctgctccacgccgccaggccggacatccagatgacacagagccctagcagcctgtctgccagcgtgggagacagagtgaccatcacatgcaaggccagcgaccacatcaacaactggctggcctggtatcagcagaagcctggacaggcccctaagctgctgatctacggcgctaccacactggaaacaggcgtgcccagcagattttctggcagcggctctggtaccgactacaccctgacaatatccagcctccagcctgaggacttcgccacctactactgtcagcagagctggaacaccccttggacattcggccagggcaccaagctggaaatcaagagactcgagggacagcctaaggccaatcctaccgtgacactgttccctccaagcagcgaagaactccaggccaacaaggccacacttgtgtgcctgatctccgacttctaccctggggctgtgacagtggcttggaaggccgatggatctcctgtgaaagccggcgtggaaaccaccaagccatccaagcagagcaacaacaaatacgccgccagctcctacctgagcctgacacctgagcagtggaagtcccacagatcctacagctgccaagtgacccacgaaggcagcaccgtggaaaagacagtggcccctacagagtgcagcggatcccccatcaagaccgatgtgattacaatggaccccaaggacaactgctccaaggacgccaacgataccctgctgctccagctgaccaacaccagcgcctactacatgtacgagatcctgctgggcaaggccaccctgtacgccgtgctggtgtctgccctggtgctgatggctatggtcaagcggaaggacagccggggaagggccaagcgatctggatctggagcaacaaacttctcactactcaaacaagcaggtgacgtggaggagaatcccgggcctactagtatggactggatttggcgcatccttttccttgtcggcgctgctaccggcgcgcattccttcgaacaagttcagcttcaacagcctggcgctgagctggtcaaacctggcgcttctgtgaagatgagctgcaaagccagcggctacgccttcagcagctactggatcaactggatgaagcagaaacccggccagggactcgaatggatcggccaaatctatcccggcgacggcgacaccaactacaacggcaagttcaagggcagagccacactgaccgccgatacctctagcagcacagcctacatgcagctgagcagcctgaccagcgaagatagcgccgtgtacttctgtgcccggtccatcacaacagtcgtgggctgcgctatggactattggggccagggaacaagcgtgaccgtgtctagtacgcgtgcctctacaaagggaccctccgtgtttcctctggctcccagcagcaagtctacaagcggaggaacagccgctctgggctgcctggtcaaggattactttcccgagcctgtgaccgtgtcctggaatagcggagcactgacaagcggcgtgcacacctttccagccgtgctgcaaagcagcggcctgtactctctgagcagcgtggtcacagtgcctagctctagcctgggcacccagacctacatctgcaatgtgaaccacaagcctagcaacaccaaggtggacaagagagtggaacccaagagctgtggtaccgaagtgaaaaccgactccaccgaccacgtgaagcccaaagagacagagaacaccaagcagcccagcaagagctgccacaagcccaaggccatcgtgcacaccgagaaagtgaacatgatgagcctgaccgtgctgggcttcagaatcctgctgctgaaagtggccggctttaacctgctgatgaccctgcggctgtggtccagccgcgccaagagaagcggatctggcgtgaagcagaccctgaatttcgacctgctgaagctggctggcgacgtggaatccaacccaggcccttctagaggccatatgaccgagtacaagcccacggtgcgcctcgccacccgcgacgacgtccccagggccgtacgcaccctcgccgccgcgttcgccgactaccccgccacgcgccacaccgtcgatccggaccgccacatcgagcgggtcaccgagctgcaagaactcttcctcacgcgcgtcgggctcgacatcggcaaggtgtgggtcgcggacgacggcgccgcggtggcggtctggaccacgccggagagcgtcgaagcgggggcggtgttcgccgagatcggcccgcgcatggccgagttgagcggttcccggctggccgcgcagcaacagatggaaggcctcctggcgccgcaccggcccaaggagcccgcgtggttcctggccaccgtcggcgtctcgcccgaccaccagggcaagggtctgggcagcgccgtcgtgctccccggagtggaggcggccgagcgcgccggggtgcccgccttcctggagacctccgcgccccgcaacctccccttctacgagcggctcggcttcaccgtcaccgccgacgtcgaggtgcccgaaggaccgcgcacctggtgcatgacccgcaagcccggtgcctga

SEQ ID NO: 40485 - DNA, 2655 bp, synthetic construct
  source 1..2655: mol_type = other DNA
atggccttaccagtgaccgccttgctcctgccgctggccttgctgctccacgccgccaggccggacatccagatgacacagagccctagcagcctgtctgccagcgtgggagacagagtgaccatcacatgcaaggccagcgaccacatcaacaactggctggcctggtatcagcagaagcctggacaggcccctaagctgctgatctacggcgctaccacactggaaacaggcgtgcccagcagattttctggcagcggctctggtaccgactacaccctgacaatatccagcctccagcctgaggacttcgccacctactactgtcagcagagctggaacaccccttggacattcggccagggcaccaagctggaaatcaagagactcgagggacagcctaaggccaatcctaccgtgacactgttccctccaagcagcgaagaactccaggccaacaaggccacacttgtgtgcctgatctccgacttctaccctggggctgtgacagtggcttggaaggccgatggatctcctgtgaaagccggcgtggaaaccaccaagccatccaagcagagcaacaacaaatacgccgccagctcctacctgagcctgacacctgagcagtggaagtcccacagatcctacagctgccaagtgacccacgaaggcagcaccgtggaaaagacagtggcccctacagagtgcagcggatcccccatcaagaccgatgtgattacaatggaccccaaggacaactgctccaaggacgccaacgataccctgctgctccagctgaccaacaccagcgcctactacatgtacgagatcctgctgggcaaggccaccctgtacgccgtgctggtgtctgccctggtgctgatggctatggtcaagcggaaggacagccggggaagggccaagcgatctggatctggagcaacaaacttctcactactcaaacaagcaggtgacgtggaggagaatcccgggcctactagtatggactggatttggcgcatccttttccttgtcggcgctgctaccggcgcgcattccttcgaacaagttcagcttcaacagcctggcgctgagctggtcaaacctggcgcttctgtgaagatgagctgcaaagccagcggctacgccttcagcagctactggatcaactggatgaagcagaaacccggccagggactcgaatggatcggccaaatctatcccggcgacggcgacaccaactacaacggcaagttcaagggcagagccacactgaccgccgatacctctagcagcacagcctacatgcagctgagcagcctgaccagcgaagatagcgccgtgtacttctgtgcccggtccatcacaacagtcgtgggctgcgctatggactattggggccagggaacaagcgtgaccgtgtctagtacgcgtgcctctacaaagggaccctccgtgtttcctctggctcccagcagcaagtctacaagcggaggaacagccgctctgggctgcctggtcaaggattactttcccgagcctgtgaccgtgtcctggaatagcggagcactgacaagcggcgtgcacacctttccagccgtgctgcaaagcagcggcctgtactctctgagcagcgtggtcacagtgcctagctctagcctgggcacccagacctacatctgcaatgtgaaccacaagcctagcaacaccaaggtggacaagagagtggaacccaagagctgtggtaccgaagtgaaaaccgactccaccgaccacgtgaagcccaaagagacagagaacaccaagcagcccagcaagagctgccacaagcccaaggccatcgtgcacaccgagaaagtgaacatgatgagcctgaccgtgatcggcttcagaatcctgctgctgaaagtggccggctttaacctgctgatgaccctgcggctgtggtccagccgcgccaagagaagcggatctggcgtgaagcagaccctgaatttcgacctgctgaagctggctggcgacgtggaatccaacccaggcccttctagaggccatatgaccgagtacaagcccacggtgcgcctcgccacccgcgacgacgtccccagggccgtacgcaccctcgccgccgcgttcgccgactaccccgccacgcgccacaccgtcgatccggaccgccacatcgagcgggtcaccgagctgcaagaactcttcctcacgcgcgtcgggctcgacatcggcaaggtgtgggtcgcggacgacggcgccgcggtggcggtctggaccacgccggagagcgtcgaagcgggggcggtgttcgccgagatcggcccgcgcatggccgagttgagcggttcccggctggccgcgcagcaacagatggaaggcctcctggcgccgcaccggcccaaggagcccgcgtggttcctggccaccgtcggcgtctcgcccgaccaccagggcaagggtctgggcagcgccgtcgtgctccccggagtggaggcggccgagcgcgccggggtgcccgccttcctggagacctccgcgccccgcaacctccccttctacgagcggctcggcttcaccgtcaccgccgacgtcgaggtgcccgaaggaccgcgcacctggtgcatgacccgcaagcccggtgcctga

SEQ ID NO: 40486 - DNA, 2625 bp, synthetic construct
  source 1..2625: mol_type = other DNA
atggccttaccagtgaccgccttgctcctgccgctggccttgctgctccacgccgccaggccggacatccagatgacacagagccctagcagcctgtctgccagcgtgggagacagagtgaccatcacatgcaaggccagcgaccacatcaacaactggctggcctggtatcagcagaagcctggacaggcccctaagctgctgatctacggcgctaccacactggaaacaggcgtgcccagcagattttctggcagcggctctggtaccgactacaccctgacaatatccagcctccagcctgaggacttcgccacctactactgtcagcagagctggaacaccccttggacattcggccagggcaccaagctggaaatcaagagactcgagggacagcctaaggccaatcctaccgtgacactgttccctccaagcagcgaagaactccaggccaacaaggccacacttgtgtgcctgatctccgacttctaccctggggctgtgacagtggcttggaaggccgatggatctcctgtgaaagccggcgtggaaaccaccaagccatccaagcagagcaacaacaaatacgccgccagctcctacctgagcctgacacctgagcagtggaagtcccacagatcctacagctgccaagtgacccacgaaggcagcaccgtggaaaagacagtggcccctacagagtgcagcggatcccccatcaagaccgatgtgattacaatggaccccaaggacaactgctccaaggacgccaacgataccctgctgctccagctgaccaacaccagcgcctactacatgtacgagatcctgctgggcaaggccaccctgtacgccgtgctggtgtctgccctggtgctgatggctatggtcaagcggaaggacagccggggaagggccaagcgatctggatctggagcaacaaacttctcactactcaaacaagcaggtgacgtggaggagaatcccgggcctactagtatggactggatttggcgcatccttttccttgtcggcgctgctaccggcgcgcattccttcgaacaagttcagcttcaacagcctggcgctgagctggtcaaacctggcgcttctgtgaagatgagctgcaaagccagcggctacgccttcagcagctactggatcaactggatgaagcagaaacccggccagggactcgaatggatcggccaaatctatcccggcgacggcgacaccaactacaacggcaagttcaagggcagagccacactgaccgccgatacctctagcagcacagcctacatgcagctgagcagcctgaccagcgaagatagcgccgtgtacttctgtgcccggtccatcacaacagtcgtgggctgcgctatggactattggggccagggaacaagcgtgaccgtgtctagtacgcgtgcctctacaaagggaccctccgtgtttcctctggctcccagcagcaagtctacaagcggaggaacagccgctctgggctgcctggtcaaggattactttcccgagcctgtgaccgtgtcctggaatagcggagcactgacaagcggcgtgcacacctttccagccgtgctgcaaagcagcggcctgtactctctgagcagcgtggtcacagtgcctagctctagcctgggcacccagacctacatctgcaatgtgaaccacaagcctagcaacaccaaggtggacaagagagtggaacccaagagctgtatccccgaggacacattcttcccaagccccgagagcagctgcgacgtgaagctggtggaaaagagcttcgagacagacaccaacctgaacttccagaacctgagcgtgatcggcttcagaatcctgctgctgaaagtggccggctttaacctgctgatgaccctgcggctgtggtccagccgcgccaagagaagcggatctggcgtgaagcagaccctgaatttcgacctgctgaagctggctggcgacgtggaatccaacccaggcccttctagaggccatatgaccgagtacaagcccacggtgcgcctcgccacccgcgacgacgtccccagggccgtacgcaccctcgccgccgcgttcgccgactaccccgccacgcgccacaccgtcgatccggaccgccacatcgagcgggtcaccgagctgcaagaactcttcctcacgcgcgtcgggctcgacatcggcaaggtgtgggtcgcggacgacggcgccgcggtggcggtctggaccacgccggagagcgtcgaagcgggggcggtgttcgccgagatcggcccgcgcatggccgagttgagcggttcccggctggccgcgcagcaacagatggaaggcctcctggcgccgcaccggcccaaggagcccgcgtggttcctggccaccgtcggcgtctcgcccgaccaccagggcaagggtctgggcagcgccgtcgtgctccccggagtggaggcggccgagcgcgccggggtgcccgccttcctggagacctccgcgccccgcaacctccccttctacgagcggctcggcttcaccgtcaccgccgacgtcgaggtgcccgaaggaccgcgcacctggtgcatgacccgcaagcccggtgcctga

SEQ ID NO: 40487 - DNA, 2607 bp, synthetic construct
  source 1..2607: mol_type = other DNA
atggccttaccagtgaccgccttgctcctgccgctggccttgctgctccacgccgccaggccggacatccagatgacacagagccctagcagcctgtctgccagcgtgggagacagagtgaccatcacatgcaaggccagcgaccacatcaacaactggctggcctggtatcagcagaagcctggacaggcccctaagctgctgatctacggcgctaccacactggaaacaggcgtgcccagcagattttctggcagcggctctggcaccgactacaccctgacaatatccagcctccagcctgaggacttcgccacctactactgtcagcagagctggaacaccccttggacattcggccagggcaccaagctggaaatcaagagactcgaggacctgaagaacgtgttcccacctgaggtggccgtgttcgagcctagcgaggccgagatcagccacacccagaaagccaccctcgtgtgcctggctaccggcttctaccccgaccatgtggaactgtcttggtgggtcaacggcaaagaggtgcacagcggcgtgtctaccgacccccagccactgaaagaacagcccgccctgaacgacagccggtactgcctgagcagcagactgagagtgtccgccaccttctggcagaacccccggaaccacttcagatgccaggtgcagttctacggcctgagcgagaacgacgagtggacccaggacagagccaagcccgtgacccagatcgtgtctgccgaagcctggggcagagccgattgcggctttaccagcgagagctaccagcagggcgtgctgagcgcctactacatgtacttgttgctgctgctgaagtccgtggtgtacttcgccatcatcacatgctgcctgctgcggagaaccgccttctgctgcaacggcgagaagtctagggccaagcgatctggatctggagcaacaaacttctcactactcaaacaagcaggtgacgtggaggagaatcccgggcctactagtatggactggatttggcgcatccttttccttgtcggcgctgctaccggcgcgcattccttcgaacaagttcagcttcaacagcctggcgctgagctggtcaaacctggcgcttctgtgaagatgagctgcaaagccagcggctacgccttcagcagctactggatcaactggatgaagcagaaacccggccagggactcgaatggatcggccaaatctatcccggcgacggcgacaccaactacaacggcaagttcaagggcagagccacactgaccgccgatacctctagcagcacagcctacatgcagctgagcagcctgaccagcgaagatagcgccgtgtacttctgtgcccggtccatcacaacagtcgtgggctgcgctatggactattggggccagggaacaagcgtgaccgtgtctagtacgcgttctcagcctcctgccaagcctagcgtgttcattatgaagaacggcaccaacgtggcctgcctggtcaaggacttctaccccaaagaagtgaccatcagcctgcggagcagcaagaagatcgtcgagttcgaccccgccatcgtgattagccctagcggcaagtatagcgccgtgaagctgggccagtacggcgacagcaatagcgtgacatgtagcgtgcagcacaacagcgagacagtgcacagcaccgacttcgagccctacgccaacagcttcaacaacgagaagctgcccgagcctgagaacgacacccagatcagcgagccttgctacggccctagagtgaccgtgcacaccgagaaagtgaacatgatgagcctgaccgtgctgggcctgagactgctgttcgccaagacaatcgccatcaactttctgctgaccgtcaagctgttcttccgcgccaagagaagcggatctggcgtgaagcagaccctgaatttcgacctgctgaagctggctggcgacgtggaatccaacccaggcccttctagaggccatatgaccgagtacaagcccacggtgcgcctcgccacccgcgacgacgtccccagggccgtacgcaccctcgccgccgcgttcgccgactaccccgccacgcgccacaccgtcgatccggaccgccacatcgagcgggtcaccgagctgcaagaactcttcctcacgcgcgtcgggctcgacatcggcaaggtgtgggtcgcggacgacggcgccgcggtggcggtctggaccacgccggagagcgtcgaagcgggggcggtgttcgccgagatcggcccgcgcatggccgagttgagcggttcccggctggccgcgcagcaacagatggaaggcctcctggcgccgcaccggcccaaggagcccgcgtggttcctggccaccgtcggcgtctcgcccgaccaccagggcaagggtctgggcagcgccgtcgtgctccccggagtggaggcggccgagcgcgccggggtgcccgccttcctggagacctccgcgccccgcaacctccccttctacgagcggctcggcttcaccgtcaccgccgacgtcgaggtgcccgaaggaccgcgcacctggtgcatgacccgcaagcccggtgcctga

SEQ ID NO: 40488 - DNA, 2589 bp, synthetic construct
  source 1..2589: mol_type = other DNA
atggccttaccagtgaccgccttgctcctgccgctggccttgctgctccacgccgccaggccggacatccagatgacacagagccctagcagcctgtctgccagcgtgggagacagagtgaccatcacatgcaaggccagcgaccacatcaacaactggctggcctggtatcagcagaagcctggacaggcccctaagctgctgatctacggcgctaccacactggaaacaggcgtgcccagcagattttctggcagcggctctggcaccgactacaccctgacaatatccagcctccagcctgaggacttcgccacctactactgtcagcagagctggaacaccccttggacattcggccagggcaccaagctggaaatcaagagactcgaggatctgcggaacgtgaccccacccaaggtgtccctgttcgagcccagcaaggccgagatcgccaataaacagaaggccaccctcgtgtgcctggccagaggcttcttccccgaccacgtggaactgtcttggtgggtcaacggcaaagaggtgcacagcggcgtcagcaccgaccctcaggcctacaaagagagcaactacagctactgcctgagcagtcggctgcgggtgtccgccaccttctggcacaacccccggaaccacttcagatgccaggtgcagttccacggcctgagcgaagaggacaagtggcccgagggcagccccaagcctgtcacccagaacatcagcgccgaggcctggggcagagcctgtggcatcaccagcagctaccagcagggcgtgctgagcgcctactacacatacctgctgctgctcctcaagagcgtgatctacctggccatcatcagcttcagcctgctgcggagaacaagcgtgtgcggcaacgagaagaagtccagggccaagcgatctggatctggagcaacaaacttctcactactcaaacaagcaggtgacgtggaggagaatcccgggcctactagtatggactggatttggcgcatccttttccttgtcggcgctgctaccggcgcgcattccttcgaacaagttcagcttcaacagcctggcgctgagctggtcaaacctggcgcttctgtgaagatgagctgcaaagccagcggctacgccttcagcagctactggatcaactggatgaagcagaaacccggccagggactcgaatggatcggccaaatctatcccggcgacggcgacaccaactacaacggcaagttcaagggcagagccacactgaccgccgatacctctagcagcacagcctacatgcagctgagcagcctgaccagcgaagatagcgccgtgtacttctgtgcccggtccatcacaacagtcgtgggctgcgctatggactattggggccagggaacaagcgtgaccgtgtctagtacgcgttctcagcctcctgccaagcctagcgtgttcattatgaagaacggcaccaacgtggcctgcctggtcaaggacttctaccccaaagaagtgaccatcagcctgcggagcagcaagaagatcgtcgagttcgaccccgccatcgtgattagccctagcggcaagtatagcgccgtgaagctgggccagtacggcgacagcaatagcgtgacatgtagcgtgcagcacaacagcgagacagtgcacagcaccgacttcgagccctacgccaacagcttcaacaacgagaagctgcccgagcctgagaacgacacccagatcagcgagccttgctacggccctagagtgaccgtgcacaccgagaaagtgaacatgatgagcctgaccgtgctgggcctgagactgctgttcgccaagacaatcgccatcaactttctgctgaccgtcaagctgttcttccgcgccaagagaagcggatctggcgtgaagcagaccctgaatttcgacctgctgaagctggctggcgacgtggaatccaacccaggcccttctagaggccatatgaccgagtacaagcccacggtgcgcctcgccacccgcgacgacgtccccagggccgtacgcaccctcgccgccgcgttcgccgactaccccgccacgcgccacaccgtcgatccggaccgccacatcgagcgggtcaccgagctgcaagaactcttcctcacgcgcgtcgggctcgacatcggcaaggtgtgggtcgcggacgacggcgccgcggtggcggtctggaccacgccggagagcgtcgaagcgggggcggtgttcgccgagatcggcccgcgcatggccgagttgagcggttcccggctggccgcgcagcaacagatggaaggcctcctggcgccgcaccggcccaaggagcccgcgtggttcctggccaccgtcggcgtctcgcccgaccaccagggcaagggtctgggcagcgccgtcgtgctccccggagtggaggcggccgagcgcgccggggtgcccgccttcctggagacctccgcgccccgcaacctccccttctacgagcggctcggcttcaccgtcaccgccgacgtcgaggtgcccgaaggaccgcgcacctggtgcatgacccgcaagcccggtgcctga

SEQ ID NO: 40489 - DNA, 2586 bp, synthetic construct
  source 1..2586: mol_type = other DNA
atggccttaccagtgaccgccttgctcctgccgctggccttgctgctccacgccgccaggccggacatccagatgacacagagccctagcagcctgtctgccagcgtgggagacagagtgaccatcacatgcaaggccagcgaccacatcaacaactggctggcctggtatcagcagaagcctggacaggcccctaagctgctgatctacggcgctaccacactggaaacaggcgtgcccagcagattttctggcagcggctctggcaccgactacaccctgacaatatccagcctccagcctgaggacttcgccacctactactgtcagcagagctggaacaccccttggacattcggccagggcaccaagctggaaatcaagagactcgaggacaagagactggacgccgacatcagccccaagcctacaatcttcctgcctagcgtggccgagacaaacctgcacaagaccggcacctacctgtgtctgctggaaaagttcttccccgacgtgatccgggtgtactggaaagagaaggacggcaacaccatcctggactcccaagagggcgacaccctgaaaacaaacgacacctacatgaagttcagctggctgaccgtgcctgagagagctatgggcaaagaacacagatgcatcgtgaagcacgagaacaacaaaggcggagccgaccaagagatattcttcccgagcatcaagaaagtggccgtgtccaccaagccaaccacctgttggcaggacaagaacgacgtgctccagctccagttcaccatcaccagcgcctactacacatacctgctgctgctcctcaagagcgtgatctacctggccatcatcagcttcagcctgctgcggagaacaagcgtgtgcggcaacgagaagaagtccagggccaagcgatctggatctggagcaacaaacttctcactactcaaacaagcaggtgacgtggaggagaatcccgggcctactagtatggactggatttggcgcatccttttccttgtcggcgctgctaccggcgcgcattccttcgaacaagttcagcttcaacagcctggcgctgagctggtcaaacctggcgcttctgtgaagatgagctgcaaagccagcggctacgccttcagcagctactggatcaactggatgaagcagaaacccggccagggactcgaatggatcggccaaatctatcccggcgacggcgacaccaactacaacggcaagttcaagggcagagccacactgaccgccgatacctctagcagcacagcctacatgcagctgagcagcctgaccagcgaagatagcgccgtgtacttctgtgcccggtccatcacaacagtcgtgggctgcgctatggactattggggccagggaacaagcgtgaccgtgtctagtacgcgttctcagcctcctgccaagcctagcgtgttcattatgaagaacggcaccaacgtggcctgcctggtcaaggacttctaccccaaagaagtgaccatcagcctgcggagcagcaagaagatcgtcgagttcgaccccgccatcgtgattagccctagcggcaagtatagcgccgtgaagctgggccagtacggcgacagcaatagcgtgacatgtagcgtgcagcacaacagcgagacagtgcacagcaccgacttcgagccctacgccaacagcttcaacaacgagaagctgcccgagcctgagaacgacacccagatcagcgagccttgctacggccctagagtgaccgtgcacaccgagaaagtgaacatgatgagcctgaccgtgctgggcctgagactgctgttcgccaagacaatcgccatcaactttctgctgaccgtcaagctgttcttccgcgccaagagaagcggatctggcgtgaagcagaccctgaatttcgacctgctgaagctggctggcgacgtggaatccaacccaggcccttctagaggccatatgaccgagtacaagcccacggtgcgcctcgccacccgcgacgacgtccccagggccgtacgcaccctcgccgccgcgttcgccgactaccccgccacgcgccacaccgtcgatccggaccgccacatcgagcgggtcaccgagctgcaagaactcttcctcacgcgcgtcgggctcgacatcggcaaggtgtgggtcgcggacgacggcgccgcggtggcggtctggaccacgccggagagcgtcgaagcgggggcggtgttcgccgagatcggcccgcgcatggccgagttgagcggttcccggctggccgcgcagcaacagatggaaggcctcctggcgccgcaccggcccaaggagcccgcgtggttcctggccaccgtcggcgtctcgcccgaccaccagggcaagggtctgggcagcgccgtcgtgctccccggagtggaggcggccgagcgcgccggggtgcccgccttcctggagacctccgcgccccgcaacctccccttctacgagcggctcggcttcaccgtcaccgccgacgtcgaggtgcccgaaggaccgcgcacctggtgcatgacccgcaagcccggtgcctga

SEQ ID NO: 40490 - DNA, 2553 bp, synthetic construct
  source 1..2553: mol_type = other DNA
atggccttaccagtgaccgccttgctcctgccgctggccttgctgctccacgccgccaggccggacatccagatgacacagagccctagcagcctgtctgccagcgtgggagacagagtgaccatcacatgcaaggccagcgaccacatcaacaactggctggcctggtatcagcagaagcctggacaggcccctaagctgctgatctacggcgctaccacactggaaacaggcgtgcccagcagattttctggcagcggctctggcaccgactacaccctgacaatatccagcctccagcctgaggacttcgccacctactactgtcagcagagctggaacaccccttggacattcggccagggcaccaagctggaaatcaagagactcgaggatctgcggaacgtgaccccacccaaggtgtccctgttcgagcccagcaaggccgagatcgccaataaacagaaggccaccctcgtgtgcctggccagaggcttcttccccgaccacgtggaactgtcttggtgggtcaacggcaaagaggtgcacagcggcgtcagcaccgaccctcaggcctacaaagagagcaactacagctactgcctgagcagtcggctgcgggtgtccgccaccttctggcacaacccccggaaccacttcagatgccaggtgcagttccacggcctgagcgaagaggacaagtggcccgagggcagccccaagcctgtcacccagaacatcagcgccgaggcctggggcagagcctgtggcatcaccagcagctaccagcagggcgtgctgagcgcctactacatgtacttgttgctgctgctgaagtccgtggtgtacttcgccatcatcacatgctgcctgctgcggagaaccgccttctgctgcaacggcgagaagtctagggccaagcgatctggatctggagcaacaaacttctcactactcaaacaagcaggtgacgtggaggagaatcccgggcctactagtatggactggatttggcgcatccttttccttgtcggcgctgctaccggcgcgcattccttcgaacaagttcagcttcaacagcctggcgctgagctggtcaaacctggcgcttctgtgaagatgagctgcaaagccagcggctacgccttcagcagctactggatcaactggatgaagcagaaacccggccagggactcgaatggatcggccaaatctatcccggcgacggcgacaccaactacaacggcaagttcaagggcagagccacactgaccgccgatacctctagcagcacagcctacatgcagctgagcagcctgaccagcgaagatagcgccgtgtacttctgtgcccggtccatcacaacagtcgtgggctgcgctatggactattggggccagggaacaagcgtgaccgtgtctagtacgcgtatccagaaccctgatcctgccgtgtaccagctgcgggatagcaagagcagcgacaagagcgtgtgtctgttcaccgacttcgacagccagaccaacgtgtcccagagcaaggactccgacgtgtacatcaccgataagaccgtgctggacatgcggagcatggacttcaagagcaactccgccgtggcctggtccaacaagtccgatttcgcctgcgccaacgccttcaacaacagcattatccccgaggacacattcttcccaagccccgagagcagctgcgacgtgaagctggtggaaaagagcttcgagacagacaccaacctgaacttccagaacctgaccgtgctgggcctgcggatgctgttcgccaaaaccgtggccgtgaacttcctgctgaccgccaagctgttcttcctccgcgccaagagaagcggatctggcgtgaagcagaccctgaatttcgacctgctgaagctggctggcgacgtggaatccaacccaggcccttctagaggccatatgaccgagtacaagcccacggtgcgcctcgccacccgcgacgacgtccccagggccgtacgcaccctcgccgccgcgttcgccgactaccccgccacgcgccacaccgtcgatccggaccgccacatcgagcgggtcaccgagctgcaagaactcttcctcacgcgcgtcgggctcgacatcggcaaggtgtgggtcgcggacgacggcgccgcggtggcggtctggaccacgccggagagcgtcgaagcgggggcggtgttcgccgagatcggcccgcgcatggccgagttgagcggttcccggctggccgcgcagcaacagatggaaggcctcctggcgccgcaccggcccaaggagcccgcgtggttcctggccaccgtcggcgtctcgcccgaccaccagggcaagggtctgggcagcgccgtcgtgctccccggagtggaggcggccgagcgcgccggggtgcccgccttcctggagacctccgcgccccgcaacctccccttctacgagcggctcggcttcaccgtcaccgccgacgtcgaggtgcccgaaggaccgcgcacctggtgcatgacccgcaagcccggtgcctga

SEQ ID NO: 40491 - DNA, 4449 bp, synthetic construct
  source 1..4449: mol_type = other DNA
atggccttaccagtgaccgccttgctcctgccgctggccttgctgctccacgccgccaggccggacgagatcgtgctgacacagagccccgccaccctgtcactgtctccaggcgaaagagccaccctgagctgtagcgccagcagcagcgtgtcctacatgcactggtatcagcagaagcccggccaggcccccagactgctgatctacgataccagcaagctggcctccggcatccccgccagattttctggcagcggctccggcaccgacttcaccctgacaatcagcagcctggaacccgaggacgtggccgtgtactactgttttcaaggcagcgtgtaccccttcaccttcggccagggcaccaagctggaaatcaagagaggtggcggtggctcgggcggtggtgggtcgggtggcggcggatctcaggtgcagctccaggaatctggccctggcctcgtgaagcctagccagaccctgagcctgacctgtaccgtgtctggcggcagcatcagcacaagcggcatgggcgtgggctggatcagacagcaccctggcaagggcctggaatggatcggccacatttggtgggacgacgacaagcggtacaaccccgccctgaagtccagagtgaccatcagcgtggacaccagcaagaaccagttcagcctgaagctgagcagcgtgacagccgccgataccgccgtgtattattgcgcccggatggaactgtggtcctactacttcgactactggggccagggaaccctcgtgaccgtgtctagtctcgaggacctgaagaacgtgttcccacctgaggtggccgtgttcgagcctagcgaggccgagatcagccacacccagaaagccaccctcgtgtgcctggctaccggcttctaccccgaccatgtggaactgtcttggtgggtcaacggcaaagaggtgcacagcggcgtgtctaccgacccccagccactgaaagaacagcccgccctgaacgacagccggtactgcctgagcagcagactgagagtgtccgccaccttctggcagaacccccggaaccacttcagatgccaggtgcagttctacggcctgagcgagaacgacgagtggacccaggacagagccaagcccgtgacccagatcgtgtctgccgaagcctggggcagagccgattgcggatcccagagcttcggcctgctggaccccaagctgtgctacctgctggatggcatcctgttcatctacggcgtgatcctgaccgccctgttcctgggcggtggaggctctatccggaacggctctgaagttcgcgatcctctggtcacctacgagggcagcaatcctcctgccagtcctctgcaggataacctcgtgatcgccctgcacagctacgagccttctcatgatggcgacctgggctttgagaagggcgagcagctgagaatcctggaacagtctggcgagtggtggaaggcccagtctctgacaacaggccaagagggcttcatccccttcaacttcgtggccaaggccaacagcctggaacctgagccttggtttttcaagaacctgtccagaaaggacgccgagagacagctgctggcccctggaaatacccacggcagctttctgattagagagagcgagagcacagccggcagcttcagcctgagtgtgcgggactttgaccagaatcaaggcgaggtcgtgaagcactacaagatccggaacctggataacggcggcttctacatcagccccagaatcacctttcctggcctgcacgaactcgtgcggcactacacaaatgcctccgatggcctgtgcaccagactgagcagaccctgtcagacccagaagcctcagaaaccttggtgggaagatgagtgggaagtgcccagagaaaccctgaagctggtggaaagactcggagccggccagtttggagaagtgtggatgggctactacaatggccacaccaaggtggccgtgaagtctctgaagcagggctctatgagcccagatgcttttctggccgaggccaatctgatgaagcagctgcagcaccagagacttgtgcggctgtatgccgtggtcacccaagagcctatctacatcatcatcgagtacatggaaaacggcagcctggtggacttcctgaaaacccctagcggcatcaagctgaccattaacaagctgctggacatggccgctcagatcgccgaaggcatggcctttatcgaggaacggaactacatccacagggacctgagagccgccaatatcctggtgtctgacaccctgagctgcaagattgccgatttcggcctggccagactgatcgaggacaatgagtataccgccagagagggcgccaagtttcccatcaaatggacagcccctgaggccatcaactacggcaccttcaccatcaagagcgacgtgtggtccttcggcatcctgctgacagagatcgtgacacacggcagaatcccatatcctggcatgacaaaccccgaagtgatccagaatctggaacggggctacagaatggtccgacctgacaactgccccgaggaactgtaccagctgatgagactgtgctggaaagagaggcccgaggacagacccaccttcgactacctgagaagcgtgctggaagatttcttcaccgccaccgagggccagtaccagcctcagccaagggccaagcgatctggatctggagcaacaaacttctcactactcaaacaagcaggtgacgtggaggagaatcccgggcctactagtatggactggatttggcgcatccttttccttgtcggcgctgctaccggcgcgcattccttcgaagtgcagctggttgaatcaggtggcggcctggttcaacctggcggatctctgagactgagctgtgccgccagcggctacacctttaccgagtacacaatccactgggtccgacaggcccctggcaaaggacttgagtgggtcgccaacatcaaccccaacaatggcggcaccacctacaaccagaagttcgaggacagattcaccatcagccgggacaacagcaagaacaccctgtacctccagatgaactccctgagagccgaggacaccgccgtgtactattgtgccagaggctggaacttcgactactggggccagggaacactggtcaccgttagctctacgcgtatccagaaccctgatcctgccgtgtaccagctgcgggatagcaagagcagcgacaagagcgtgtgtctgttcaccgacttcgacagccagaccaacgtgtcccagagcaaggactccgacgtgtacatcaccgataagaccgtgctggacatgcggagcatggacttcaagagcaactccgccgtggcctggtccaacaagtccgatttcgcctgcgccaacgccttcaacaacagcattatccccgaggacacattcttcccaagccccgagagcagctgcggtaccatcactcaaggtttggcagtgtcaaccatctcatcattctttccacctggctaccaagtgtccttctgcctggtcatggtgctgctgttcgccgtggataccggcctgtacttcagcgtcaagagaggccggaagaagctgctgtacatcttcaagcagcctttcatgcggcccgtgcagaccacccaggaagaggacggctgctcctgccggttccccgaggaagaagaaggcggctgcgagctgcgcgccaagagaagcggatctggcgtgaagcagaccctgaatttcgacctgctgaagctggctggcgacgtggaatccaacccaggcccttctagaggccatatgaccgagtacaagcccacggtgcgcctcgccacccgcgacgacgtccccagggccgtacgcaccctcgccgccgcgttcgccgactaccccgccacgcgccacaccgtcgatccggaccgccacatcgagcgggtcaccgagctgcaagaactcttcctcacgcgcgtcgggctcgacatcggcaaggtgtgggtcgcggacgacggcgccgcggtggcggtctggaccacgccggagagcgtcgaagcgggggcggtgttcgccgagatcggcccgcgcatggccgagttgagcggttcccggctggccgcgcagcaacagatggaaggcctcctggcgccgcaccggcccaaggagcccgcgtggttcctggccaccgtcggcgtctcgcccgaccaccagggcaagggtctgggcagcgccgtcgtgctccccggagtggaggcggccgagcgcgccggggtgcccgccttcctggagacctccgcgccccgcaacctccccttctacgagcggctcggcttcaccgtcaccgccgacgtcgaggtgcccgaaggaccgcgcacctggtgcatgacccgcaagcccggtgcctga

SEQ ID NO: 40492 - DNA, 4083 bp, synthetic construct
  source 1..4083: mol_type = other DNA
atggccttaccagtgaccgccttgctcctgccgctggccttgctgctccacgccgccaggccggaggttcagctgcttgagtctggcggaggactggttcaacctggcggaagcctgagactgtcttgtgccgccagcggcttcacctttagcagctacgccatgagctgggtccgacaggctcctggcaaaggactggaatgggtgtccagcatcagcggcagcggcgactacatctactacgccgatagcgtgaagggcagattcaccatcagccgggacatcagcaagaacaccctgtacctccagatgaacagcctgagagccgaggacaccgccgtgtactactgtgccaaagaaggcaccggcgctaacagcagcctggccgattatagaggccagggcacactggtcaccgtgtctagtctcgaggacctgaagaacgtgttcccacctgaggtggccgtgttcgagcctagcgaggccgagatcagccacacccagaaagccaccctcgtgtgcctggctaccggcttctaccccgaccatgtggaactgtcttggtgggtcaacggcaaagaggtgcacagcggcgtgtctaccgacccccagccactgaaagaacagcccgccctgaacgacagccggtactgcctgagcagcagactgagagtgtccgccaccttctggcagaacccccggaaccacttcagatgccaggtgcagttctacggcctgagcgagaacgacgagtggacccaggacagagccaagcccgtgacccagatcgtgtctgccgaagcctggggcagagccgattgcggatcccagagcttcggcctgctggaccccaagctgtgctacctgctggatggcatcctgttcatctacggcgtgatcctgaccgccctgttcctgggcggtggaggctctatccggaacggctctgaagttcgcgatcctctggtcacctacgagggcagcaatcctcctgccagtcctctgcaggataacctcgtgatcgccctgcacagctacgagccttctcatgatggcgacctgggctttgagaagggcgagcagctgagaatcctggaacagtctggcgagtggtggaaggcccagtctctgacaacaggccaagagggcttcatccccttcaacttcgtggccaaggccaacagcctggaacctgagccttggtttttcaagaacctgtccagaaaggacgccgagagacagctgctggcccctggaaatacccacggcagctttctgattagagagagcgagagcacagccggcagcttcagcctgagtgtgcgggactttgaccagaatcaaggcgaggtcgtgaagcactacaagatccggaacctggataacggcggcttctacatcagccccagaatcacctttcctggcctgcacgaactcgtgcggcactacacaaatgcctccgatggcctgtgcaccagactgagcagaccctgtcagacccagaagcctcagaaaccttggtgggaagatgagtgggaagtgcccagagaaaccctgaagctggtggaaagactcggagccggccagtttggagaagtgtggatgggctactacaatggccacaccaaggtggccgtgaagtctctgaagcagggctctatgagcccagatgcttttctggccgaggccaatctgatgaagcagctgcagcaccagagacttgtgcggctgtatgccgtggtcacccaagagcctatctacatcatcatcgagtacatggaaaacggcagcctggtggacttcctgaaaacccctagcggcatcaagctgaccattaacaagctgctggacatggccgctcagatcgccgaaggcatggcctttatcgaggaacggaactacatccacagggacctgagagccgccaatatcctggtgtctgacaccctgagctgcaagattgccgatttcggcctggccagactgatcgaggacaatgagtataccgccagagagggcgccaagtttcccatcaaatggacagcccctgaggccatcaactacggcaccttcaccatcaagagcgacgtgtggtccttcggcatcctgctgacagagatcgtgacacacggcagaatcccatatcctggcatgacaaaccccgaagtgatccagaatctggaacggggctacagaatggtccgacctgacaactgccccgaggaactgtaccagctgatgagactgtgctggaaagagaggcccgaggacagacccaccttcgactacctgagaagcgtgctggaagatttcttcaccgccaccgagggccagtaccagcctcagccaagggccaagcgatctggatctggagcaacaaacttctcactactcaaacaagcaggtgacgtggaggagaatcccgggcctactagtatggactggatttggcgcatccttttccttgtcggcgctgctaccggcgcgcattccttcgaagtgcagctggttgaatcaggtggcggcctggttcaacctggcggatctctgagactgagctgtgccgccagcggctacacctttaccgagtacacaatccactgggtccgacaggcccctggcaaaggacttgagtgggtcgccaacatcaaccccaacaatggcggcaccacctacaaccagaagttcgaggacagattcaccatcagccgggacaacagcaagaacaccctgtacctccagatgaactccctgagagccgaggacaccgccgtgtactattgtgccagaggctggaacttcgactactggggccagggaacactggtcaccgttagctctacgcgtatccagaaccctgatcctgccgtgtaccagctgcgggatagcaagagcagcgacaagagcgtgtgtctgttcaccgacttcgacagccagaccaacgtgtcccagagcaaggactccgacgtgtacatcaccgataagaccgtgctggacatgcggagcatggacttcaagagcaactccgccgtggcctggtccaacaagtccgatttcgcctgcgccaacgccttcaacaacagcattatccccgaggacacattcttcccaagccccgagagcagctgcggtaccatcactcaaggtttggcagtgtcaaccatctcatcattctttccacctggctaccaagtgtccttctgcctggtcatggtgctgctgttcgccgtggataccggcctgtacttcagcgtcaagagaggccggaagaagctgctgtacatcttcaagcagcctttcatgcggcccgtgcagaccacccaggaagaggacggctgctcctgccggttccccgaggaagaagaaggcggctgcgagctgcgcgccaagagaagcggatctggcgtgaagcagaccctgaatttcgacctgctgaagctggctggcgacgtggaatccaacccaggcccttctagaggccatatgaccgagtacaagcccacggtgcgcctcgccacccgcgacgacgtccccagggccgtacgcaccctcgccgccgcgttcgccgactaccccgccacgcgccacaccgtcgatccggaccgccacatcgagcgggtcaccgagctgcaagaactcttcctcacgcgcgtcgggctcgacatcggcaaggtgtgggtcgcggacgacggcgccgcggtggcggtctggaccacgccggagagcgtcgaagcgggggcggtgttcgccgagatcggcccgcgcatggccgagttgagcggttcccggctggccgcgcagcaacagatggaaggcctcctggcgccgcaccggcccaaggagcccgcgtggttcctggccaccgtcggcgtctcgcccgaccaccagggcaagggtctgggcagcgccgtcgtgctccccggagtggaggcggccgagcgcgccggggtgcccgccttcctggagacctccgcgccccgcaacctccccttctacgagcggctcggcttcaccgtcaccgccgacgtcgaggtgcccgaaggaccgcgcacctggtgcatgacccgcaagcccggtgcctga

SEQ ID NO: 40493 - DNA, 2649 bp, synthetic construct
  source 1..2649: mol_type = other DNA
atggccttaccagtgaccgccttgctcctgccgctggccttgctgctccacgccgccaggccggacatccagatgacacagagccctagcagcctgtctgccagcgtgggagacagagtgaccatcacatgcaaggccagcgaccacatcaacaactggctggcctggtatcagcagaagcctggacaggcccctaagctgctgatctacggcgctaccacactggaaacaggcgtgcccagcagattttctggcagcggctctggtaccgactacaccctgacaatatccagcctccagcctgaggacttcgccacctactactgtcagcagagctggaacaccccttggacattcggccagggcaccaagctggaaatcaagagactcgagggacagcctaaggccaatcctaccgtgacactgttccctccaagcagcgaagaactccaggccaacaaggccacacttgtgtgcctgatctccgacttctaccctggggctgtgacagtggcttggaaggccgatggatctcctgtgaaagccggcgtggaaaccaccaagccatccaagcagagcaacaacaaatacgccgccagctcctacctgagcctgacacctgagcagtggaagtcccacagatcctacagctgccaagtgacccacgaaggcagcaccgtggaaaagacagtggcccctacagagtgcagcggatcccccatcaagaccgatgtgattacaatggaccccaaggacaactgctccaaggacgccaacgataccctgctgctccagctgaccaacaccagcgcctactacatgtacgagatcctgctgggcaaggccaccctgtacgccgtgctggtgtctgccctggtgctgatggctatggtcaagcggaaggacagccggggaagggccaagcgatctggatctggagcaacaaacttctcactactcaaacaagcaggtgacgtggaggagaatcccgggcctactagtatggactggatttggcgcatccttttccttgtcggcgctgctaccggcgcgcattccttcgaacaagttcagcttcaacagcctggcgctgagctggtcaaacctggcgcttctgtgaagatgagctgcaaagccagcggctacgccttcagcagctactggatcaactggatgaagcagaaacccggccagggactcgaatggatcggccaaatctatcccggcgacggcgacaccaactacaacggcaagttcaagggcagagccacactgaccgccgatacctctagcagcacagcctacatgcagctgagcagcctgaccagcgaagatagcgccgtgtacttctgtgcccggtccatcacaacagtcgtgggctgcgctatggactattggggccagggaacaagcgtgaccgtgtctagtacgcgtgcctctacaaagggaccctccgtgtttcctctggctcccagcagcaagtctacaagcggaggaacagccgctctgggctgcctggtcaaggattactttcccgagcctgtgaccgtgtcctggaatagcggagcactgacaagcggcgtgcacacctttccagccgtgctgcaaagcagcggcctgtactctctgagcagcgtggtcacagtgcctagctctagcctgggcacccagacctacatctgcaatgtgaaccacaagcctagcaacaccaaggtggacaagagagtggaacccaagagctgtgaagtgaaaaccgactccaccgaccacgtgaagcccaaagagacagagaacaccaagcagcccagcaagagctgccacaagcccaaggccatcgtgcacaccgagaaagtgaacatgatgagcctgaccgtgctgggcctgcggatgctgttcgccaaaaccgtggccgtgaacttcctgctgaccgccaagctgttcttcctccgcgccaagagaagcggatctggcgtgaagcagaccctgaatttcgacctgctgaagctggctggcgacgtggaatccaacccaggcccttctagaggccatatgaccgagtacaagcccacggtgcgcctcgccacccgcgacgacgtccccagggccgtacgcaccctcgccgccgcgttcgccgactaccccgccacgcgccacaccgtcgatccggaccgccacatcgagcgggtcaccgagctgcaagaactcttcctcacgcgcgtcgggctcgacatcggcaaggtgtgggtcgcggacgacggcgccgcggtggcggtctggaccacgccggagagcgtcgaagcgggggcggtgttcgccgagatcggcccgcgcatggccgagttgagcggttcccggctggccgcgcagcaacagatggaaggcctcctggcgccgcaccggcccaaggagcccgcgtggttcctggccaccgtcggcgtctcgcccgaccaccagggcaagggtctgggcagcgccgtcgtgctccccggagtggaggcggccgagcgcgccggggtgcccgccttcctggagacctccgcgccccgcaacctccccttctacgagcggctcggcttcaccgtcaccgccgacgtcgaggtgcccgaaggaccgcgcacctggtgcatgacccgcaagcccggtgcctga

SEQ ID NO: 40494 - DNA, 2655 bp, synthetic construct
  source 1..2655: mol_type = other DNA
atggccttaccagtgaccgccttgctcctgccgctggccttgctgctccacgccgccaggccggacatccagatgacacagagccctagcagcctgtctgccagcgtgggagacagagtgaccatcacatgcaaggccagcgaccacatcaacaactggctggcctggtatcagcagaagcctggacaggcccctaagctgctgatctacggcgctaccacactggaaacaggcgtgcccagcagattttctggcagcggctctggcaccgactacaccctgacaatatccagcctccagcctgaggacttcgccacctactactgtcagcagagctggaacaccccttggacattcggccagggcaccaagctggaaatcaagagactcgagggacagcctaaggccaatcctaccgtgacactgttccctccaagcagcgaagaactccaggccaacaaggccacacttgtgtgcctgatctccgacttctaccctggggctgtgacagtggcttggaaggccgatggatctcctgtgaaagccggcgtggaaaccaccaagccatccaagcagagcaacaacaaatacgccgccagctcctacctgagcctgacacctgagcagtggaagtcccacagatcctacagctgccaagtgacccacgaaggcagcaccgtggaaaagacagtggcccctacagagtgcagcggatcccccatcaagaccgatgtgattacaatggaccccaaggacaactgctccaaggacgccaacgataccctgctgctccagctgaccaacaccagcgccaccatcctgtacgagatcctgctgggcaaggccaccctgtacgccgtgctggtgtctgccctggtgctgatggctatggtcaagcggaaggacagccggggaagggccaagcgatctggatctggagcaacaaacttctcactactcaaacaagcaggtgacgtggaggagaatcccgggcctactagtatggactggatttggcgcatccttttccttgtcggcgctgctaccggcgcgcattccttcgaacaagttcagcttcaacagcctggcgctgagctggtcaaacctggcgcttctgtgaagatgagctgcaaagccagcggctacgccttcagcagctactggatcaactggatgaagcagaaacccggccagggactcgaatggatcggccaaatctatcccggcgacggcgacaccaactacaacggcaagttcaagggcagagccacactgaccgccgatacctctagcagcacagcctacatgcagctgagcagcctgaccagcgaagatagcgccgtgtacttctgtgcccggtccatcacaacagtcgtgggctgcgctatggactattggggccagggaacaagcgtgaccgtgtctagtacgcgtgcctctacaaagggaccctccgtgtttcctctggctcccagcagcaagtctacaagcggaggaacagccgctctgggctgcctggtcaaggattactttcccgagcctgtgaccgtgtcctggaatagcggagcactgacaagcggcgtgcacacctttccagccgtgctgcaaagcagcggcctgtactctctgagcagcgtggtcacagtgcctagctctagcctgggcacccagacctacatctgcaatgtgaaccacaagcctagcaacaccaaggtggacaagagagtggaacccaagagctgtggtaccgaagtgaaaaccgactccaccgaccacgtgaagcccaaagagacagagaacaccaagcagcccagcaagagctgccacaagcccaaggccatcgtgcacaccgagaaagtgaacatgatgagcctgaccgtgctgggcttcagaatcctgctgctgaaagtggccggctttaacctgctgatgaccctgcggctgtggtccagccgcgccaagagaagcggatctggcgtgaagcagaccctgaatttcgacctgctgaagctggctggcgacgtggaatccaacccaggcccttctagaggccatatgaccgagtacaagcccacggtgcgcctcgccacccgcgacgacgtccccagggccgtacgcaccctcgccgccgcgttcgccgactaccccgccacgcgccacaccgtcgatccggaccgccacatcgagcgggtcaccgagctgcaagaactcttcctcacgcgcgtcgggctcgacatcggcaaggtgtgggtcgcggacgacggcgccgcggtggcggtctggaccacgccggagagcgtcgaagcgggggcggtgttcgccgagatcggcccgcgcatggccgagttgagcggttcccggctggccgcgcagcaacagatggaaggcctcctggcgccgcaccggcccaaggagcccgcgtggttcctggccaccgtcggcgtctcgcccgaccaccagggcaagggtctgggcagcgccgtcgtgctccccggagtggaggcggccgagcgcgccggggtgcccgccttcctggagacctccgcgccccgcaacctccccttctacgagcggctcggcttcaccgtcaccgccgacgtcgaggtgcccgaaggaccgcgcacctggtgcatgacccgcaagcccggtgcctga

SEQ ID NO: 40495 - DNA, 2655 bp, synthetic construct
  source 1..2655: mol_type = other DNA
atggccttaccagtgaccgccttgctcctgccgctggccttgctgctccacgccgccaggccggacatccagatgacacagagccctagcagcctgtctgccagcgtgggagacagagtgaccatcacatgcaaggccagcgaccacatcaacaactggctggcctggtatcagcagaagcctggacaggcccctaagctgctgatctacggcgctaccacactggaaacaggcgtgcccagcagattttctggcagcggctctggcaccgactacaccctgacaatatccagcctccagcctgaggacttcgccacctactactgtcagcagagctggaacaccccttggacattcggccagggcaccaagctggaaatcaagagactcgagggacagcctaaggccaatcctaccgtgacactgttccctccaagcagcgaagaactccaggccaacaaggccacacttgtgtgcctgatctccgacttctaccctggggctgtgacagtggcttggaaggccgatggatctcctgtgaaagccggcgtggaaaccaccaagccatccaagcagagcaacaacaaatacgccgccagctcctacctgagcctgacacctgagcagtggaagtcccacagatcctacagctgccaagtgacccacgaaggcagcaccgtggaaaagacagtggcccctacagagtgcagcggatcccccatcaagaccgatgtgattacaatggaccccaaggacaactgctccaaggacgccaacgataccctgctgctccagctgaccaacaccagcgccaccatcctgtacgagatcctgctgggcaaggccaccctgtacgccgtgctggtgtctgccctggtgctgatggctatggtcaagcggaaggacagccggggaagggccaagcgatctggatctggagcaacaaacttctcactactcaaacaagcaggtgacgtggaggagaatcccgggcctactagtatggactggatttggcgcatccttttccttgtcggcgctgctaccggcgcgcattccttcgaacaagttcagcttcaacagcctggcgctgagctggtcaaacctggcgcttctgtgaagatgagctgcaaagccagcggctacgccttcagcagctactggatcaactggatgaagcagaaacccggccagggactcgaatggatcggccaaatctatcccggcgacggcgacaccaactacaacggcaagttcaagggcagagccacactgaccgccgatacctctagcagcacagcctacatgcagctgagcagcctgaccagcgaagatagcgccgtgtacttctgtgcccggtccatcacaacagtcgtgggctgcgctatggactattggggccagggaacaagcgtgaccgtgtctagtacgcgtgcctctacaaagggaccctccgtgtttcctctggctcccagcagcaagtctacaagcggaggaacagccgctctgggctgcctggtcaaggattactttcccgagcctgtgaccgtgtcctggaatagcggagcactgacaagcggcgtgcacacctttccagccgtgctgcaaagcagcggcctgtactctctgagcagcgtggtcacagtgcctagctctagcctgggcacccagacctacatctgcaatgtgaaccacaagcctagcaacaccaaggtggacaagagagtggaacccaagagctgtggtaccgaagtgaaaaccgactccaccgaccacgtgaagcccaaagagacagagaacaccaagcagcccagcaagagctgccacaagcccaaggccatcgtgcacaccgagaaagtgaacatgatgagcctgaccgtgatcggcttcagaatcctgctgctgaaagtggccggctttaacctgctgatgaccctgcggctgtggtccagccgcgccaagagaagcggatctggcgtgaagcagaccctgaatttcgacctgctgaagctggctggcgacgtggaatccaacccaggcccttctagaggccatatgaccgagtacaagcccacggtgcgcctcgccacccgcgacgacgtccccagggccgtacgcaccctcgccgccgcgttcgccgactaccccgccacgcgccacaccgtcgatccggaccgccacatcgagcgggtcaccgagctgcaagaactcttcctcacgcgcgtcgggctcgacatcggcaaggtgtgggtcgcggacgacggcgccgcggtggcggtctggaccacgccggagagcgtcgaagcgggggcggtgttcgccgagatcggcccgcgcatggccgagttgagcggttcccggctggccgcgcagcaacagatggaaggcctcctggcgccgcaccggcccaaggagcccgcgtggttcctggccaccgtcggcgtctcgcccgaccaccagggcaagggtctgggcagcgccgtcgtgctccccggagtggaggcggccgagcgcgccggggtgcccgccttcctggagacctccgcgccccgcaacctccccttctacgagcggctcggcttcaccgtcaccgccgacgtcgaggtgcccgaaggaccgcgcacctggtgcatgacccgcaagcccggtgcctga

SEQ ID NO: 40496 - DNA, 2625 bp, synthetic construct
  source 1..2625: mol_type = other DNA
atggccttaccagtgaccgccttgctcctgccgctggccttgctgctccacgccgccaggccggacatccagatgacacagagccctagcagcctgtctgccagcgtgggagacagagtgaccatcacatgcaaggccagcgaccacatcaacaactggctggcctggtatcagcagaagcctggacaggcccctaagctgctgatctacggcgctaccacactggaaacaggcgtgcccagcagattttctggcagcggctctggcaccgactacaccctgacaatatccagcctccagcctgaggacttcgccacctactactgtcagcagagctggaacaccccttggacattcggccagggcaccaagctggaaatcaagagactcgagggacagcctaaggccaatcctaccgtgacactgttccctccaagcagcgaagaactccaggccaacaaggccacacttgtgtgcctgatctccgacttctaccctggggctgtgacagtggcttggaaggccgatggatctcctgtgaaagccggcgtggaaaccaccaagccatccaagcagagcaacaacaaatacgccgccagctcctacctgagcctgacacctgagcagtggaagtcccacagatcctacagctgccaagtgacccacgaaggcagcaccgtggaaaagacagtggcccctacagagtgcagcggatcccccatcaagaccgatgtgattacaatggaccccaaggacaactgctccaaggacgccaacgataccctgctgctccagctgaccaacaccagcgccaccatcctgtacgagatcctgctgggcaaggccaccctgtacgccgtgctggtgtctgccctggtgctgatggctatggtcaagcggaaggacagccggggaagggccaagcgatctggatctggagcaacaaacttctcactactcaaacaagcaggtgacgtggaggagaatcccgggcctactagtatggactggatttggcgcatccttttccttgtcggcgctgctaccggcgcgcattccttcgaacaagttcagcttcaacagcctggcgctgagctggtcaaacctggcgcttctgtgaagatgagctgcaaagccagcggctacgccttcagcagctactggatcaactggatgaagcagaaacccggccagggactcgaatggatcggccaaatctatcccggcgacggcgacaccaactacaacggcaagttcaagggcagagccacactgaccgccgatacctctagcagcacagcctacatgcagctgagcagcctgaccagcgaagatagcgccgtgtacttctgtgcccggtccatcacaacagtcgtgggctgcgctatggactattggggccagggaacaagcgtgaccgtgtctagtacgcgtgcctctacaaagggaccctccgtgtttcctctggctcccagcagcaagtctacaagcggaggaacagccgctctgggctgcctggtcaaggattactttcccgagcctgtgaccgtgtcctggaatagcggagcactgacaagcggcgtgcacacctttccagccgtgctgcaaagcagcggcctgtactctctgagcagcgtggtcacagtgcctagctctagcctgggcacccagacctacatctgcaatgtgaaccacaagcctagcaacaccaaggtggacaagagagtggaacccaagagctgtatccccgaggacacattcttcccaagccccgagagcagctgcgacgtgaagctggtggaaaagagcttcgagacagacaccaacctgaacttccagaacctgagcgtgatcggcttcagaatcctgctgctgaaagtggccggctttaacctgctgatgaccctgcggctgtggtccagccgcgccaagagaagcggatctggcgtgaagcagaccctgaatttcgacctgctgaagctggctggcgacgtggaatccaacccaggcccttctagaggccatatgaccgagtacaagcccacggtgcgcctcgccacccgcgacgacgtccccagggccgtacgcaccctcgccgccgcgttcgccgactaccccgccacgcgccacaccgtcgatccggaccgccacatcgagcgggtcaccgagctgcaagaactcttcctcacgcgcgtcgggctcgacatcggcaaggtgtgggtcgcggacgacggcgccgcggtggcggtctggaccacgccggagagcgtcgaagcgggggcggtgttcgccgagatcggcccgcgcatggccgagttgagcggttcccggctggccgcgcagcaacagatggaaggcctcctggcgccgcaccggcccaaggagcccgcgtggttcctggccaccgtcggcgtctcgcccgaccaccagggcaagggtctgggcagcgccgtcgtgctccccggagtggaggcggccgagcgcgccggggtgcccgccttcctggagacctccgcgccccgcaacctccccttctacgagcggctcggcttcaccgtcaccgccgacgtcgaggtgcccgaaggaccgcgcacctggtgcatgacccgcaagcccggtgcctga

SEQ ID NO: 40497 - DNA, 2649 bp, synthetic construct
  source 1..2649: mol_type = other DNA
atggccttaccagtgaccgccttgctcctgccgctggccttgctgctccacgccgccaggccggacatccagatgacacagagccctagcagcctgtctgccagcgtgggagacagagtgaccatcacatgcaaggccagcgaccacatcaacaactggctggcctggtatcagcagaagcctggacaggcccctaagctgctgatctacggcgctaccacactggaaacaggcgtgcccagcagattttctggcagcggctctggcaccgactacaccctgacaatatccagcctccagcctgaggacttcgccacctactactgtcagcagagctggaacaccccttggacattcggccagggcaccaagctggaaatcaagagactcgagggacagcctaaggccaatcctaccgtgacactgttccctccaagcagcgaagaactccaggccaacaaggccacacttgtgtgcctgatctccgacttctaccctggggctgtgacagtggcttggaaggccgatggatctcctgtgaaagccggcgtggaaaccaccaagccatccaagcagagcaacaacaaatacgccgccagctcctacctgagcctgacacctgagcagtggaagtcccacagatcctacagctgccaagtgacccacgaaggcagcaccgtggaaaagacagtggcccctacagagtgcagcggatcccccatcaagaccgatgtgattacaatggaccccaaggacaactgctccaaggacgccaacgataccctgctgctccagctgaccaacaccagcgccaccatcctgtacgagatcctgctgggcaaggccaccctgtacgccgtgctggtgtctgccctggtgctgatggctatggtcaagcggaaggacagccggggaagggccaagcgatctggatctggagcaacaaacttctcactactcaaacaagcaggtgacgtggaggagaatcccgggcctactagtatggactggatttggcgcatccttttccttgtcggcgctgctaccggcgcgcattccttcgaacaagttcagcttcaacagcctggcgctgagctggtcaaacctggcgcttctgtgaagatgagctgcaaagccagcggctacgccttcagcagctactggatcaactggatgaagcagaaacccggccagggactcgaatggatcggccaaatctatcccggcgacggcgacaccaactacaacggcaagttcaagggcagagccacactgaccgccgatacctctagcagcacagcctacatgcagctgagcagcctgaccagcgaagatagcgccgtgtacttctgtgcccggtccatcacaacagtcgtgggctgcgctatggactattggggccagggaacaagcgtgaccgtgtctagtacgcgtgcctctacaaagggaccctccgtgtttcctctggctcccagcagcaagtctacaagcggaggaacagccgctctgggctgcctggtcaaggattactttcccgagcctgtgaccgtgtcctggaatagcggagcactgacaagcggcgtgcacacctttccagccgtgctgcaaagcagcggcctgtactctctgagcagcgtggtcacagtgcctagctctagcctgggcacccagacctacatctgcaatgtgaaccacaagcctagcaacaccaaggtggacaagagagtggaacccaagagctgtgaagtgaaaaccgactccaccgaccacgtgaagcccaaagagacagagaacaccaagcagcccagcaagagctgccacaagcccaaggccatcgtgcacaccgagaaagtgaacatgatgagcctgaccgtgctgggcctgcggatgctgttcgccaaaaccgtggccgtgaacttcctgctgaccgccaagctgttcttcctccgcgccaagagaagcggatctggcgtgaagcagaccctgaatttcgacctgctgaagctggctggcgacgtggaatccaacccaggcccttctagaggccatatgaccgagtacaagcccacggtgcgcctcgccacccgcgacgacgtccccagggccgtacgcaccctcgccgccgcgttcgccgactaccccgccacgcgccacaccgtcgatccggaccgccacatcgagcgggtcaccgagctgcaagaactcttcctcacgcgcgtcgggctcgacatcggcaaggtgtgggtcgcggacgacggcgccgcggtggcggtctggaccacgccggagagcgtcgaagcgggggcggtgttcgccgagatcggcccgcgcatggccgagttgagcggttcccggctggccgcgcagcaacagatggaaggcctcctggcgccgcaccggcccaaggagcccgcgtggttcctggccaccgtcggcgtctcgcccgaccaccagggcaagggtctgggcagcgccgtcgtgctccccggagtggaggcggccgagcgcgccggggtgcccgccttcctggagacctccgcgccccgcaacctccccttctacgagcggctcggcttcaccgtcaccgccgacgtcgaggtgcccgaaggaccgcgcacctggtgcatgacccgcaagcccggtgcctga

SEQ ID NO: 40498 - DNA, 2658 bp, synthetic construct
  source 1..2658: mol_type = other DNA
atggccttaccagtgaccgccttgctcctgccgctggccttgctgctccacgccgccaggccggacatccagatgacacagagccctagcagcctgtctgccagcgtgggagacagagtgaccatcacatgcaaggccagcgaccacatcaacaactggctggcctggtatcagcagaagcctggacaggcccctaagctgctgatctacggcgctaccacactggaaacaggcgtgcccagcagattttctggcagcggctctggcaccgactacaccctgacaatatccagcctccagcctgaggacttcgccacctactactgtcagcagagctggaacaccccttggacattcggccagggcaccaagctggaaatcaagagactcgagggacagcctaaggccaatcctaccgtgacactgttccctccaagcagcgaagaactccaggccaacaaggccacacttgtgtgcctgatctccgacttctaccctggggctgtgacagtggcttggaaggccgatggatctcctgtgaaagccggcgtggaaaccaccaagccatccaagcagagcaacaacaaatacgccgccagctcctacctgagcctgacacctgagcagtggaagtcccacagatcctacagctgccaagtgacccacgaaggcagcaccgtggaaaagacagtggcccctacagagtgcagcggatcccccatcaagaccgatgtgattacaatggaccccaaggacaactgctccaaggacgccaacgataccctgctgctccagctgaccaacaccagcgcctactacacatacctgctgctgctcctcaagagcgtgatctacctggccatcatcagcttcagcctgctgcggagaacaagcgtgtgcggcaacgagaagaagtccagggccaagcgatctggatctggagcaacaaacttctcactactcaaacaagcaggtgacgtggaggagaatcccgggcctactagtatggactggatttggcgcatccttttccttgtcggcgctgctaccggcgcgcattccttcgaacaagttcagcttcaacagcctggcgctgagctggtcaaacctggcgcttctgtgaagatgagctgcaaagccagcggctacgccttcagcagctactggatcaactggatgaagcagaaacccggccagggactcgaatggatcggccaaatctatcccggcgacggcgacaccaactacaacggcaagttcaagggcagagccacactgaccgccgatacctctagcagcacagcctacatgcagctgagcagcctgaccagcgaagatagcgccgtgtacttctgtgcccggtccatcacaacagtcgtgggctgcgctatggactattggggccagggaacaagcgtgaccgtgtctagtacgcgtgcctctacaaagggaccctccgtgtttcctctggctcccagcagcaagtctacaagcggaggaacagccgctctgggctgcctggtcaaggattactttcccgagcctgtgaccgtgtcctggaatagcggagcactgacaagcggcgtgcacacctttccagccgtgctgcaaagcagcggcctgtactctctgagcagcgtggtcacagtgcctagctctagcctgggcacccagacctacatctgcaatgtgaaccacaagcctagcaacaccaaggtggacaagagagtggaacccaagagctgtggtaccgaagtgaaaaccgactccaccgaccacgtgaagcccaaagagacagagaacaccaagcagcccagcaagagctgccacaagcccaaggccatcgtgcacaccgagaaagtgaacatgatgagcctgaccgtgctgggcttcagaatcctgctgctgaaagtggccggctttaacctgctgatgaccctgcggctgtggtccagccgcgccaagagaagcggatctggcgtgaagcagaccctgaatttcgacctgctgaagctggctggcgacgtggaatccaacccaggcccttctagaggccatatgaccgagtacaagcccacggtgcgcctcgccacccgcgacgacgtccccagggccgtacgcaccctcgccgccgcgttcgccgactaccccgccacgcgccacaccgtcgatccggaccgccacatcgagcgggtcaccgagctgcaagaactcttcctcacgcgcgtcgggctcgacatcggcaaggtgtgggtcgcggacgacggcgccgcggtggcggtctggaccacgccggagagcgtcgaagcgggggcggtgttcgccgagatcggcccgcgcatggccgagttgagcggttcccggctggccgcgcagcaacagatggaaggcctcctggcgccgcaccggcccaaggagcccgcgtggttcctggccaccgtcggcgtctcgcccgaccaccagggcaagggtctgggcagcgccgtcgtgctccccggagtggaggcggccgagcgcgccggggtgcccgccttcctggagacctccgcgccccgcaacctccccttctacgagcggctcggcttcaccgtcaccgccgacgtcgaggtgcccgaaggaccgcgcacctggtgcatgacccgcaagcccggtgcctga

SEQ ID NO: 40499 - DNA, 2658 bp, synthetic construct
  source 1..2658: mol_type = other DNA
atggccttaccagtgaccgccttgctcctgccgctggccttgctgctccacgccgccaggccggacatccagatgacacagagccctagcagcctgtctgccagcgtgggagacagagtgaccatcacatgcaaggccagcgaccacatcaacaactggctggcctggtatcagcagaagcctggacaggcccctaagctgctgatctacggcgctaccacactggaaacaggcgtgcccagcagattttctggcagcggctctggcaccgactacaccctgacaatatccagcctccagcctgaggacttcgccacctactactgtcagcagagctggaacaccccttggacattcggccagggcaccaagctggaaatcaagagactcgagggacagcctaaggccaatcctaccgtgacactgttccctccaagcagcgaagaactccaggccaacaaggccacacttgtgtgcctgatctccgacttctaccctggggctgtgacagtggcttggaaggccgatggatctcctgtgaaagccggcgtggaaaccaccaagccatccaagcagagcaacaacaaatacgccgccagctcctacctgagcctgacacctgagcagtggaagtcccacagatcctacagctgccaagtgacccacgaaggcagcaccgtggaaaagacagtggcccctacagagtgcagcggatcccccatcaagaccgatgtgattacaatggaccccaaggacaactgctccaaggacgccaacgataccctgctgctccagctgaccaacaccagcgcctactacacatacctgctgctgctcctcaagagcgtgatctacctggccatcatcagcttcagcctgctgcggagaacaagcgtgtgcggcaacgagaagaagtccagggccaagcgatctggatctggagcaacaaacttctcactactcaaacaagcaggtgacgtggaggagaatcccgggcctactagtatggactggatttggcgcatccttttccttgtcggcgctgctaccggcgcgcattccttcgaacaagttcagcttcaacagcctggcgctgagctggtcaaacctggcgcttctgtgaagatgagctgcaaagccagcggctacgccttcagcagctactggatcaactggatgaagcagaaacccggccagggactcgaatggatcggccaaatctatcccggcgacggcgacaccaactacaacggcaagttcaagggcagagccacactgaccgccgatacctctagcagcacagcctacatgcagctgagcagcctgaccagcgaagatagcgccgtgtacttctgtgcccggtccatcacaacagtcgtgggctgcgctatggactattggggccagggaacaagcgtgaccgtgtctagtacgcgtgcctctacaaagggaccctccgtgtttcctctggctcccagcagcaagtctacaagcggaggaacagccgctctgggctgcctggtcaaggattactttcccgagcctgtgaccgtgtcctggaatagcggagcactgacaagcggcgtgcacacctttccagccgtgctgcaaagcagcggcctgtactctctgagcagcgtggtcacagtgcctagctctagcctgggcacccagacctacatctgcaatgtgaaccacaagcctagcaacaccaaggtggacaagagagtggaacccaagagctgtggtaccgaagtgaaaaccgactccaccgaccacgtgaagcccaaagagacagagaacaccaagcagcccagcaagagctgccacaagcccaaggccatcgtgcacaccgagaaagtgaacatgatgagcctgaccgtgatcggcttcagaatcctgctgctgaaagtggccggctttaacctgctgatgaccctgcggctgtggtccagccgcgccaagagaagcggatctggcgtgaagcagaccctgaatttcgacctgctgaagctggctggcgacgtggaatccaacccaggcccttctagaggccatatgaccgagtacaagcccacggtgcgcctcgccacccgcgacgacgtccccagggccgtacgcaccctcgccgccgcgttcgccgactaccccgccacgcgccacaccgtcgatccggaccgccacatcgagcgggtcaccgagctgcaagaactcttcctcacgcgcgtcgggctcgacatcggcaaggtgtgggtcgcggacgacggcgccgcggtggcggtctggaccacgccggagagcgtcgaagcgggggcggtgttcgccgagatcggcccgcgcatggccgagttgagcggttcccggctggccgcgcagcaacagatggaaggcctcctggcgccgcaccggcccaaggagcccgcgtggttcctggccaccgtcggcgtctcgcccgaccaccagggcaagggtctgggcagcgccgtcgtgctccccggagtggaggcggccgagcgcgccggggtgcccgccttcctggagacctccgcgccccgcaacctccccttctacgagcggctcggcttcaccgtcaccgccgacgtcgaggtgcccgaaggaccgcgcacctggtgcatgacccgcaagcccggtgcctga

SEQ ID NO: 40500 - DNA, 2652 bp, synthetic construct
  source 1..2652: mol_type = other DNA
atggccttaccagtgaccgccttgctcctgccgctggccttgctgctccacgccgccaggccggacatccagatgacacagagccctagcagcctgtctgccagcgtgggagacagagtgaccatcacatgcaaggccagcgaccacatcaacaactggctggcctggtatcagcagaagcctggacaggcccctaagctgctgatctacggcgctaccacactggaaacaggcgtgcccagcagattttctggcagcggctctggcaccgactacaccctgacaatatccagcctccagcctgaggacttcgccacctactactgtcagcagagctggaacaccccttggacattcggccagggcaccaagctggaaatcaagagactcgagggacagcctaaggccaatcctaccgtgacactgttccctccaagcagcgaagaactccaggccaacaaggccacacttgtgtgcctgatctccgacttctaccctggggctgtgacagtggcttggaaggccgatggatctcctgtgaaagccggcgtggaaaccaccaagccatccaagcagagcaacaacaaatacgccgccagctcctacctgagcctgacacctgagcagtggaagtcccacagatcctacagctgccaagtgacccacgaaggcagcaccgtggaaaagacagtggcccctacagagtgcagcggatcccccatcaagaccgatgtgattacaatggaccccaaggacaactgctccaaggacgccaacgataccctgctgctccagctgaccaacaccagcgcctactacacatacctgctgctgctcctcaagagcgtgatctacctggccatcatcagcttcagcctgctgcggagaacaagcgtgtgcggcaacgagaagaagtccagggccaagcgatctggatctggagcaacaaacttctcactactcaaacaagcaggtgacgtggaggagaatcccgggcctactagtatggactggatttggcgcatccttttccttgtcggcgctgctaccggcgcgcattccttcgaacaagttcagcttcaacagcctggcgctgagctggtcaaacctggcgcttctgtgaagatgagctgcaaagccagcggctacgccttcagcagctactggatcaactggatgaagcagaaacccggccagggactcgaatggatcggccaaatctatcccggcgacggcgacaccaactacaacggcaagttcaagggcagagccacactgaccgccgatacctctagcagcacagcctacatgcagctgagcagcctgaccagcgaagatagcgccgtgtacttctgtgcccggtccatcacaacagtcgtgggctgcgctatggactattggggccagggaacaagcgtgaccgtgtctagtacgcgtgcctctacaaagggaccctccgtgtttcctctggctcccagcagcaagtctacaagcggaggaacagccgctctgggctgcctggtcaaggattactttcccgagcctgtgaccgtgtcctggaatagcggagcactgacaagcggcgtgcacacctttccagccgtgctgcaaagcagcggcctgtactctctgagcagcgtggtcacagtgcctagctctagcctgggcacccagacctacatctgcaatgtgaaccacaagcctagcaacaccaaggtggacaagagagtggaacccaagagctgtgaagtgaaaaccgactccaccgaccacgtgaagcccaaagagacagagaacaccaagcagcccagcaagagctgccacaagcccaaggccatcgtgcacaccgagaaagtgaacatgatgagcctgaccgtgctgggcctgcggatgctgttcgccaaaaccgtggccgtgaacttcctgctgaccgccaagctgttcttcctccgcgccaagagaagcggatctggcgtgaagcagaccctgaatttcgacctgctgaagctggctggcgacgtggaatccaacccaggcccttctagaggccatatgaccgagtacaagcccacggtgcgcctcgccacccgcgacgacgtccccagggccgtacgcaccctcgccgccgcgttcgccgactaccccgccacgcgccacaccgtcgatccggaccgccacatcgagcgggtcaccgagctgcaagaactcttcctcacgcgcgtcgggctcgacatcggcaaggtgtgggtcgcggacgacggcgccgcggtggcggtctggaccacgccggagagcgtcgaagcgggggcggtgttcgccgagatcggcccgcgcatggccgagttgagcggttcccggctggccgcgcagcaacagatggaaggcctcctggcgccgcaccggcccaaggagcccgcgtggttcctggccaccgtcggcgtctcgcccgaccaccagggcaagggtctgggcagcgccgtcgtgctccccggagtggaggcggccgagcgcgccggggtgcccgccttcctggagacctccgcgccccgcaacctccccttctacgagcggctcggcttcaccgtcaccgccgacgtcgaggtgcccgaaggaccgcgcacctggtgcatgacccgcaagcccggtgcctga

SEQ ID NO: 40501 - DNA, 2550 bp, synthetic construct
  source 1..2550: mol_type = other DNA
atgggcttcagactgctgtgctgcgtggccttctgtctgcttggagctggccctgtggatagcggcgttacccagacacctaagcacctgattacagccaccggccagcgcgtgaccctgagatgttctcctagaagcggcgagctgagcgtgtactggtatcagcagagcctggaccagggcctccagttcatgatccagtattacaacggcgaggaaagagccaagggcaacatcctggaacggttcagcgcccagcagttccctgatctgcacagcgagctgaacctgagcagcctggaactgggagatagcgccctgtacttctgtgccagcagcacacacagaggccagaccaactacggctacacctttggcagcggcaccagactgaccgtgctcgaggacctgaagaacgtgttcccacctgaggtggccgtgttcgagcctagcgaggccgagatcagccacacccagaaagccaccctcgtgtgcctggctaccggcttctaccccgaccatgtggaactgtcttggtgggtcaacggcaaagaggtgcacagcggcgtgtgtaccgacccccagccactgaaagaacagcccgccctgaacgacagccggtactgcctgagcagcagactgagagtgtccgccaccttctggcagaacccccggaaccacttcagatgccaggtgcagttctacggcctgagcgagaacgacgagtggacccaggacagagccaagcccgtgacccagatcgtgtctgccgaagcctggggcagagccgattgcggctttaccagcgagagctaccagcagggcgtgctgagcgccaccatcctgtacgagatcctgctgggcaaggccaccctgtacgccgtgctggtgtctgccctggtgctgatggctatggtcaagcggaaggacagccggggaagggccaagcgatctggatctggagcaacaaacttctcactactcaaacaagcaggtgacgtggaggagaatcccgggcctactagtatggactggatttggcgcatccttttccttgtcggcgctgctaccggcgcgcattccttcgaagaggatcaagtgacacagagccccgaggcactgagactgcaagagggcgaaagcagcagcctgaactgctcctacacagtgtccggcctgaggggcctgttctggtatagacaggaccctggcaagggacccgagttcctgttcacactgtactctgccggcgaggaaaaagagaaagagcgcctgaaggccacactgaccaagaaagagagcttcctgcacatcacagcccctaagcctgaggacagcgccacatatctgtgtgccgtgcactctacagcccaggctggaacagccctgatcttcggcaagggcacaacactgagcgtgtccacgcgtatccagaaccctgatcctgccgtgtaccagctgcgggatagcaagagcagcgacaagagcgtgtgtctgttcaccgacttcgacagccagaccaacgtgtcccagagcaaggactccgacgtgtacatcaccgataagtgcgtgctggacatgcggagcatggacttcaagagcaactccgccgtggcctggtccaacaagtccgatttcgcctgcgccaacgccttcaacaacagcattatccccgaggacacattcttcccaagccccgagagcagctgcgacgtgaagctggtggaaaagagcttcgagacagacaccaacctgaacttccagaacctgagcgtgatcggcttcagaatcctgctgctgaaagtggccggctttaacctgctgatgaccctgcggctgtggtccagccgcgccaagagaagcggatctggcgtgaagcagaccctgaatttcgacctgctgaagctggctggcgacgtggaatccaacccaggcccttctagaggccatatgaccgagtacaagcccacggtgcgcctcgccacccgcgacgacgtccccagggccgtacgcaccctcgccgccgcgttcgccgactaccccgccacgcgccacaccgtcgatccggaccgccacatcgagcgggtcaccgagctgcaagaactcttcctcacgcgcgtcgggctcgacatcggcaaggtgtgggtcgcggacgacggcgccgcggtggcggtctggaccacgccggagagcgtcgaagcgggggcggtgttcgccgagatcggcccgcgcatggccgagttgagcggttcccggctggccgcgcagcaacagatggaaggcctcctggcgccgcaccggcccaaggagcccgcgtggttcctggccaccgtcggcgtctcgcccgaccaccagggcaagggtctgggcagcgccgtcgtgctccccggagtggaggcggccgagcgcgccggggtgcccgccttcctggagacctccgcgccccgcaacctccccttctacgagcggctcggcttcaccgtcaccgccgacgtcgaggtgcccgaaggaccgcgcacctggtgcatgacccgcaagcccggtgcctga

SEQ ID NO: 40502 - DNA, 1872 bp, synthetic construct
  source 1..1872: mol_type = other DNA
atggccttaccagtgaccgccttgctcctgccgctggccttgctgctccacgccgccaggccggacgacatccagttgacccagtcccccagctcactcagcgccagtgtgggggaccgggtgaccattacctgtaaagccagtcagagtgtggactatgagggggatagcttcctgaattggtatcagcagaagcctggcaaagccccaaagctgctgatctacgctgcatctaatctggagtcaggcgtgccttctaggttctccggtagtgggtctgggaccgatttcacattgaccatttcatccctccaacccgaggatttcgctacatattactgtcagcagtccaatgaggaccctctcacctttggccagggcaccaaagttgaaattaagagactcgaggacctgaagaacgtgttcccacctgaggtggccgtgttcgagcctagcgaggccgagatcagccacacccagaaagccaccctcgtgtgcctggctaccggcttctaccccgaccatgtggaactgtcttggtgggtcaacggcaaagaggtgcacagcggcgtgtgtaccgacccccagccactgaaagaacagcccgccctgaacgacagccggtactgcctgagcagcagactgagagtgtccgccaccttctggcagaacccccggaaccacttcagatgccaggtgcagttctacggcctgagcgagaacgacgagtggacccaggacagagccaagcccgtgacccagatcgtgtctgccgaagcctggggcagagccgattgcggctttaccagcgagagctaccagcagggcgtgctgagcgccaccatcctgtacgagatcctgctgggcaaggccaccctgtacgccgtgctggtgtctgccctggtgctgatggctatggtcaagcggaaggacagccggggaagggccaagcgatctggatctggagcaacaaacttctcactactcaaacaagcaggtgacgtggaggagaatcccgggcctactagtatggactggatttggcgcatccttttccttgtcggcgctgctaccggcgcgcattccttcgaacaggttcagctgcaacagcctggcgctgagcttgtgaaacctggcgcttccgtgaagatgagctgcaaggccagcggctacaccttcaccagctactggatcaactggatgaagcagaaaccaggccagggcctcgaatggatcggacagattcttcctggcggcggagacaccaactacaacggcaagttcaagggcagagccacactgaccgccgatacctctagcagcacagcctacatgcagctgagcagcctgaccagcgaagatagcgccgtgtacttctgcaccagacgggtgcccatcagactggattattggggccagggaaccagcgtgaccgtgtcatctacgcgtatccagaaccctgatcctgccgtgtaccagctgcgggatagcaagagcagcgacaagagcgtgtgtctgttcaccgacttcgacagccagaccaacgtgtcccagagcaaggactccgacgtgtacatcaccgataagtgcgtgctggacatgcggagcatggacttcaagagcaactccgccgtggcctggtccaacaagtccgatttcgcctgcgccaacgccttcaacaacagcattatccccgaggacacattcttcccaagccccgagagcagctgcgacgtgaagctggtggaaaagagcttcgagacagacaccaacctgaacttccagaacctgagcgtgatcggcttcagaatcctgctgctgaaagtggccggctttaacctgctgatgaccctgcggctgtggtccagctaa

SEQ ID NO: 40503 - DNA, 1476 bp, synthetic construct
  source 1..1476: mol_type = other DNA
atggccttaccagtgaccgccttgctcctgccgctggccttgctgctccacgccgccaggccggacgacatccagttgacccagtcccccagctcactcagcgccagtgtgggggaccgggtgaccattacctgtaaagccagtcagagtgtggactatgagggggatagcttcctgaattggtatcagcagaagcctggcaaagccccaaagctgctgatctacgctgcatctaatctggagtcaggcgtgccttctaggttctccggtagtgggtctgggaccgatttcacattgaccatttcatccctccaacccgaggatttcgctacatattactgtcagcagtccaatgaggaccctctcacctttggccagggcaccaaagttgaaattaagagaggcggaggcggaagtggaggcggaggatctggcggcggaggctctcaggttcagctgcaacagcctggcgctgagcttgtgaaacctggcgcttccgtgaagatgagctgcaaggccagcggctacaccttcaccagctactggatcaactggatgaagcagaaaccaggccagggcctcgaatggatcggacagattcttcctggcggcggagacaccaactacaacggcaagttcaagggcagagccacactgaccgccgatacctctagcagcacagcctacatgcagctgagcagcctgaccagcgaagatagcgccgtgtacttctgcaccagacgggtgcccatcagactggattattggggccagggaaccagcgtgaccgtgtcatctacgcgtaccacgacgccagcgccgcgaccaccaacaccggcgcccaccatcgcgtcgcagcccctgtccctgcgcccagaggcgtgccggccagcggcggggggcgcagtgcacacgagggggctggacttcgcctgtgacatctacatctgggcgcccttggccgggacttgtggggtccttctcctgtcactggttatcaccctttactgcaaacggggcagaaagaaactcctgtatatattcaaacaaccatttatgagaccagtacaaactactcaagaggaagatggctgtagctgccgatttccagaagaagaagaaggaggatgtgaactgagagtgaagttcagcaggagcgcagacgcccccgcgtaccagcagggccagaaccagctctataacgagctgaatctaggacgaagagaggagtacgatgttttggacaagagacgtggccgggaccctgagatggggggaaagccgagaaggaagaaccctcaggaaggcctgtacaatgaactgcagaaagataagatggcggaggcctacagtgagattgggatgaaaggcgagcgccggaggggcaaggggcacgatggcctttaccagggtctcagtacagccaccaaggacacctacgacgcccttcacatgcaggccctgccccctcgctga

SEQ ID NO: 40504 - DNA, 1875 bp, synthetic construct
  source 1..1875: mol_type = other DNA
atggccttaccagtgaccgccttgctcctgccgctggccttgctgctccacgccgccaggccggacgacatccagttgacccagtcccccagctcactcagcgccagtgtgggggaccgggtgaccattacctgtaaagccagtcagagtgtggactatgagggggatagcttcctgaattggtatcagcagaagcctggcaaagccccaaagctgctgatctacgctgcatctaatctggagtcaggcgtgccttctaggttctccggtagtgggtctgggaccgatttcacattgaccatttcatccctccaacccgaggatttcgctacatattactgtcagcagtccaatgaggaccctctcacctttggccagggcaccaaagttgaaattaagagactcgaggacctgaagaacgtgttcccacctgaggtggccgtgttcgagcctagcgaggccgagatcagccacacccagaaagccaccctcgtgtgcctggctaccggcttctaccccgaccatgtggaactgtcttggtgggtcaacggcaaagaggtgcacagcggcgtgtgtaccgacccccagccactgaaagaacagcccgccctgaacgacagccggtactgcctgagcagcagactgagagtgtccgccaccttctggcagaacccccggaaccacttcagatgccaggtgcagttctacggcctgagcgagaacgacgagtggacccaggacagagccaagcccgtgacccagatcgtgtctgccgaagcctggggcagagccgattgcggctttaccagcgagagctaccagcagggcgtgctgagcgcctactacatgtacttgttgctgctgctgaagtccgtggtgtacttcgccatcatcacatgctgcctgctgcggagaaccgccttctgctgcaacggcgagaagtctagggccaagcgatctggatctggagcaacaaacttctcactactcaaacaagcaggtgacgtggaggagaatcccgggcctactagtatggactggatttggcgcatccttttccttgtcggcgctgctaccggcgcgcattccttcgaacaagttcagctggttcagagcggagccgaagtgaagaaacctggggcctctgtgaaggtgtcctgcaaagccagcggctacacctttaccagctactggatcaactgggtccgacaggcccctggacaaggactggaatggatgggacagatccttccaggcggaggggacaccaactacaacggcaagttcaagggcagagtgaccatcaccgccgacaccagcacaagcaccgcctacatggaactgagcagcctgagaagcgaggacaccgccgtgtattattgcaccagacgggtgcccatccggctggattattggggacagggaaccctggtcaccgtgtctagtacgcgtatccagaaccctgatcctgccgtgtaccagctgcgggatagcaagagcagcgacaagagcgtgtgtctgttcaccgacttcgacagccagaccaacgtgtcccagagcaaggactccgacgtgtacatcaccgataagtgcgtgctggacatgcggagcatggacttcaagagcaactccgccgtggcctggtccaacaagtccgatttcgcctgcgccaacgccttcaacaacagcattatccccgaggacacattcttcccaagccccgagagcagctgcgacgtgaagctggtggaaaagagcttcgagacagacaccaacctgaacttccagaacctgagcgtgatcggcttcagaatcctgctgctgaaagtggccggctttaacctgctgatgaccctgcggctgtggtccagctaa

SEQ ID NO: 40505 - DNA, 2574 bp, synthetic construct; identical to SEQ ID NO: 40459
  source 1..2574: mol_type = other DNA

SEQ ID NO: 40506 - DNA, 2574 bp, synthetic construct; identical to SEQ ID NO: 40460
  source 1..2574: mol_type = other DNA

SEQ ID NO: 40507 - DNA, 2592 bp, synthetic construct; identical to SEQ ID NO: 40461
  source 1..2592: mol_type = other DNA

SEQ ID NO: 40508 - DNA, 2556 bp, synthetic construct; identical to SEQ ID NO: 40462
  source 1..2556: mol_type = other DNA

SEQ ID NO: 40509 - DNA, 2145 bp, synthetic construct
  source 1..2145: mol_type = other DNA
atggccttaccagtgaccgccttgctcctgccgctggccttgctgctccacgccgccaggccggacatccagttgacccagtcccccagctcactcagcgccagtgtgggggaccgggtgaccattacctgtaaagccagtcagagtgtggactatgacggggatagcttcctgaattggtatcagcagaagcctggcaaagccccaaagctgctgatctacgctgcatctaatctggagtcaggcgtgccttccaggttctccggtagtgggtctgggaccgatttcacattgaccatttcatccctccaacccgaggatttcgctacatattactgtcagcagtccaatgaggaccctctcacctttggccagggcaccaaagttgaaattaagagactcgaggacctgaagaacgtgttcccacctgaggtggccgtgttcgagcctagcgaggccgagatcagccacacccagaaagccaccctcgtgtgcctggctaccggcttctaccccgaccatgtggaactgtcttggtgggtcaacggcaaagaggtgcacagcggcgtgtctaccgacccccagccactgaaagaacagcccgccctgaacgacagccggtactgcctgagcagcagactgagagtgtccgccaccttctggcagaacccccggaaccacttcagatgccaggtgcagttctacggcctgagcgagaacgacgagtggacccaggacagagccaagcccgtgacccagatcgtgtctgccgaagcctggggcagagccgattgcggatcccagagcttcggcctgctggaccccaagctgtgctacctgctggatggcatcctgttcatctacggcgtgatcctgaccgccctgttcctgagagtgaagttcagcagaagcgccgacgcccctgcctaccagcagggacagaaccaactgtacaacgagctgaacctgggcagacgggaagagtacgacgtgctggacaagcggagaggcagggaccctgagatgggcggaaagccccggagaaagaacccccaggaaggactgtataacgaactccagaaagacaagatggccgaagcctacagcgagatcggcatgaagggcgagcggagaagaggcaagggccacgatggcctgtaccagggcctgagcaccgccaccaaggacacctatgacgccctgcacatgcaggccctgcctccaagaagggccaagcgatctggatctggagcaacaaacttctcactactcaaacaagcaggtgacgtggaggagaatcccgggcctactagtatggactggatttggcgcatccttttccttgtcggcgctgctaccggcgcgcattccttcgaagtccaacttgtggagtctggagggggcctggtgcagcccggcggctctctcagactgtcttgtgcggcaagcggctacaccttcacctcttactggatagaatgggtgaggcaggcacctggaaagggactggagtggattggagagattctgccaggagggggagatacaaattacaatgaaatcttcaaggggcgggccaccttttcagcggataccagcaagaatacagcttacctgcagatgaatagcctccgggcagaagataccgctgtttattattgcacgagacgggtgccaataagactggactattgggggcaagggactcttgtcaccgtcagttcaacgcgtatccagaaccctgatcctgccgtgtaccagctgcgggatagcaagagcagcgacaagagcgtgtgtctgttcaccgacttcgacagccagaccaacgtgtcccagagcaaggactccgacgtgtacatcaccgataagaccgtgctggacatgcggagcatggacttcaagagcaactccgccgtggcctggtccaacaagtccgatttcgcctgcgccaacgccttcaacaacagcattatccccgaggacacattcttcccaagccccgagagcagctgcggtaccatcactcaaggtttggcagtgtcaaccatctcatcattctttccacctggctaccaagtgtccttctgcctggtcatggtgctgctgttcgccgtggataccggcctgtacttcagcgtcaagtaa

SEQ ID NO: 40510 - DNA, 2133 bp, synthetic construct
  source 1..2133: mol_type = other DNA
atggccttaccagtgaccgccttgctcctgccgctggccttgctgctccacgccgccaggccggacatcgtgatgacccagacccccctgaccctgagcgtgacaatcggacagcctgccagcatctcctgcaagagcagccagagcctgctggacagcgacggcaagacctacctgaactggctgctgcagaggccaggccagagccccgagagactgatctacctggtgtccaagctggactccggcgtgcccgatagattcacaggcagcggctccggcaccgacttcaccctgaagatcagccgggtggaagccgaggacctgggcgtgtactgttgttggcagggcacccacttcccttacaccttcggcggagggaccaaggtggaaatcaagctcgaggacctgaagaacgtgttcccacctgaggtggccgtgttcgagcctagcgaggccgagatcagccacacccagaaagccaccctcgtgtgcctggctaccggcttctaccccgaccatgtggaactgtcttggtgggtcaacggcaaagaggtgcacagcggcgtgtctaccgacccccagccactgaaagaacagcccgccctgaacgacagccggtactgcctgagcagcagactgagagtgtccgccaccttctggcagaacccccggaaccacttcagatgccaggtgcagttctacggcctgagcgagaacgacgagtggacccaggacagagccaagcccgtgacccagatcgtgtctgccgaagcctggggcagagccgattgcggatcccagagcttcggcctgctggaccccaagctgtgctacctgctggatggcatcctgttcatctacggcgtgatcctgaccgccctgttcctgagagtgaagttcagcagaagcgccgacgcccctgcctaccagcagggacagaaccaactgtacaacgagctgaacctgggcagacgggaagagtacgacgtgctggacaagcggagaggcagggaccctgagatgggcggaaagccccggagaaagaacccccaggaaggactgtataacgaactccagaaagacaagatggccgaagcctacagcgagatcggcatgaagggcgagcggagaagaggcaagggccacgatggcctgtaccagggcctgagcaccgccaccaaggacacctatgacgccctgcacatgcaggccctgcctccaagaagggccaagcgatctggatctggagcaacaaacttctcactactcaaacaagcaggtgacgtggaggagaatcccgggcctactagtatggactggatttggcgcatccttttccttgtcggcgctgctaccggcgcgcattccttcgaacaggtgcaactgcagcagcctggcgctgaacttgtgcggccaggcgcctctgtgaagctgagctgtaaagccagcggctacaccttcaccagctactggatgaactgggtcaagcagcgcccaggccagggcctggaatggatcggaatgatcgaccccagcgacagcgagacacactacaaccacatcttcaaggacaaggccaccctgaccgtggacaagtccagcagcacagcctacctgcaactgtccagcctgaccagcgaggacagcgccgtgtactactgcgcccggaacctgtatctgtggggccagggaacaagcgtgaccgtgtctagcacgcgtatccagaaccctgatcctgccgtgtaccagctgcgggatagcaagagcagcgacaagagcgtgtgtctgttcaccgacttcgacagccagaccaacgtgtcccagagcaaggactccgacgtgtacatcaccgataagaccgtgctggacatgcggagcatggacttcaagagcaactccgccgtggcctggtccaacaagtccgatttcgcctgcgccaacgccttcaacaacagcattatccccgaggacacattcttcccaagccccgagagcagctgcggtaccatcactcaaggtttggcagtgtcaaccatctcatcattctttccacctggctaccaagtgtccttctgcctggtcatggtgctgctgttcgccgtggataccggcctgtacttcagcgtctaa

SEQ ID NO: 40511 - DNA, 1473 bp, synthetic construct
  source 1..1473: mol_type = other DNA
atggccttaccagtgaccgccttgctcctgccgctggccttgctgctccacgccgccaggccggacgacatccagatgacacagagccctagcagcctgtctgccagcgtgggagacagagtgaccatcacatgcaagagcagccagagcctgctggactccgatggcaagacctacctgaactggtatcagcagaagcccggcaaggcccctaagctgctgatctacctggtgtccaagctggatagcggcgtgcccagcagattttctggcagcggcagcggaaccgacttcaccctgacaatatccagcctccagcctgaggacttcgccacctactactgctggcaaggcacccactttccattcaccttcggccagggcaccaaggtggaaatcaaaagactcgagggcggcggaggaagcggaggcggatctggtggcggaggatctttcgaagtgcagctggttgaatcaggcggaggactggttcagcctggcggatctctgagactgtcttgtgccgccagcggctacaccttcaccagctactggatgaactgggtccgacaggcccctggcaaaggactggaatgggtcggaatgatcgaccccagcgacagcgagacacactacaaccacatcttcaaggaccgcttcaccatcagcgccgacaccagcaagaataccgcctacctccagatgaactccctgagagccgaggacaccgccgtgtactactgcgccagaaacctgtatctgttcggccagggaaccctggtcacagtgtcatctacgcgtaccacgacgccagcgccgcgaccaccaacaccggcgcccaccatcgcgtcgcagcccctgtccctgcgcccagaggcgtgccggccagcggcggggggcgcagtgcacacgagggggctggacttcgcctgtgacatctacatctgggcgcccttggccgggacttgtggggtccttctcctgtcactggttatcaccctttactgcaaacggggcagaaagaaactcctgtatatattcaaacaaccatttatgagaccagtacaaactactcaagaggaagatggctgtagctgccgatttccagaagaagaagaaggaggatgtgaactgagagtgaagttcagcaggagcgcagacgcccccgcgtaccagcagggccagaaccagctctataacgagctgaatctaggacgaagagaggagtacgatgttttggacaagagacgtggccgggaccctgagatggggggaaagccgagaaggaagaaccctcaggaaggcctgtacaatgaactgcagaaagataagatggcggaggcctacagtgagattgggatgaaaggcgagcgccggaggggcaaggggcacgatggcctttaccagggtctcagtacagccaccaaggacacctacgacgcccttcacatgcaggccctgccccctcgctga

SEQ ID NO: 40512 - DNA, 1944 bp, synthetic construct
  source 1..1944: mol_type = other DNA
atggccttaccagtgaccgccttgctcctgccgctggccttgctgctccacgccgccaggccgaatgctggcgtgacccagacacctaagttccaggtgctgaaaaccggccagagcatgaccctgcaatgcgcccaggacatgaaccatgagtacatgagctggtacagacaggaccccggcatgggcctgagactgatccactactctgtggctatccagaccaccgaccagggcgaagtgcccaatggctacaacgtgtccagaagcaccatcgaggacttcccactgagactgctgtctgccgctcctagccagaccagcgtgtacttttgtgccagcagctacctgggcaacaccggcgagctgttttttggcgagggcagcagactgaccgtgctcgagggacagcctaaggccaatcctaccgtgacactgttccctccaagcagcgaagaactccaggccaacaaggccacacttgtgtgcctgatctccgacttctaccctggggctgtgacagtggcttggaaggccgatggatctcctgtgaaagccggcgtggaaaccaccaagccatccaagcagagcaacaacaaatacgccgccagctcctacctgagcctgacacctgagcagtggaagtcccacagatcctacagctgccaagtgacccacgaaggcagcaccgtggaaaagacagtggcccctacagagtgcagcggatcccccatcaagaccgatgtgattacaatggaccccaaggacaactgctccaaggacgccaacgataccctgctgctccagctgaccaacaccagcgcctactacatgtacgagatcctgctgggcaaggccaccctgtacgccgtgctggtgtctgccctggtgctgatggctatggtcaagcggaaggacagccggggaagggccaagcgatctggatctggagcaacaaacttctcactactcaaacaagcaggtgacgtggaggagaatcccgggcctactagtatggactggatttggcgcatccttttccttgtcggcgctgctaccggcgcgcattccttcgaacaagaagtgacacagatccctgccgctctgtctgtgcctgagggcgaaaacctggtgctgaactgctccttcaccgacagcgccatctacaacctccagtggttcaggcaggaccctggaaagggactgacaagcctgctgctgatccagagcagccagagagagcagacctccggcagactgaatgccagcctggataagagcagcggcaggtctaccctgtatatcgccgcttctcagcctggcgatagcgccacatatctgtgtgctgtgcggcctacaagcggcggcagctacatccctacatttggcagaggcaccagcctgatcgtgcacccttatacgcgtgcctctacaaagggaccctccgtgtttcctctggctcccagcagcaagtctacaagcggaggaacagccgctctgggctgcctggtcaaggattactttcccgagcctgtgaccgtgtcctggaatagcggagcactgacaagcggcgtgcacacctttccagccgtgctgcaaagcagcggcctgtactctctgagcagcgtggtcacagtgcctagctctagcctgggcacccagacctacatctgcaatgtgaaccacaagcctagcaacaccaaggtggacaagagagtggaacccaagagctgtggtaccgaagtgaaaaccgactccaccgaccacgtgaagcccaaagagacagagaacaccaagcagcccagcaagagctgccacaagcccaaggccatcgtgcacaccgagaaagtgaacatgatgagcctgaccgtgctgggcttcagaatcctgctgctgaaagtggccggctttaacctgctgatgaccctgcggctgtggtccagc

SEQ ID NO: 40513 - DNA, 1944 bp, synthetic construct
  source 1..1944: mol_type = other DNA
atggccttaccagtgaccgccttgctcctgccgctggccttgctgctccacgccgccaggccgaatgctggcgtgacccagacacctaagttccaggtgctgaaaaccggccagagcatgaccctgcaatgcgcccaggacatgaaccatgagtacatgagctggtacagacaggaccccggcatgggcctgagactgatccactactctgtggctatccagaccaccgaccagggcgaagtgcccaatggctacaacgtgtccagaagcaccatcgaggacttcccactgagactgctgtctgccgctcctagccagaccagcgtgtacttttgtgccagcagctacctgggcaacaccggcgagctgttttttggcgagggcagcagactgaccgtgctcgagggacagcctaaggccaatcctaccgtgacactgttccctccaagcagcgaagaactccaggccaacaaggccacacttgtgtgcctgatctccgacttctaccctggggctgtgacagtggcttggaaggccgatggatctcctgtgaaagccggcgtggaaaccaccaagccatccaagcagagcaacaacaaatacgccgccagctcctacctgagcctgacacctgagcagtggaagtcccacagatcctacagctgccaagtgacccacgaaggcagcaccgtggaaaagacagtggcccctacagagtgcagcggatcccccatcaagaccgatgtgattacaatggaccccaaggacaactgctccaaggacgccaacgataccctgctgctccagctgaccaacaccagcgccaccatcctgtacgagatcctgctgggcaaggccaccctgtacgccgtgctggtgtctgccctggtgctgatggctatggtcaagcggaaggacagccggggaagggccaagcgatctggatctggagcaacaaacttctcactactcaaacaagcaggtgacgtggaggagaatcccgggcctactagtatggactggatttggcgcatccttttccttgtcggcgctgctaccggcgcgcattccttcgaacaagaagtgacacagatccctgccgctctgtctgtgcctgagggcgaaaacctggtgctgaactgctccttcaccgacagcgccatctacaacctccagtggttcaggcaggaccctggaaagggactgacaagcctgctgctgatccagagcagccagagagagcagacctccggcagactgaatgccagcctggataagagcagcggcaggtctaccctgtatatcgccgcttctcagcctggcgatagcgccacatatctgtgtgctgtgcggcctacaagcggcggcagctacatccctacatttggcagaggcaccagcctgatcgtgcacccttatacgcgtgcctctacaaagggaccctccgtgtttcctctggctcccagcagcaagtctacaagcggaggaacagccgctctgggctgcctggtcaaggattactttcccgagcctgtgaccgtgtcctggaatagcggagcactgacaagcggcgtgcacacctttccagccgtgctgcaaagcagcggcctgtactctctgagcagcgtggtcacagtgcctagctctagcctgggcacccagacctacatctgcaatgtgaaccacaagcctagcaacaccaaggtggacaagagagtggaacccaagagctgtggtaccgaagtgaaaaccgactccaccgaccacgtgaagcccaaagagacagagaacaccaagcagcccagcaagagctgccacaagcccaaggccatcgtgcacaccgagaaagtgaacatgatgagcctgaccgtgctgggcttcagaatcctgctgctgaaagtggccggctttaacctgctgatgaccctgcggctgtggtccagc

SEQ ID NO: 40514 - DNA, 22 bp, synthetic construct
  source 1..22: mol_type = other DNA
gggggggggggggggggggggg

SEQ ID NO: 40515 - DNA, 22 bp, synthetic construct
  source 1..22: mol_type = other DNA
gggggggggggggggggggggg

SEQ ID NO: 40516 - DNA, 22 bp, synthetic construct
  source 1..22: mol_type = other DNA
gggggggggggggggggggggg

SEQ ID NO: 40517 - DNA, 22 bp, synthetic construct
  source 1..22: mol_type = other DNA
gggggggggggggggggggggg

SEQ ID NO: 40518 - DNA, 22 bp, synthetic construct
  source 1..22: mol_type = other DNA
gggggggggggggggggggggg

SEQ ID NO: 40519 - DNA, 22 bp, synthetic construct
  source 1..22: mol_type = other DNA
gggggggggggggggggggggg

SEQ ID NO: 40520 - DNA, 22 bp, synthetic construct
  source 1..22: mol_type = other DNA
gggggggggggggggggggggg

SEQ ID NO: 40521 - DNA, 22 bp, synthetic construct
  source 1..22: mol_type = other DNA
gggggggggggggggggggggg

SEQ ID NO: 40522 - DNA, 22 bp, synthetic construct
  source 1..22: mol_type = other DNA
gggggggggggggggggggggg

SEQ ID NO: 40523 - DNA, 22 bp, synthetic construct
  source 1..22: mol_type = other DNA
gggggggggggggggggggggg

SEQ ID NO: 40524 - DNA, 22 bp, synthetic construct
  source 1..22: mol_type = other DNA
gggggggggggggggggggggg

SEQ ID NO: 40525 - DNA, 22 bp, synthetic construct
  source 1..22: mol_type = other DNA
gggggggggggggggggggggg

SEQ ID NO: 40526 - DNA, 22 bp, synthetic construct
  source 1..22: mol_type = other DNA
gggggggggggggggggggggg

SEQ ID NO: 40527 - DNA, 22 bp, synthetic construct
  source 1..22: mol_type = other DNA
gggggggggggggggggggggg

SEQ ID NO: 40528 - DNA, 22 bp, synthetic construct
  source 1..22: mol_type = other DNA
gggggggggggggggggggggg

SEQ ID NO: 40529 - DNA, 22 bp, synthetic construct
  source 1..22: mol_type = other DNA
gggggggggggggggggggggg

SEQ ID NO: 40530 - DNA, 1188 bp, synthetic construct
  source 1..1188: mol_type = other DNA
atggccttaccagtgaccgccttgctcctgccgctggccttgctgctccacgccgccaggccggacgccagaagcgaggacagatacagaaaccccaagggcagcgcctgctccagaatctggcaaagccccagattcattgcccggaagaggggcttcaccgtgaagatgcactgctacatgaacagcgccagcggcaacgtttcctggctgtggaagcaagagatggacgagaaccctcagcagctgaagctggaaaagggccgcatggaagagagccagaacgagtctctggccacactgaccatccagggcatcagattcgaggacaacggcatctacttttgccagcagaagtgcaacaacaccagcgaggtgtaccaaggctgtggcaccgagctgagagtgatgggctttagcacactggcccagctgaaacagcggaacaccctgaagacgcgtggaggcagtggtgtcttcacactcgaagatttcgttggggactggcgacagacagccggctacaacctggaccaagtccttgaacagggaggtgtgtccagtttgtttcagaatctcggggtgtccgtaactccgatccaaaggattgtcctgagcggtgaaaatgggctgaagatcgacatccatgtcatcatcccgtatgaaggtctgagcggcgaccaaatgggccagatcgaaaaaatttttaaggtggtgtaccctgtggatgatcatcactttaaggtgatcctgcactatggcacactggtaatcgacggggttacgccgaacatgatcgactatttcggacggccgtatgaaggcatcgccgtgttcgacggcaaaaagatcactgtaacagggaccctgtggaacggcaacaaaattatcgacgagcgcctgatcaaccccgacggctccctgctgttccgagtaaccatcaacggagtgaccggctggcggctgtgcgaacgcattctggcgctcgagggaggcagctggagccaccctcagtttgaaaaagactacaaagacgatgacgataagggatcagattacaaggatgatgatgacaaggggtcagattataaagacgacgatgataaagggagcgactacaaggacgacgatgacaaggcctggtcccatccccagttcgagaaacaccatcaccaccaccatcatcac

SEQ ID NO: 40531 - protein, 111 aa, synthetic construct
EDQVTQSPEALRLQEGESSSLNCSYTVSGLRGLFWYRQDPGKGPEFLFTLYSAGEEKEKERLKATLTKKESFLHITAPKPEDSATYLCAVHSTAQAGTALIFGKGTTLSVS

SEQ ID NO: 40532 - protein, 111 aa, synthetic construct
EDQVTQSPEALRLQEGESSSLNCSYTVSGLRGLFWYRQDPGKGPEFLFTLYSAGEEKEKERLKATLTKKESFLHITAPKPEDSATYLCAVHSTAQAGTALTFGKGTTLSVS

SEQ ID NO: 40533 - protein, 113 aa, synthetic construct
GVTQTPKHLITATGQRVTLRCSPRSGDRSVYWYQQSLDQGLQFLIQYYNGEERAKGNILERFSAQQFPDLHSELNLSSLELGDSALYFCASSTHRGQTNYGYTFGSGTRLTVL

SEQ ID NO: 40534 - protein, 113 aa, synthetic construct
GVTQTPKHLITATGQRVTLRCSPRSGELSVYWYQQSLDQGLQFLIQYYNGEERAKGNILERFSAQQFPDLHSELNLSSLELGDSALYFCASSTHRGQTNYGYTFGSGTRLTVL

SEQ ID NO: 40535 - protein, 140 aa, synthetic construct; identical to SEQ ID NO: 31965

SEQ ID NO: 40536 - protein, 140 aa, synthetic construct; identical to SEQ ID NO: 31969

SEQ ID NO: 40537 - protein, 179 aa, synthetic construct; identical to SEQ ID NO: 31966

SEQ ID NO: 40538 - protein, 152 aa, synthetic construct
SQPPAKPSVFIMKNGTNVACLVKDFYPKEVTISLRSSKKIVEFDPAIVISPSGKYSAVKLGQYGDSNSVTCSVQHNSETVHSTDFEPYANSFNNEKLPEPENDTQISEPCYGPRVTVHTEKVNMMSLTVLGLRLLFAKTIAINFLLTVKLFF

SEQ ID NO: 40539 - protein, 172 aa, synthetic construct
DKRLDADISPKPTIFLPSVAETNLHKTGTYLCLLEKFFPDVIRVYWKEKDGNTILDSQEGDTLKTNDTYMKFSWLTVPERAMGKEHRCIVKHENNKGGADQEIFFPSIKKVAVSTKPTTCWQDKNDVLQLQFTITSAYYTYLLLLLKSVIYLAIISFSLLRRTSVCGNEKKS

SEQ ID NO: 40540 - protein, 181 aa, synthetic construct
LEDLKHVFPPEVAVFEPSDAEIWHTQKATLVCLATGFYPDHVELSWWVNGKEVHSGVSTDPQPLKEQPALNDSRYCLSSRLRVSATFWQNPRNHFRCQVQFYGLSENDEWTQDRAKPVTQIVSAEAWGRADCGFTSESYQQGVLSAYYMYLLLLLKSVVYFAIITCCLLRRTAFCCNGEKS

SEQ ID NO: 40541 - protein, 181 aa, synthetic construct
LEDLKHVFPPEVAVFEPSDAEIWHTQKATLVCLATGFYPDHVELSWWVNGKEVHSGVSTDPQPLKEQPALNDSRYCLSSRLRVSATFWQNPRNHFRCQVQFYGLSENDEWTQDRAKPVTQIVSAEAWGRADCGFTSESYQQGVLSATILYLLLLLKSVVYFAIITCCLLRRTAFCCNGEKS

SEQ ID NO: 40542 - protein, 182 aa, synthetic construct; identical to SEQ ID NO: 22300

SEQ ID NO: 40543 - protein, 174 aa, synthetic construct; identical to SEQ ID NO: 22292

SEQ ID NO: 40544 - protein, 187 aa, synthetic construct; identical to SEQ ID NO: 22316

SEQ ID NO: 40545 - protein, 152 aa, synthetic construct; identical to SEQ ID NO: 22346

SEQ ID NO: 40546 - protein, 138 aa, synthetic construct; identical to SEQ ID NO: 22371

SEQ ID NO: 40547 - protein, 160 aa, synthetic construct
GQPKANPTVTLFPPSSEELQANKATLVCLISDFYPGAVTVAWKADGSPVKAGVETTKPSKQSNNKYAASSYLSLTPEQWKSHRSYSCQVTHEGSTVEKTVAPTECSGRADCGFTSESYQQGVLSATILYLLLLLKSVVYFAIITCCLLRRTAFCCNGEKS

SEQ ID NO: 40548 - protein, 160 aa, synthetic construct
GQPKANPTVTLFPPSSEELQANKATLVCLISDFYPGAVTVAWKADGSPVKAGVETTKPSKQSNNKYAASSYLSLTPEQWKSHRSYSCQVTHEGSTVEKTVAPTECSGRADCGFTSESYQQGVLSAYYMYLLLLLKSVVYFAIITCCLLRRTAFCCNGEKS

SEQ ID NO: 40549 - protein, 160 aa, synthetic construct
GQPKANPTVTLFPPSSEELQANKATLVCLISDFYPGAVTVAWKADGSPVKAGVETTKPSKQSNNKYAASSYLSLTPEQWKSHRSYSCQVTHEGSTVEKTVAPTECSGRADCGFTSESYQQGVLSAYYTYLLLLLKSVIYLAIISFSLLRRTSVCGNEKKS

SEQ ID NO: 40550 - protein, 159 aa, synthetic construct
GQPKANPTVTLFPPSSEELQANKATLVCLISDFYPGAVTVAWKADGSPVKAGVETTKPSKQSNNKYAASSYLSLTPEQWKSHRSYSCQVTHEGSTVEKTVAPTECSGRADCGFTSESYQQGVLSAYYMYLLLLLKSVVYFAIITCCLLMAMVKRKDSRG

SEQ ID NO: 40551 - protein, 160 aa, synthetic construct
GQPKANPTVTLFPPSSEELQANKATLVCLISDFYPGAVTVAWKADGSPVKAGVETTKPSKQSNNKYAASSYLSLTPEQWKSHRSYSCQVTHEGSTVEKTVAPTECSGRADCGFTSESYQQGVLSATILYLLLLLKSVVYLAIISFSLLRRTAFCCNGEKS

SEQ ID NO: 40552 - protein, 54 aa, synthetic construct
GRADCGFTSESYQQGVLSATILYLLLLLKSVVYFAIITCCLLRRTAFCCNGEKS

SEQ ID NO: 40553 - protein, 54 aa, synthetic construct
GRADCGFTSESYQQGVLSAYYMYLLLLLKSVVYFAIITCCLLRRTAFCCNGEKS

SEQ ID NO: 40554 - protein, 54 aa, synthetic construct
GRADCGFTSESYQQGVLSAYYTYLLLLLKSVIYLAIISFSLLRRTSVCGNEKKS

SEQ ID NO: 40555 - protein, 53 aa, synthetic construct
GRADCGFTSESYQQGVLSAYYMYLLLLLKSVVYFAIITCCLLMAMVKRKDSRG

SEQ ID NO: 40556 - protein, 54 aa, synthetic construct
GRADCGFTSESYQQGVLSATILYLLLLLKSVVYLAIISFSLLRRTAFCCNGEKS

SEQ ID NO: 40557 - protein, 163 aa, synthetic construct
ASTKGPSVFPLAPSSKSTSGGTAALGCLVKDYFPEPVTVSWNSGALTSGVHTFPAVLQSSGLYSLSSVVTVPSSSLGTQTYICNVNHKPSNTKVDKRVEPKSCIPEDTFFPSPESSCDVKLVEKSFETDTNLNFQNLSVIGLRMLFAKTVAVNFLLTAKLFFL

SEQ ID NO: 40558 - protein, 163 aa, synthetic construct
ASTKGPSVFPLAPSSKSTSGGTAALGCLVKDYFPEPVTVSWNSGALTSGVHTFPAVLQSSGLYSLSSVVTVPSSSLGTQTYICNVNHKPSNTKVDKRVEPKSCIPEDTFFPSPESSCDVKLVEKSFETDTNLNFQNLSVLGLRMLFAKTVAVNFLLTAKLFFL

SEQ ID NO: 40559 - protein, 163 aa, synthetic construct
ASTKGPSVFPLAPSSKSTSGGTAALGCLVKDYFPEPVTVSWNSGALTSGVHTFPAVLQSSGLYSLSSVVTVPSSSLGTQTYICNVNHKPSNTKVDKRVEPKSCIPEDTFFPSPESSCDVKLVEKSFETDTNLNFQNLTVLGLRMLFAKTVAVNFLLTAKLFFL

SEQ ID NO: 40560 - protein, 163 aa, synthetic construct; identical to SEQ ID NO: 40559

SEQ ID NO: 40561 - protein, 165 aa, synthetic construct
ASTKGPSVFPLAPSSKSTSGGTAALGCLVKDYFPEPVTVSWNSGALTSGVHTFPAVLQSSGLYSLSSVVTVPSSSLGTQTYICNVNHKPSNTKVDKRVEPKSCIFKETNATYPSSDVPCDATLTEKSFETDMNLNFQNLTVLGLRMLFAKTVAVNFLLTAKLFFL

SEQ ID NO: 40562 - protein, 60 aa, synthetic construct
IPEDTFFPSPESSCDVKLVEKSFETDTNLNFQNLSVIGLRMLFAKTVAVNFLLTAKLFFL

SEQ ID NO: 40563 - protein, 60 aa, synthetic construct
IPEDTFFPSPESSCDVKLVEKSFETDTNLNFQNLSVLGLRMLFAKTVAVNFLLTAKLFFL

SEQ ID NO: 40564 - protein, 60 aa, synthetic construct
IPEDTFFPSPESSCDVKLVEKSFETDTNLNFQNLTVLGLRMLFAKTVAVNFLLTAKLFFL

SEQ ID NO: 40565 - protein, 60 aa, synthetic construct; identical to SEQ ID NO: 40564

SEQ ID NO: 40566 - protein, 62 aa, synthetic construct
IFKETNATYPSSDVPCDATLTEKSFETDMNLNFQNLTVLGLRMLFAKTVAVNFLLTAKLFFL

SEQ ID NO: 40567 - protein, 172 aa, synthetic construct
GQPKANPTVTLFPPSSEELQANKATLVCLISDFYPGAVTVAWKADGSPVKAGVETTKPSKQSNNKYAASSYLSLTPEQWKSHRSYSCQVTHEGSTVEKTVAPTECSPIKTDVITMDPKDNCSKDANDTLLLQLTNTSAYYMYEILLGKATLYAVLVSALVLMAMVKRKDSRG

SEQ ID NO: 40568 - protein, 172 aa, synthetic construct
GQPKANPTVTLFPPSSEELQANKATLVCLISDFYPGAVTVAWKADGSPVKAGVETTKPSKQSNNKYAASSYLSLTPEQWKSHRSYSCQVTHEGSTVEKTVAPTECSPIKTDVITMDPKDNCSKDANDTLLLQLTNTSATILYEILLGKATLYAVLVSALVLMAMVKRKDSRG

SEQ ID NO: 40569 - protein, 173 aa, synthetic construct
GQPKANPTVTLFPPSSEELQANKATLVCLISDFYPGAVTVAWKADGSPVKAGVETTKPSKQSNNKYAASSYLSLTPEQWKSHRSYSCQVTHEGSTVEKTVAPTECSPIKTDVITMDPKDNCSKDANDTLLLQLTNTSAYYTYLLLLLKSVIYLAIISFSLLRRTSVCGNEKKS

SEQ ID NO: 40570 - protein, 172 aa, synthetic construct
GQPKANPTVTLFPPSSEELQANKATLVCLISDFYPGAVTVAWKADGSPVKAGVETTKPSKQSNNKYAASSYLSLTPEQWKSHRSYSCQVTHEGSTVEKTVAPTECSSIKKVAVSTKPTTCWQDKNDVLQLQFTITSAYYTYLLLLLKSVIYLAIISFSLLRRTSVCGNEKKS

SEQ ID NO: 40571 - protein, 627 aa, synthetic construct
MALPVTALLLPLALLLHAARPDIQMTQSPSSLSASVGDRVTITCKASDHINNWLAWYQQKPGQAPKLLIYGATTLETGVPSRFSGSGSGTDYTLTISSLQPEDFATYYCQQSWNTPWTFGQGTKLEIKRLEGQPKANPTVTLFPPSSEELQANKATLVCLISDFYPGAVTVAWKADGSPVKAGVETTKPSKQSNNKYAASSYLSLTPEQWKSHRSYSCQVTHEGSTVEKTVAPTECSGRADCGFTSESYQQGVLSATILYLLLLLKSVVYFAIITCCLLRRTAFCCNGEKSRAKRSGSGATNFSLLKQAGDVEENPGPTSMDWIWRILFLVGAATGAHSFEQVQLQQPGAELVKPGASVKMSCKASGYAFSSYWINWMKQKPGQGLEWIGQIYPGDGDTNYNGKFKGRATLTADTSSSTAYMQLSSLTSEDSAVYFCARSITTVVGCAMDYWGQGTSVTVSSTRASTKGPSVFPLAPSSKSTSGGTAALGCLVKDYFPEPVTVSWNSGALTSGVHTFPAVLQSSGLYSLSSVVTVPSSSLGTQTYICNVNHKPSNTKVDKRVEPKSCIPEDTFFPSPESSCDVKLVEKSFETDTNLNFQNLSVIGFRILLLKVAGFNLLMTLRLWSS

SEQ ID NO: 40572 - protein, 627 aa, synthetic construct
MALPVTALLLPLALLLHAARPDIQMTQSPSSLSASVGDRVTITCKASDHINNWLAWYQQKPGQAPKLLIYGATTLETGVPSRFSGSGSGTDYTLTISSLQPEDFATYYCQQSWNTPWTFGQGTKLEIKRLEGQPKANPTVTLFPPSSEELQANKATLVCLISDFYPGAVTVAWKADGSPVKAGVETTKPSKQSNNKYAASSYLSLTPEQWKSHRSYSCQVTHEGSTVEKTVAPTECSGRADCGFTSESYQQGVLSAYYMYLLLLLKSVVYFAIITCCLLRRTAFCCNGEKSRAKRSGSGATNFSLLKQAGDVEENPGPTSMDWIWRILFLVGAATGAHSFEQVQLQQPGAELVKPGASVKMSCKASGYAFSSYWINWMKQKPGQGLEWIGQIYPGDGDTNYNGKFKGRATLTADTSSSTAYMQLSSLTSEDSAVYFCARSITTVVGCAMDYWGQGTSVTVSSTRASTKGPSVFPLAPSSKSTSGGTAALGCLVKDYFPEPVTVSWNSGALTSGVHTFPAVLQSSGLYSLSSVVTVPSSSLGTQTYICNVNHKPSNTKVDKRVEPKSCIPEDTFFPSPESSCDVKLVEKSFETDTNLNFQNLSVIGFRILLLKVAGFNLLMTLRLWSS

SEQ ID NO: 40573 - protein, 627 aa, synthetic construct
MALPVTALLLPLALLLHAARPDIQMTQSPSSLSASVGDRVTITCKASDHINNWLAWYQQKPGQAPKLLIYGATTLETGVPSRFSGSGSGTDYTLTISSLQPEDFATYYCQQSWNTPWTFGQGTKLEIKRLEGQPKANPTVTLFPPSSEELQANKATLVCLISDFYPGAVTVAWKADGSPVKAGVETTKPSKQSNNKYAASSYLSLTPEQWKSHRSYSCQVTHEGSTVEKTVAPTECSGRADCGFTSESYQQGVLSAYYTYLLLLLKSVIYLAIISFSLLRRTSVCGNEKKSRAKRSGSGATNFSLLKQAGDVEENPGPTSMDWIWRILFLVGAATGAHSFEQVQLQQPGAELVKPGASVKMSCKASGYAFSSYWINWMKQKPGQGLEWIGQIYPGDGDTNYNGKFKGRATLTADTSSSTAYMQLSSLTSEDSAVYFCARSITTVVGCAMDYWGQGTSVTVSSTRASTKGPSVFPLAPSSKSTSGGTAALGCLVKDYFPEPVTVSWNSGALTSGVHTFPAVLQSSGLYSLSSVVTVPSSSLGTQTYICNVNHKPSNTKVDKRVEPKSCIPEDTFFPSPESSCDVKLVEKSFETDTNLNFQNLSVIGFRILLLKVAGFNLLMTLRLWSS

SEQ ID NO: 40574 - protein, 626 aa, synthetic construct
MALPVTALLLPLALLLHAARPDIQMTQSPSSLSASVGDRVTITCKASDHINNWLAWYQQKPGQAPKLLIYGATTLETGVPSRFSGSGSGTDYTLTISSLQPEDFATYYCQQSWNTPWTFGQGTKLEIKRLEGQPKANPTVTLFPPSSEELQANKATLVCLISDFYPGAVTVAWKADGSPVKAGVETTKPSKQSNNKYAASSYLSLTPEQWKSHRSYSCQVTHEGSTVEKTVAPTECSGRADCGFTSESYQQGVLSAYYMYLLLLLKSVVYFAIITCCLLMAMVKRKDSRGRAKRSGSGATNFSLLKQAGDVEENPGPTSMDWIWRILFLVGAATGAHSFEQVQLQQPGAELVKPGASVKMSCKASGYAFSSYWINWMKQKPGQGLEWIGQIYPGDGDTNYNGKFKGRATLTADTSSSTAYMQLSSLTSEDSAVYFCARSITTVVGCAMDYWGQGTSVTVSSTRASTKGPSVFPLAPSSKSTSGGTAALGCLVKDYFPEPVTVSWNSGALTSGVHTFPAVLQSSGLYSLSSVVTVPSSSLGTQTYICNVNHKPSNTKVDKRVEPKSCIPEDTFFPSPESSCDVKLVEKSFETDTNLNFQNLSVIGFRILLLKVAGFNLLMTLRLWSS

SEQ ID NO: 40575 - protein, 627 aa, synthetic construct
MALPVTALLLPLALLLHAARPDIQMTQSPSSLSASVGDRVTITCKASDHINNWLAWYQQKPGQAPKLLIYGATTLETGVPSRFSGSGSGTDYTLTISSLQPEDFATYYCQQSWNTPWTFGQGTKLEIKRLEGQPKANPTVTLFPPSSEELQANKATLVCLISDFYPGAVTVAWKADGSPVKAGVETTKPSKQSNNKYAASSYLSLTPEQWKSHRSYSCQVTHEGSTVEKTVAPTECSGRADCGFTSESYQQGVLSATILYLLLLLKSVVYLAIISFSLLRRTAFCCNGEKSRAKRSGSGATNFSLLKQAGDVEENPGPTSMDWIWRILFLVGAATGAHSFEQVQLQQPGAELVKPGASVKMSCKASGYAFSSYWINWMKQKPGQGLEWIGQIYPGDGDTNYNGKFKGRATLTADTSSSTAYMQLSSLTSEDSAVYFCARSITTVVGCAMDYWGQGTSVTVSSTRASTKGPSVFPLAPSSKSTSGGTAALGCLVKDYFPEPVTVSWNSGALTSGVHTFPAVLQSSGLYSLSSVVTVPSSSLGTQTYICNVNHKPSNTKVDKRVEPKSCIPEDTFFPSPESSCDVKLVEKSFETDTNLNFQNLSVIGFRILLLKVAGFNLLMTLRLWSS

SEQ ID NO: 40576 - protein, 626 aa, synthetic construct
MALPVTALLLPLALLLHAARPDIQMTQSPSSLSASVGDRVTITCKASDHINNWLAWYQQKPGQAPKLLIYGATTLETGVPSRFSGSGSGTDYTLTISSLQPEDFATYYCQQSWNTPWTFGQGTKLEIKRLEGQPKANPTVTLFPPSSEELQANKATLVCLISDFYPGAVTVAWKADGSPVKAGVETTKPSKQSNNKYAASSYLSLTPEQWKSHRSYSCQVTHEGSTVEKTVAPTECSGRADCGFTSESYQQGVLSATILYEILLGKATLYAVLVSALVLMAMVKRKDSRGRAKRSGSGATNFSLLKQAGDVEENPGPTSMDWIWRILFLVGAATGAHSFEQVQLQQPGAELVKPGASVKMSCKASGYAFSSYWINWMKQKPGQGLEWIGQIYPGDGDTNYNGKFKGRATLTADTSSSTAYMQLSSLTSEDSAVYFCARSITTVVGCAMDYWGQGTSVTVSSTRASTKGPSVFPLAPSSKSTSGGTAALGCLVKDYFPEPVTVSWNSGALTSGVHTFPAVLQSSGLYSLSSVVTVPSSSLGTQTYICNVNHKPSNTKVDKRVEPKSCIPEDTFFPSPESSCDVKLVEKSFETDTNLNFQNLSVIGLRMLFAKTVAVNFLLTAKLFFL

SEQ ID NO: 40577 - protein, 626 aa, synthetic construct
MALPVTALLLPLALLLHAARPDIQMTQSPSSLSASVGDRVTITCKASDHINNWLAWYQQKPGQAPKLLIYGATTLETGVPSRFSGSGSGTDYTLTISSLQPEDFATYYCQQSWNTPWTFGQGTKLEIKRLEGQPKANPTVTLFPPSSEELQANKATLVCLISDFYPGAVTVAWKADGSPVKAGVETTKPSKQSNNKYAASSYLSLTPEQWKSHRSYSCQVTHEGSTVEKTVAPTECSGRADCGFTSESYQQGVLSATILYEILLGKATLYAVLVSALVLMAMVKRKDSRGRAKRSGSGATNFSLLKQAGDVEENPGPTSMDWIWRILFLVGAATGAHSFEQVQLQQPGAELVKPGASVKMSCKASGYAFSSYWINWMKQKPGQGLEWIGQIYPGDGDTNYNGKFKGRATLTADTSSSTAYMQLSSLTSEDSAVYFCARSITTVVGCAMDYWGQGTSVTVSSTRASTKGPSVFPLAPSSKSTSGGTAALGCLVKDYFPEPVTVSWNSGALTSGVHTFPAVLQSSGLYSLSSVVTVPSSSLGTQTYICNVNHKPSNTKVDKRVEPKSCIPEDTFFPSPESSCDVKLVEKSFETDTNLNFQNLSVLGLRMLFAKTVAVNFLLTAKLFFL

SEQ ID NO: 40578 - protein, 626 aa, synthetic construct
MALPVTALLLPLALLLHAARPDIQMTQSPSSLSASVGDRVTITCKASDHINNWLAWYQQKPGQAPKLLIYGATTLETGVPSRFSGSGSGTDYTLTISSLQPEDFATYYCQQSWNTPWTFGQGTKLEIKRLEGQPKANPTVTLFPPSSEELQANKATLVCLISDFYPGAVTVAWKADGSPVKAGVETTKPSKQSNNKYAASSYLSLTPEQWKSHRSYSCQVTHEGSTVEKTVAPTECSGRADCGFTSESYQQGVLSATILYEILLGKATLYAVLVSALVLMAMVKRKDSRGRAKRSGSGATNFSLLKQAGDVEENPGPTSMDWIWRILFLVGAATGAHSFEQVQLQQPGAELVKPGASVKMSCKASGYAFSSYWINWMKQKPGQGLEWIGQIYPGDGDTNYNGKFKGRATLTADTSSSTAYMQLSSLTSEDSAVYFCARSITTVVGCAMDYWGQGTSVTVSSTRASTKGPSVFPLAPSSKSTSGGTAALGCLVKDYFPEPVTVSWNSGALTSGVHTFPAVLQSSGLYSLSSVVTVPSSSLGTQTYICNVNHKPSNTKVDKRVEPKSCIPEDTFFPSPESSCDVKLVEKSFETDTNLNFQNLTVLGLRMLFAKTVAVNFLLTAKLFFL

SEQ ID NO: 40579 - protein, 626 aa, synthetic construct; identical to SEQ ID NO: 40578

SEQ ID NO: 40580 - protein, 628 aa, synthetic construct
MALPVTALLLPLALLLHAARPDIQMTQSPSSLSASVGDRVTITCKASDHINNWLAWYQQKPGQAPKLLIYGATTLETGVPSRFSGSGSGTDYTLTISSLQPEDFATYYCQQSWNTPWTFGQGTKLEIKRLEGQPKANPTVTLFPPSSEELQANKATLVCLISDFYPGAVTVAWKADGSPVKAGVETTKPSKQSNNKYAASSYLSLTPEQWKSHRSYSCQVTHEGSTVEKTVAPTECSGRADCGFTSESYQQGVLSATILYEILLGKATLYAVLVSALVLMAMVKRKDSRGRAKRSGSGATNFSLLKQAGDVEENPGPTSMDWIWRILFLVGAATGAHSFEQVQLQQPGAELVKPGASVKMSCKASGYAFSSYWINWMKQKPGQGLEWIGQIYPGDGDTNYNGKFKGRATLTADTSSSTAYMQLSSLTSEDSAVYFCARSITTVVGCAMDYWGQGTSVTVSSTRASTKGPSVFPLAPSSKSTSGGTAALGCLVKDYFPEPVTVSWNSGALTSGVHTFPAVLQSSGLYSLSSVVTVPSSSLGTQTYICNVNHKPSNTKVDKRVEPKSCIFKETNATYPSSDVPCDATLTEKSFETDMNLNFQNLTVLGLRMLFAKTVAVNFLLTAKLFFL

SEQ ID NO: 40581 - protein, 9 aa, synthetic construct
VLDGLDVLL

SEQ ID NO: 40582 - protein, 173 aa, synthetic construct; identical to SEQ ID NO: 8873

SEQ ID NO: 40583 - protein, 172 aa, synthetic construct
DKHLDADVSPKPTIFLPSIAETNLHKAGTYLCLLENFFPDVIKIHWQEKKSNTILGSQEGNTVKTNDTYMKFSWLTVPEKSLDKEHRCIVRHENNKNGVDQGIIFPPIKTDVTTMDPKDNCSRDANDALLLQLTNTSAYYMYLLLLVKSEVYFAIIAVCLLRRTAVCCNGER

SEQ ID NO: 40584 - protein, 172 aa, synthetic construct; identical to SEQ ID NO: 40539

SEQ ID NO: 40585 - protein, 207 aa, synthetic construct
DKNLPADTSPKPTIFLPSINEVNHQQAATYLCLLEKFFPDVIKVSWKEKNDNRVLPSQQGNTMKTNDTYMTFSWLTVTENSMKEEHMCIVKHEKNTRGKDQEILFPAVNEVFTPVVTTTEPPNDCLKDGSEVTDTDFTKACARDESEFANSTKACLKDENNTVQLQFTYNSAYYTYLLLLLKSAIYFVTTSCCVFRRTGVCCDGKNS

SEQ ID NO: 40586 - protein, 206 aa, synthetic construct
DRNLATDMTPKPTVFLPSIAEIEHSKVGTYLCLLEKFFPNAIQVYWKEKNDNRVLESMQGNTVKTDDTYMKFSWLTVSEESMGKEHICFVKHEKNRVEPVQEILFPSINEVVSSAVMPTDSSNDCLKDESKVSDSDSRKACVRNESEVTNSTKACLKDESNTLQLQLENTSAYYTYLLLLLKSTLYFATVLSCLFRRTVCSSGKTS

SEQ ID NO: 40587 - protein, 153 aa, synthetic construct; identical to SEQ ID NO: 8874

SEQ ID NO: 40588 - protein, 151 aa, synthetic construct
RQPHTKPSVFVMKNGTNVACLVKDFYPKDIRINLESSKKITEFDPAIVVSPSGKYNAVKLGQYADSNSVTCSVQHNKEVVYSTDFEVKTNSTDHLKPTETENTKQPSKSCHEPKVHAEKVNMMSLTVLGLRMLFAKSVAINFLLTAKLLFL

SEQ ID NO: 40589 - protein, 152 aa, synthetic construct; identical to SEQ ID NO: 40538

SEQ ID NO: 40590 - protein, 151 aa, synthetic construct
SQPNSKPSVFVMKNGTNVACLVKDFYPKDIKISLESSKKITEYDPAIVVSPTGKYSAVKLGQYGDPDAVTCSVQHDQKTLHSADFEPKKNSSETPKPKESENVKQTSEICYEPQVQAWKVNMMSVTVLGFRMLFAKSVAVNFLLTAKLFFF

SEQ ID NO: 40591 - protein, 154 aa, synthetic construct
SQPAASPSVFVMKNGTNVACLVKEFYPKDVTISLQSSKKIIEYDPAIAISPGGKYSAVKLGQYGDPDSVTCSVEHNKQTWHSTVFEPKKTIPETTPKPMAYENSTKAEAPVTCQEPQVEPGKVNMMSLSVLGLRMLFAKSVAVNFLLTAKLFFF

SEQ ID NO: 40592 - protein, 164 aa, synthetic construct
MKWKALFTAAILQAQLPITEAQSFGLLDPKLCYLLDGILFIYGVILTALFLRVKFSRSADAPAYQQGQNQLYNELNLGRREEYDVLDKRRGRDPEMGGKPQRRKNPQEGLYNELQKDKMAEAYSEIGMKGERRRGKGHDGLYQGLSTATKDTYDALHMQALPPR

SEQ ID NO: 40593 - protein, 163 aa, synthetic construct
MKWKALFTAAILQAQLPITEAQSFGLLDPKLCYLLDGILFIYGVILTALFLRVKFSRSADAPAYQQGQNQLYNELNLGRREEYDVLDKRRGRDPEMGGKPRRKNPQEGLYNELQKDKMAEAYSEIGMKGERRRGKGHDGLYQGLSTATKDTYDALHMQALPPR

SEQ ID NO: 40594 - protein, 195 aa, synthetic construct
MKWKALFTAAILQAQLPITASSLPHPTQQSPEKKVLGPGGCTCRHNRFCNEAQSFGLLDPKLCYLLDGILFIYGVILTALFLRVKFSRSADAPAYQQGQNQLYNELNLGRREEYDVLDKRRGRDPEMGGKPQRRKNPQEGLYNELQKDKMAEAYSEIGMKGERRRGKGHDGLYQGLSTATKDTYDALHMQALPPR

SEQ ID NO: 40595 - protein, 194 aa, synthetic construct
MKWKALFTAAILQAQLPITASSLPHPTQQSPEKKVLGPGGCTCRHNRFCNEAQSFGLLDPKLCYLLDGILFIYGVILTALFLRVKFSRSADAPAYQQGQNQLYNELNLGRREEYDVLDKRRGRDPEMGGKPRRKNPQEGLYNELQKDKMAEAYSEIGMKGERRRGKGHDGLYQGLSTATKDTYDALHMQALPPR

SEQ ID NO: 40596 - protein, 172 aa, synthetic construct
MVRSWEKGLHSLVRTPLTTSEDQQVFEEAQSFGLLDPKLCYLLDGILFIYGVILTALFLRVKFSRSADAPAYQQGQNQLYNELNLGRREEYDVLDKRRGRDPEMGGKPQRRKNPQEGLYNELQKDKMAEAYSEIGMKGERRRGKGHDGLYQGLSTATKDTYDALHMQALPPR

SEQ ID NO: 40597 - protein, 171 aa, synthetic construct
MVRSWEKGLHSLVRTPLTTSEDQQVFEEAQSFGLLDPKLCYLLDGILFIYGVILTALFLRVKFSRSADAPAYQQGQNQLYNELNLGRREEYDVLDKRRGRDPEMGGKPRRKNPQEGLYNELQKDKMAEAYSEIGMKGERRRGKGHDGLYQGLSTATKDTYDALHMQALPPR

SEQ ID NO: 40598 - protein, 322 aa, synthetic construct
MKWKALFTAAILQAQLPITEAQSFGLLDPKLCYLLDGILFIYGVILTALFLRVKFSRSADAPAYQQGQNQLYNELNLGRREEYDVLDKRRGRDPEMGGKPQRRKNPQEGLYNVSRGDLTFDLGKLEEGLEEGSRGRAGGRAGGGLQRKGWRKGWRRAPEEGLEEGLEEGSGGRAGGRAGGGLRRKGWRKGWRRAPEEGLEEGLEEGSGGRAGGRAGGGLRRRAGGRAGGGLRRKGWRKGWRRAPEEGLEEGLEEGSGGRAGGRAGGGLRRKGWRKGWRRAPEEGLEEGFGGRAGGRAGGGLQRKAVAPHSVVFVCPDLPFLD

SEQ ID NO: 40599 - protein, 171 aa, synthetic construct; identical to SEQ ID NO: 40597

SEQ ID NO: 40600 - protein, 164 aa, synthetic construct
MKWKVSVLACILHVRFPGAEAQSFGLLDPKLCYLLDGILFIYGVIITALYLRAKFSRSAETAANLQDPNQLYNELNLGRREEYDVLEKKRARDPEMGGKQQRRRNPQEGVYNALQKDKMAEAYSEIGTKGERRRGKGHDGLYQGLSTATKDTYDALHMQTLAPR

SEQ ID NO: 40601 - protein, 188 aa, synthetic construct
MKWKVSVLACILHVRFPGAEAQSFGLLDPKLCYLLDGILFIYGVIITALYLRAKFSRSAETAANLQDPNQLYNELNLGRREEYDVLEKKRARDPEMGGKQRRRNPQEGVYNALQKDKMAEAYSEIGTKGERRRGKGHDGLYQDSHFQAVQFGNRREREGSELTRTLGLRARPKACRHKKPLSLPAAVS

SEQ ID NO: 40602 - protein, 177 aa, synthetic construct
MKWKVSVLACILHVRFPGAEAQSFGLLDPKLCYLLDGILFIYGVIITALYLRAKFSRSAETAANLQDPNQLYNELNLGRREEYDVLEKKRARDPEMGGKQQRRRNPQEGVYNALQKDKMAEAYSEIGTKGERRRGKGHDGLYQPADIRSLLASQQPYPNTLCSKNSSTGEEGDVIRL

SEQ ID NO: 40603 - protein, 206 aa, synthetic construct
MKWKVSVLACILHVRFPGAEAQSFGLLDPKLCYLLDGILFIYGVIITALYLRAKFSRSAETAANLQDPNQLYNELNLGRREEYDVLEKKRARDPEMGGKQQRRRNPQEGVYNALQKDKMAEAYSEIGTKGERRRGKGHDGLYQDSHFQAVQFGNRREREGSELTRTLGLRARPKGESTQQSSQSCASVFSIPTLWSPWPPSSSSQL

SEQ ID NO: 40604 - protein, 166 aa, synthetic construct
MKWTALVIVAILQAQFPITAAQSFGLLDPKLCYLLDGILFIYGVIITALFLREKFSRSADVSAYQSGQNQVYNELNIGRREEYAVLDRRGGLDPEMGGKPQRKKNPHEVVYNELRKDKMAEAYSEIGMKGENQRRRGKGHDGLYQGLSTATKDTYDALHMQTLPPR

SEQ ID NO: 40605 - protein, 164 aa, synthetic construct
MKWTASVLACILQVQFPGAEAQSFGLLDPKLCYMLDGILFIYGVIVTALYLRAKFSRSADAAAYLQDPNQLYNELNLGRREEYDVLDKKRPRDPEMGGKQQRRRNPQEGVYNALQKDKMAEAYSEIGMKGERRRGKGHDGLYQGLSTATKDTYDALHMQTLPPR

SEQ ID NO: 40606 - protein, 26 aa, synthetic construct
LSVIGFRILLLKVAGFNLLMTLRLWS

SEQ ID NO: 40607 - protein, 26 aa, synthetic construct
LSVIGFRILLLKVAGFNLLMTLRLWS

SEQ ID NO: 40608 - protein, 26 aa, synthetic construct
LSLIGFRILLLKVAGFNLLMTLRLWS

SEQ ID NO: 40609 - protein, 26 aa, synthetic construct
LSVMGFRILLLKVAGFNLLMTLRLWS

SEQ ID NO: 40610 - protein, 26 aa, synthetic construct
LSVMGLRILLLKVAGFNLLMTLRLWS

SEQ ID NO: 40611 - protein, 26 aa, synthetic construct
LSVIGLRLLLLKVAGFNLLMTLRLWS

SEQ ID NO: 40612 - protein, 26 aa, synthetic construct
LSVMGLRILLLKVAGFNLLMTLRLWS

SEQ ID NO: 40613 - protein, 26 aa, synthetic construct
LSVMGLRILLLKVAGFNILMTLRLWS

SEQ ID NO: 40614 - protein, 26 aa, synthetic construct
LFVIGLRILLLKAVGFNLLMTLRLWS

SEQ ID NO: 40615 - protein, 26 aa, synthetic construct
LSVIGLRILFLKVAGFNLLMTLRLWS

SEQ ID NO: 40616 - protein, 26 aa, synthetic construct
LSVIGFRILLLKVAGFNLLMTLRLWS

SEQ ID NO: 40617 - protein, 26 aa, synthetic construct
LYVIGLRILLLKVAGFNLLMTLRLWS

SEQ ID NO: 40618 - protein, 26 aa, synthetic construct
LSVIGLRILLLKVAGFNLLMTLRLWS

SEQ ID NO: 40619 - protein, 26 aa, synthetic construct
LFMIGLRVILLKVAGFNLFMTLQLWS

SEQ ID NO: 40620 - protein, 26 aa, synthetic construct
LLVIGLRILLLKVIGFNLFMTLRLWS

SEQ ID NO: 40621 - protein, 26 aa, synthetic construct
LSLIGFRILLLKVVGFNLFMTLRLWS

SEQ ID NO: 40622 - protein, 26 aa, synthetic construct
LLVMGLRVLLLKVAGFNLFVTLRLWS

SEQ ID NO: 40623 - protein, 26 aa, synthetic construct
LSVIALRILLLKVAGFNLLMTLRLWS

SEQ ID NO: 40624 - protein, 26 aa, synthetic construct
LTVIMFRIIFLKAVGFNLLMTLKLWS

SEQ ID NO: 40625 - protein, 26 aa, synthetic construct
LSVTVFRILLLKVVGFNLLMTLRLWS

SEQ ID NO: 40626 - protein, 26 aa, synthetic construct
LSVIVFRILLLKVVGFNLLMTLRLWS

SEQ ID NO: 40627 - protein, 26 aa, synthetic construct
LSLIVLRIIFLKTVGFNLLMTLRLWS

SEQ ID NO: 40628 - protein, 26 aa, synthetic construct
LSLIGLRIIFLKTVAFNLLMTFRLWS

SEQ ID NO: 40629 - protein, 26 aa, synthetic construct
LAMIFLRVIFVKTVGFNLLMTLKLWS

SEQ ID NO: 40630 - protein, 26 aa, synthetic construct
FSQLGLKIIFMKAVIFNVLITMLMWK

SEQ ID NO: 40631 - protein, 26 aa, synthetic construct
FTQLGLKIILMKGVIFNVVMTILMWK

SEQ ID NO: 40632 - protein, 26 aa, synthetic construct
LTVLGLRVIFLKTVSFNLLFTFRLWS

SEQ ID NO: 40633 - protein, 26 aa, synthetic construct
LRMLGLRFLTIKAIVFNIIITLRLWS

SEQ ID NO: 40634 - protein, 26 aa, synthetic construct
LTVLGLKIIFLKSIGFNLLMTLRLWT

SEQ ID NO: 40635 - protein, 26 aa, synthetic construct
LTVLVLRVLFLKSIGFNVLMTIRMWG

SEQ ID NO: 40636 - protein, 26 aa, synthetic construct
LTVLGLRIIFLKSILFNLLMTVRITL

SEQ ID NO: 40637 - protein, 26 aa, synthetic construct
LTVFGLRILFVKSIVFNMLMTIRIWV

SEQ ID NO: 40638 - protein, 26 aa, synthetic construct
LTVFGMRMLFVKGVIFNILMSVRVWT

SEQ ID NO: 40639 - protein, 26 aa, synthetic construct
LTVLGLRMLFAKTVAVNFLLTAKLFF

SEQ ID NO: 40640 - protein, 26 aa, synthetic construct
LTVLGLRMLFAKSVAINFLLTAKLLF

SEQ ID NO: 40641 - protein, 26 aa, synthetic construct
LTVLELRMLLAKSVAINFLLTAKLFF

SEQ ID NO: 40642 - protein, 26 aa, synthetic construct
LTVLGLRMLFAKSIAINFLLTAKLFF

SEQ ID NO: 40643 - protein, 26 aa, synthetic construct
LTVLGLRLLLAKTVAINFLLTAKLFF

SEQ ID NO: 40644 - protein, 26 aa, synthetic construct
LTVLGLRLLFAKTIAINFLLTVKLFF

SEQ ID NO: 40645 - protein, 26 aa, synthetic construct
LTVLGLRMLFVKSVAINFVLTAKLFF

SEQ ID NO: 40646 - protein, 26 aa, synthetic construct
LTVLGLRMLFAKSVAVNFLLTAKLFL

SEQ ID NO: 40647 - protein, 26 aa, synthetic construct
VTVLGFRMLFAKSVAVNFLLTAKLFF

SEQ ID NO: 40648 - protein, 26 aa, synthetic construct
LTVLGLRMVFAKSLAINFVLTAKLFF

SEQ ID NO: 40649 - protein, 26 aa, synthetic construct
LTVLGLRMVFAKSLAINFLLTAKLFF

SEQ ID NO: 40650 - protein, 26 aa, synthetic construct
LTVLGLRMVFAKSLAINFLLTAKLFF

SEQ ID NO: 40651 - protein, 26 aa, synthetic construct
LSVLGLRMLFAKSVAVNFLFTAKLFF

SEQ ID NO: 40652 - protein, 26 aa, synthetic construct
LTVLGLRMVFAKSLAINFLLTAKLFF

SEQ ID NO: 40653 - protein, 26 aa, synthetic construct
LSVLGLRMLFAKSVAVNFLLTAKLFF

SEQ ID NO: 40654 - protein, 26 aa, synthetic construct
LTVLGLRMLFAKSVAINFLLTAKLFL

SEQ ID NO: 40655 - protein, 26 aa, synthetic construct
LTVLGLRILFVKSVAINILLTAKLFF

SEQ ID NO: 40656 - protein, 26 aa, synthetic construct
LTVLGLRMLFAKSVAINFLLTAKLFF

SEQ ID NO: 40657 - protein, 26 aa, synthetic construct
LTVLGLRVLFAKTVAVNFLLTAKLLF

SEQ ID NO: 40658 - protein, 26 aa, synthetic construct
LTLLGLRMVLAKSVAINFLLTAKLFF

SEQ ID NO: 40659 - protein, 26 aa, synthetic construct
ITLLGFRVLLAKSIAVNFVLTIKFFL

SEQ ID NO: 40660 - protein, 26 aa, synthetic construct
ITLLGLRVLLAKSIAVNLFLTIKYFL

SEQ ID NO: 40661 - protein, 26 aa, synthetic construct
VVILALRVLLVKSIALNFLLTIQASC

SEQ ID NO: 40662 - protein, 26 aa, synthetic construct
MAVLGLRVLLAKSIAFNTLMSIKLFL

SEQ ID NO: 40663 - protein, 25 aa, synthetic construct
MAVLGRVLLAKSIAFNVLMSIKLFL

SEQ ID NO: 40664 - protein, 26 aa, synthetic construct
MAVLGFRVLLAKSIAINTLMSIKLFL

SEQ ID NO: 40665 - protein, 26 aa, synthetic construct
LLVTGLRILLAKCVAVNVMMTVKAFV

SEQ ID NO: 40666 - protein, 26 aa, synthetic construct
MTVMSLRVLFAKSLAFNLLLSATFFL

SEQ ID NO: 40667 - protein, 26 aa, synthetic construct
LTVMGLRILFFKSVAFNVLMTARAWV

SEQ ID NO: 40668 - protein, 26 aa, synthetic construct
MAVLGLRVLLAKSIAFNTLMSIKLIL

SEQ ID NO: 40669 - protein, 26 aa, synthetic construct
LTLMGLRFLLFKSIAVNLLMTARVWI

SEQ ID NO: 40670 - protein, 26 aa, synthetic construct
LTVMGLRVLFFKSVAFNVMMTARCCS

SEQ ID NO: 40671 - protein, 26 aa, synthetic construct
SATILYEILLGKATLYAVLVSALVLM

SEQ ID NO: 40672 - protein, 26 aa, synthetic construct
SATILYEILLGKATLYAVLVSALVLM

SEQ ID NO: 40673 - protein, 26 aa, synthetic construct
SATILYEILLGKATLYAVLVSALMLM

SEQ ID NO: 40674 - protein, 26 aa, synthetic construct
SATILYEILLGKATLYAVLVSALVGH

SEQ ID NO: 40675 - protein, 26 aa, synthetic construct
SATVLYEILLGKATLYAVLVSALVLM

SEQ ID NO: 40676 - protein, 26 aa, synthetic construct
SATLLYEILLGKATLYAVLVSALVLM

SEQ ID NO: 40677 - protein, 26 aa, synthetic construct
SATLLYEILLGKATLYAVLVSALVLM

SEQ ID NO: 40678 - protein, 26 aa, synthetic construct
SATILYEILLGKATLYAVLVSALVLM

SEQ ID NO: 40679 - protein, 26 aa, synthetic construct
SATLLYEVLLGKAALYAVLVSGLVLM

SEQ ID NO: 40680 - protein, 26 aa, synthetic construct
SATLLYEILLGKAALYAVLVSALVLM

SEQ ID NO: 40681 - protein, 26 aa, synthetic construct
SATILYEILLGKATLYAVLVSTLVLM

SEQ ID NO: 40682 - protein, 26 aa, synthetic construct
SATILYEILLGKATLYALLVSILVLR

SEQ ID NO: 40683 - protein, 26 aa, synthetic construct
SATLLYEILLGKATLYAVLVSALMLM

SEQ ID NO: 40684 - protein, 26 aa, synthetic construct
SATILYEILLGKATVYAVLVSTLVLM

SEQ ID NO: 40685 - protein, 26 aa, synthetic construct
SATILYEILLGKATLYAILVSVLALM

SEQ ID NO: 40686 - protein, 26 aa, synthetic construct
SATILYEILLGKATLYALLVGALVLM

SEQ ID NO: 40687 - protein, 26 aa, synthetic construct
SATILYEILLGKATLYAVLVSTLVVM

SEQ ID NO: 40688 - protein, 26 aa, synthetic construct
SATILYEILLGKATLYAVLVSALVLM

SEQ ID NO: 40689 - protein, 26 aa, synthetic construct
SATVLYEVLLGKAALYAVLVSALVLV

SEQ ID NO: 40690 - protein, 26 aa, synthetic construct
SATFLYEILLGKAVLYGLLVSALVWI

SEQ ID NO: 40691 - protein, 26 aa, synthetic construct
SATFLYEILLGKAMLYGLLVSVLVWR

SEQ ID NO: 40692 - protein, 26 aa, synthetic construct
SATFLYEILLGKALVYAVLVSTLVWR

SEQ ID NO: 40693 - protein, 26 aa, synthetic construct
AGKFVYIMLIFKSILYGIFVMGMMLW

SEQ ID NO: 40694 - protein, 26 aa, synthetic construct
AGKFLYIMLILKSILYGIFVMGMMLR

SEQ ID NO: 40695 - protein, 26 aa, synthetic construct
AGKFVYIMLIFKSILYGIFVMGMMLW

SEQ ID NO: 40696 - protein, 26 aa, synthetic construct
SLKLTYLILCGKALVYAVLVSGLVWT

SEQ ID NO: 40697 - protein, 26 aa, synthetic construct
AGKSVYILLIFKSALYGFFLMGLVLR

SEQ ID NO: 40698 - protein, 26 aa, synthetic construct
NGVYSYILILCKTALYGLIVTAIVLR

SEQ ID NO: 40699 - protein, 26 aa, synthetic construct
IGRFAYLLLVSKSAAYGLFVTISMCR

SEQ ID NO: 40700 - protein, 26 aa, synthetic construct
TGTLSYVLLMSKSAAYAVFILFLAWK

SEQ ID NO: 40701 - protein, 26 aa, synthetic construct
WMKLAYGVTIAKSGLYGLVIFVFVWR

SEQ ID NO: 40702 - protein, 26 aa, synthetic construct
TARFSYIIFIFKSSIYGAFVAFLVWR

SEQ ID NO: 40703 - protein, 26 aa, synthetic construct
TAKLSYSIVVFKSCIYGAFVVFLVWK

SEQ ID NO: 40704 - protein, 26 aa, synthetic construct
RAKLSYTALLMKSSIYGLFVLLLVWK

SEQ ID NO: 40705 - protein, 26 aa, synthetic construct
STRLTYLLFLGKSTLYGLLLTVLVWK

SEQ ID NO: 40706 - protein, 26 aa, synthetic construct
TTMLAYVLFIAKSVLYGLFVIVIVRR

SEQ ID NO: 40707 - protein, 26 aa, synthetic construct
TAKLTYLILICKSILYGIIVSVLACK

SEQ ID NO: 40708 - protein, 26 aa, synthetic construct
TARMTYLMVLVKSILYALFVSIIVWK

SEQ ID NO: 40709 - protein, 26 aa, synthetic construct
SAYYMYLLLLLKSVVYFAIITCCLLR

SEQ ID NO: 40710 - protein, 26 aa, synthetic construct
SAYYMYLLLLLKSVVYFAIIAFCLLR

SEQ ID NO: 40711 - protein, 26 aa, synthetic construct
SACYTYLLLLVKSVVYSAATAFCVIR

SEQ ID NO: 40712 - protein, 25 aa, synthetic construct
SAYYTYLLLLLKSAASAIVAICLFR

SEQ ID NO: 40713 - protein, 26 aa, synthetic construct
SAYYTYLLLLLKSVLYLAIISFFLLR

SEQ ID NO: 40714 - protein, 26 aa, synthetic construct
SAYYTYLLLLLKSVIYLAIISFSLLR

SEQ ID NO: 40715 - protein, 26 aa, synthetic construct
SVYWTYLLLLLKSVVYLAFVTFSLLR

SEQ ID NO: 40716 - protein, 26 aa, synthetic construct
SVYYTYLLLLLKSSVYLAIVTFSLFR

SEQ ID NO: 40717 - protein, 26 aa, synthetic construct
SAYYTYLLLLLKSLVYSIIIVICLLG

SEQ ID NO: 40718 - protein, 26 aa, synthetic construct
SAYYTYVLLLLKSLVYSAIIAICLLG

SEQ ID NO: 40719 - protein, 26 aa, synthetic construct
SAYYTYLLLLLKSVVYCIIITSCVFR

SEQ ID NO: 40720 - protein, 26 aa, synthetic construct
SAYYTYLLLLLKSVIYLAIITFCLFR

SEQ ID NO: 40721 - protein, 26 aa, synthetic construct
SAYYTYLLLLLKSLVYSVVITFYLLG

SEQ ID NO: 40722 - protein, 26 aa, synthetic construct
SAYYTYLLLLLKSLVYFAVISFCLVR

SEQ ID NO: 40723 - protein, 26 aa, synthetic construct
SAYYTYLLLLLKSVVYFIIITSCVFR

SEQ ID NO: 40724 - protein, 26 aa, synthetic construct
SAYYTYLLLLLKSSLYFATTISCLFR

SEQ ID NO: 40725 - protein, 26 aa, synthetic construct
SAYYTYVILLVKSVVYTIIIAYRLLG

SEQ ID NO: 40726 - protein, 26 aa, synthetic construct
SAYYTYLLLLLKSAFYLAIVVFCLLR

SEQ ID NO: 40727 - protein, 26 aa, synthetic construct
SAYYTYLLLLLKSSVYFVIIVFCLLR

SEQ ID NO: 40728 - protein, 26 aa, synthetic construct
SAYYTYTILLMKSITYFAVILFFLYQ

SEQ ID NO: 40729 - protein, 26 aa, synthetic construct
SAFYTYTILLVKSTIYFTIVLFFLYQ

SEQ ID NO: 40730 - protein, 26 aa, synthetic construct
TAYYTYTILLLKSTMYCTFMLFLIYK

SEQ ID NO: 40731 - protein, 26 aa, synthetic construct
AAHLVYLVLLLKSSMYYVIVLFFIYR

SEQ ID NO: 40732 - protein, 26 aa, synthetic construct
TAYLVYIILLLKSSMYNIIILFFIYR

SEQ ID NO: 40733 - protein, 26 aa, synthetic construct
TAYFVYILLLLKSTMYYIIVLFFMYR

SEQ ID NO: 40734 - protein, 26 aa, synthetic construct
AAYLTYLLLITKSALYGPIMFFIIYR

SEQ ID NO: 40735 - protein, 26 aa, synthetic construct
VATLTYTILLMKSVLYCGIISAILYK

SEQ ID NO: 40736 - protein, 26 aa, synthetic construct
LATFTYTLLLVKSVVYCGIISIFLRL

SEQ ID NO: 40737 - protein, 25 aa, synthetic construct
LWLGVLRLLLFKLLLFDLLLTCSCL

SEQ ID NO: 40738 - protein, 25 aa, synthetic construct
LWLGVLRLLLFKLLLFDLLLTCSCL

SEQ ID NO: 40739 - protein, 25 aa, synthetic construct
LWLGVLRLLLFKLLLFDLLLTCSCL

SEQ ID NO: 40740 - protein, 25 aa, synthetic construct
LWLSLLRLLLFKLLLLDVLLTCSHL

SEQ ID NO: 40741 - protein, 25 aa, synthetic construct
LRLSVLRLLLFKLLLLDVFLTCSRL

SEQ ID NO: 40742 - protein, 24 aa, synthetic construct
LQLGALRLLLFKLLLLDVLLTCGL

SEQ ID NO: 40743 - protein, 25 aa, synthetic construct
LRLGALRLLLFKLLLLDVLLTCGRL

SEQ ID NO: 40744 - protein, 25 aa, synthetic construct
LRLGALRLLLFKLLLLDVLLTCSRL

SEQ ID NO: 40745 - protein, 25 aa, synthetic construct
LRLGALRLLLFKLLLLDVLLTCSRL

SEQ ID NO: 40746 - protein, 25 aa, synthetic construct
LRLGALRLLLFKLLLLDVLLTCNRL

SEQ ID NO: 40747 - protein, 25 aa, synthetic construct
LRLGALRLLLFKLLLFDVLLTCSRL

SEQ ID NO: 40748 - protein, 25 aa, synthetic construct
LWLGALRLLLFKLLLLDTLLTYGRG

SEQ ID NO: 40749 - protein, 25 aa, synthetic construct
LWLAALRLLLFKLLLGDVLLTCTRL

SEQ ID NO: 40750 - protein, 25 aa, synthetic construct
LRLGALRLLLFKLLLFDVLLTCSRL

SEQ ID NO: 40751 - protein, 25 aa, synthetic construct
LRLEALRLLLFKLLLLDVLLTCSRF

SEQ ID NO: 40752 - protein, 25 aa, synthetic construct
LRLGALRLLLFKLLLFDVLLTCSRL

SEQ ID NO: 40753 - protein, 25 aa, synthetic construct
LRLGALRLLLFKLLLLDVLLTCHRL

SEQ ID NO: 40754 - protein, 25 aa, synthetic construct
LRLEALRLLLFKLLLLDVLLTCSWR

SEQ ID NO: 40755 - protein, 25 aa, synthetic construct
LRLGALRLLLFKLLLFDVLLTCCVS

SEQ ID NO: 40756 - protein, 25 aa, synthetic construct
LRLGALRLLLFKLLLFDVLLTCSRL

SEQ ID NO: 40757 - protein, 25 aa, synthetic construct
LRLGALRLLLFKLLLFDVLLTCSRL

SEQ ID NO: 40758 - protein, 25 aa, synthetic construct
LILGAIRLIFFKLLIFDVLMTCSHL

SEQ ID NO: 40759 - protein, 111 aa, synthetic construct
DVQMIQTPDSLAVSLGQRATISCRASESVDNYGISFMHWYQQKPGQSPKLLIYRASNLESGIPARFSGSGSRTDFTLTINPVETDDVATYYCQQNNKDPPTFGGGTKLEIK

SEQ ID NO: 40760 - protein, 107 aa, synthetic construct
DVQMIQTPSSLSASLGDRVTISCRASQDIGNYLNWYQQKPDGTVKLLIYYTSRLHSGVPSRFSGSGSGTEYSLTISNLEQEDIATYFCQQGSALPPTFGGGTKLEIN

SEQ ID NO: 40761 - protein, 112 aa, synthetic construct
DIVLTQSPATLSLSPGDRATISCRASESVTILGSHLIYWYQQKPGQPPRLLIQLASNVQTGVPARFSGSGSRTDFTLTISSVEPEDFAVYYCLQSRTIPRTFGQGTKLEIKR

SEQ ID NO: 40762 - protein, 108 aa, synthetic construct
DIQMTQSPSSLSASVGDRVTITCSASQDISNYLNWYQQKPGKAPKLLIYYTSNLHSGVPSRFSGSGSGTDFTLTISSLQPEDFATYYCQQYRKLPWTFGQGTKLEIKR

SEQ ID NO: 40763 - protein, 114 aa, synthetic construct
DIVMTQSPDSLAVSLGERATINCESSQSLLNSGNQKNYLTWYQQKPGQPPKPLIYWASTRESGVPDRFSGSGSGTDFTLTISSLQAEDVAVYYCQNDYSYPYTFGQGTKLEIKR

SEQ ID NO: 40764 - protein, 107 aa, synthetic construct
DIQMTQSTSSLSASLGDRVTISCSASQGINNYLNWYQQKPDGTVELLIYYTSTLQSGVPSRFSGSGSGTDYSLTISNLEPEDIGTYYCQQYSKLPRTFGGGTKLEIK

SEQ ID NO: 40765 - protein, 106 aa, synthetic construct
DIQMTQSPASLSVSVGETVTITCRASENIYSNLAWYQQKQGKSPQLLVYAATNLADGVPSRFSGSGSGTQYSLKINSLQSEDFGSYYCQHFWGTWTFGGGTTLEIK

SEQ ID NO: 40766 - protein, 107 aa, synthetic construct
EIVLTQSPATLSLSPGERATLSCSASSSVSYMHWYQQKPGQAPRLLIYDTSKLASGIPARFSGSGSGTDFTLTISSLEPEDVAVYYCFQGSVYPFTFGQGTKLEIKR

SEQ ID NO: 40767 - protein, 107 aa, synthetic construct
DIQMTQTTSSLSASLGDRVTISCRASQDISKYLNWYQQKPDGTVKLLIYHTSRLHSGVPSRFSGSGSGTDYSLTISNLEQEDIATYFCQQGNTLPYTFGGGTKLEIT

SEQ ID NO: 40768 - protein, 107 aa, synthetic construct
EIVMTQSPATLSLSPGERATLSCRASQDISKYLNWYQQKPGQAPRLLIYHTSRLHSGIPARFSGSGSGTDYTLTISSLQPEDFAVYFCQQGNTLPYTFGQGTKLEIK

SEQ ID NO: 40769 - protein, 107 aa, synthetic construct
EIVLTQSPATLSLSPGERATLSCRASQSVSSYLAWYQQKPGQAPRLLIYDASNRATGIPARFSGSGSGTDFTLTISSLEPEDFAVYYCQQRSNWPITFGQGTRLEIK

SEQ ID NO: 40770 - protein, 113 aa, synthetic construct
DIVMTQTPLSLPVTPGEPASISCRSSKSLLHSNGITYLYWYLQKPGQSPQLLIYQMSNLVSGVPDRFSGSGSGTDFTLKISRVEAEDVGVYYCAQNLELPYTFGGGTKVEIKR

SEQ ID NO: 40771 - protein, 113 aa, synthetic construct
DIQMTQSPSSLSASVGDRVTITCRSSQSIVHSVGNTFLEWYQQKPGKAPKLLIYKVSNRFSGVPSRFSGSGSGTDFTLTISSLQPEDFATYYCFQGSQFPYTFGQGTKVEIKR

SEQ ID NO: 40772 - protein, 110 aa, synthetic construct
EIVLTQSPGTLSLSPGERATLSCRASQSVGGYLAWYQQKPGQAPRLLIYDASNRATGIPARFSGSGSGTDFTLTISSLEPEDFAVYYCQQRNNWPPMYTFGQGTKLEIKR

SEQ ID NO: 40773 - protein, 112 aa, synthetic construct
DIQMTQSPATIENTSLSASVGDRVTITCRASQGISSWLTWYQQKPEKAPKSLIYAASSLQSGVPSRFSGSGSGTDFTLTISSLQPEDFATYYCQQYDSYPITFGQGTRLEIK

SEQ ID NO: 40774 - protein, 112 aa, synthetic construct
DEIVLTQSPDSLAVSLGERATINCKASQSVDFDGDSYLNWYQQKPGQPPKVLIYAASTLQSGVPSRFSGSGSGTDFTLTINSLEAEDAATYYCQQSNEDPWTFGGGTKVEIK

SEQ ID NO: 40775 - protein, 107 aa, synthetic construct
DIQMTQSPSSLSASVGDRVTITCRASQGISSWLAWYQQKPEKAPKSLIYAASSLQSGVPSRFSGSGSGTDFTLTISSLQPEDFATYYCQQYNSYPPTFGGGTKVEIK

SEQ ID NO: 40776 - protein, 112 aa, synthetic construct
DVVMTQSPLSLPVTLGQPASISCRSSQSIVHSDGNTYLEWYQQRPGQSPRRLIYKVSNRFSGVPDRFSGSGSGTDFTLKISRVEAEDVGVYYCFQGSHAPWTFGGGTKVEIK

SEQ ID NO: 40777 - protein, 106 aa, synthetic construct
QIVLTQSPALMSASPGEKVTMTCSASSSVRYMYWYQQKPRSSPKPWIHLTSNLASGVPARFSGSGSGTSYSLTISSMEAEDAATYYCQQWSSHPFTFGSGTKLEIK

SEQ ID NO: 40778 - protein, 113 aa, synthetic construct
EIVLTQSPGSLAVSPGERVTMSCKSSQSVFFSSSQKNYLAWYQQIPGQSPRLLIYWASTRESGVPDRFTGSGSGTDFTLTISSVQPEDLAIYYCHQYLSSRTFGQGTKLEIKR

SEQ ID NO: 40779 - protein, 113 aa, synthetic construct
DIVMTQSPDSLTVSLGERTTINCKSSQSVLDSSKNKNSLAWYQQKPGQPPKLLLSWASTRESGIPDRFSGSGSGTDFTLTIDSLQPEDSATYYCQQSAHFPITFGQGTRLEIK

SEQ ID NO: 40780 - protein, 113 aa, synthetic construct
DVLLTQSPLSLPVTLGQPASISCRSSQTIVHSNGNTYLEWFQQRPGQSPRLLIYQVSNRFSGVPDRFSGSGSGTDFTLKISRVEAEDVGVYYCFQGSHVPRTFGGGTKVEIKR

SEQ ID NO: 40781 - protein, 108 aa, synthetic construct
HIVLTQSPSSLSASLGDRVTISCRASQDISTYLNWYQQKPDGTVKLLIFYTSRLHAGVPSRFSGSGSGTHHSLTISNLEQEDIATYFCQQGNSLPFTFGSGTKLEIKR

SEQ ID NO: 40782 - protein, 109 aa, synthetic construct
DHIVLTQSPSSLSASLGDRVTISCRASQDISTYLNWYQQKPDGTVKLLIFYTSRLHAGVPSRFSGSGSGTHHSLTISNLEQEDIATYFCQQGNSLPFTFGSGTKLEIKR

SEQ ID NO: 40783 - protein, 112 aa, synthetic construct
DIVMTQSPDSLAVSLGERATINCRASKSVSTSGYSFMHWYQQKPGQPPKLLIYLASNLESGVPDRFSGSGSGTDFTLTISSLQAEDVAVYYCQHSREVPWTFGQGTKVEIKR

SEQ ID NO: 40784 - protein, 113 aa, synthetic construct
DIVMTQTPLTLSVTIGQPASISCKSSQSLLDSDGKTYLNWLLQRPGQSPERLIYLVSKLDSGVPDRFTGSGSGTDFTLKISRVEAEDLGVYCCWQGTHFPYTFGGGTKVEIKG

SEQ ID NO: 40785 - protein, 112 aa, synthetic construct
DIQLTQSPSSLSASVGDRVTITCKASQSVDYEGDSFLNWYQQKPGKAPKLLIYAASNLESGVPSRFSGSGSGTDFTLTISSLQPEDFATYYCQQSNEDPLTFGQGTKVEIKR

SEQ ID NO: 40786 - protein, 114 aa, synthetic construct
DIVMSQSPSSLAVSVGEKVTMSCKSSQSLLHSSNQKNYLAWYQQKPGQSPKVLIYWASTRESGVPDRFTGSGSGTDFTLTITSVKSEDLAVYYCQQYYSYPWTFGGGTRLEIKR

SEQ ID NO: 40787 - protein, 109 aa, synthetic construct
EIVLTQSPGTLSLSPGERATLSCRASQSVSSSYLAWYQQKPGQAPRLLIYGTSSRATGIPDRFSGSGSGTDFTLTISRLEPEDFAVYYCQQYGSSPFTFGGGTKVEIKR

SEQ ID NO: 40788 - protein, 108 aa, synthetic construct
DIQMTQSPSSLSASVGDRVTITCRASQSISLWLNWYQQKPGKAPKLLIYAASTLQSGVPSRFSGSGSGTDFTLTISSLQPEDFATYYCQQYYTSPYTFGQGTKVEIKR

SEQ ID NO: 40789 - protein, 109 aa, synthetic construct
DIQMTQSPSSLSASVGDRVTITCRASQSISSYLNWYQQKPGKAPKLLIYAVSTLQSGVPSRFSGSGSGTDFTLTISSLQPEDFATYYCQQSGTFPPTTFGQGTKVEIKR

SEQ ID NO: 40790 - protein, 106 aa, synthetic construct
QSPSSLAVSAGEKVTMSCKSSQSLLNSRTRKNYLAWYQQKPGQSPKLLIYWASTRESGVPDRFTGSGSGTDFTLTISSVQAEDLAVYYCKQSNLYTFGGGTKLEIK

SEQ ID NO: 40791 - protein, 104 aa, synthetic construct
MTQSPKFLLVSAGDRVTLTCKASQSVNNDVYWYQQEPGQSPKLLIYWASTRESGVPDRFTGSGSGTDFTLTISSVQAEDLAVYYCKQSYNLYTFGGGTKLEIKR

SEQ ID NO: 40792 - protein, 107 aa, synthetic construct
DIQMTQSPSSLSASLGERVSLTCRATQELSGYLSWLQQKPDGTIKRLIYAASTLDSGVPKRFSGNRSGSDYSLTISSLESEDFADYYCLQYAIYPYTFGGGTKLEIK

SEQ ID NO: 40793 - protein, 112 aa, synthetic construct
DTIVLTQSPASLAVSLGQRATISCRASESVDSYGNSFMHWYQQKPGQPPKLLIYLASNLESGVPARFSGSGSRTDFTLTIDPVEADDAATYYCQQNNYDPWTFGGGTKLEIK

SEQ ID NO: 40794 - protein, 108 aa, synthetic construct
DIQMTQSPSSLSASVGDRVTITCKASQDVGIAVAWYQQKPGKVPKLLIYWASTRHTGVPDRFSGSGSGTDFTLTISSLQPEDVATYYCQQYSSYPYTFGQGTKVEIKR

SEQ ID NO: 40795 - protein, 107 aa, synthetic construct
DIVMTQSQKSMSTSVGDRVSITCKASQDVITGVAWYQQKPGQSPKLLIYSASYRYTGVPDRFTGSGSGTDFTFTISNVQAEDLAVYYCQQHYSTPLTFGAGTKLELK

SEQ ID NO: 40796 - protein, 113 aa, synthetic construct
QSVLTQPPSVSGAPGQRVTISCTGSGSNIGAPYDVSWYQQLPGTAPKLLIYHNNKRPSGVPDRFSGSKSGTSASLAITGLQAEDEADYYCQSYDSSSISTIFGGGTKLTVLGA

SEQ ID NO: 40797 - protein, 113 aa, synthetic construct
QSVLTQPPSVSGAPGQRVTISCTGSGSNIGAPYDVSWYQQLPGTAPKLLIYHNNKRPSGVPDRFSGSKSGTSASLAITGLQAEDEADYYCATVEAGLSGSVFGGGTKLTVLGA

SEQ ID NO: 40798 - protein, 107 aa, synthetic construct
DIQMTQSPSSLSASVGDRVTITCSASSSVSYMYWYQQKPGKAPKLLIYLTSNLASGVPSRFSGSGSGTDFTLTISSLQPEDFATYYCQQWRSNPFTFGQGTKLEIKR

SEQ ID NO: 40799 - protein, 108 aa, synthetic construct
EIVMTQSPATLSVSPGERATLSCKASQSVSNDVVWYQQKPGQAPRLLIYYASNRYTGIPARFSGSGSGTEFTLTISSLQSEDFAVYYCQQDYTSPWTFGQGTKLEIKR

SEQ ID NO: 40800 - protein, 107 aa, synthetic construct
DILLTQSPVILSVSPGERVSFSCRASQSIGTNIHWYQQRTNGSPRLLIKYASESISGIPSRFSGSGSGTDFTLSINSVESEDIADYYCQQNNNWPTTFGAGTKLELK

SEQ ID NO: 40801 - protein, 112 aa, synthetic construct
DVVMTQSPDSLAVSLGERATINCKSSQSLLDSDGKTYLNWLQQKPGQPPKRLISLVSKLDSGVPDRFSGSGSGTDFTLTISSLQAEDVAVYYCWQGTHFPGTFGGGTKVEIK

SEQ ID NO: 40802 - protein, 107 aa, synthetic construct
ELQMTQSPSSLSASVGDRVTITCRASQSISSYLNWYQQKPGQPPKLLIYWASTRESGVPDRFSGSESGTNYTLTISSLQPEDFATYFCQQSDSLPITFGQGTRLDIQ

SEQ ID NO: 40803 - protein, 113 aa, synthetic construct
ELVMTQSPSSLTVTAGEKVTMSCKSSQSLLNSGNQKNYLTWYQQKPGQPPKLLIYWASTRESGVPDRFTGSGSGTDFTLTISSVQAEDLAVYYCQNDYSYPLTFGAGTKLEIK

SEQ ID NO: 40804 - protein, 107 aa, synthetic construct
DIQMTQSPSSLSASVGDRVTITCRASQSISSYLNWYQQKPGKAPKLLIYAASSLQSGVPSRFSGSGSGTDFTLTISSLQPEDLATYYCQQSYSTPFTFGPGTKVDIK

SEQ ID NO: 40805 - protein, 103 aa, synthetic construct
YIHVTQSPSSLSVSIGDRVTINCQTSQGVGSDLHWYQHKPGRAPKLLIHHASSVEDGVPSRFSGTGFHTSFNLTINDLQADDIGTYYCQVLQSFGRGSRLDTK

SEQ ID NO: 40806 - protein, 112 aa, synthetic construct
DIVLTQSPLSLAVSLGQPAIISCKASQSVSFAGTSLMHWYHQKPGQQPRLLIYRASNLEAGVPDRFSGSGSKTDFTLTISPVEAEDAATYYCQQSREYPYTFGGGTKLEIKR

SEQ ID NO: 40807 - protein, 113 aa, synthetic construct
DVVMTQTPLSLPVTPGEPASISCRSSQSLVHRNGNTYLHWYLQKPGQSPKLLIHKVSNRFSGVPDRFSGSGSGTDFTLKISRVEAEDLGVYFCSQSTHVPPLTFGAGTKLELK

SEQ ID NO: 40808 - protein, 105 aa, synthetic construct
EIVMTQTPATLSVSAGERVTITCKASQSVSNDVTWYQQKPGQAPRLLIYSASNRYSGVPARFSGSGYGTEFTFTISSVQSEDFAVYFCQQDYSSFGQGTKLEIKR

SEQ ID NO: 40809 - protein, 108 aa, synthetic construct
DIQMTQTASSLPASLGDRVTISCSASQDISNYLNWYQQKPDGTVKLLIFYSSNLHSGVPSRFSGGGSGTDYSLTISNLEPEDIATYFCHQYSKLPWTFGGGTKLEIKR

SEQ ID NO: 40810 - protein, 111 aa, synthetic construct
QFVLTQSPSASAALGASAKLTCTLSSAHKTYTIDWYQQQKGKAPRYLIQVKSDGTYTKATGVPDRFSGSSSGADRYLIIPSVQADDEADYYCGTDYTGGYVFGGGTQLTVT

SEQ ID NO: 40811 - protein, 107 aa, synthetic construct; identical to SEQ ID NO: 40775

SEQ ID NO: 40812 - protein, 111 aa, synthetic construct
QSVVTQPPSMSAAPGQQVTISCSGGNSNIERNYVSWYLQLPGTAPKLVIFDNDRRPSGIPDRFSGSKSGTSATLGITGLQTGDEADYYCGTWDSSLRGWVFGGGTKLTVLG

SEQ ID NO: 40813 - protein, 111 aa, synthetic construct
QSVLTQPPSASGTPGQRVTISCSGSRSNVGGNYVFWYQQVPGATPKLLIYRSNQRPSGVPDRFAGSKSGSSASLAISGLRSEDEADYYCATWDDSLSGFVFGTGTKVTVLG

SEQ ID NO: 40814 - protein, 107 aa, synthetic construct
DIQMTQSPSSLSASVGDRVTITCRASQDVNTAVAWYQQKPGKAPKLLIYSASFLESGVPSRFSGSRSGTDFTLTISSLQPEDFATYYCQQHYTTPPTFGQTKVEIKR

SEQ ID NO: 40815 - protein, 105 aa, synthetic construct
QSALTQPPSASGSPGQSITISCTGTSNNFVSWYQQHAGKAPKLVIYDVNKRPSGVPDRFSGSKSGNTASLTVSGLQTDDEAVYYCGSLVGNWDVIFGGGTKLTVL

SEQ ID NO: 40816 - protein, 107 aa, synthetic construct
ELVLTQSPGTLSLSAGERATLSCRASQSVSSGSLAWYQQKPGQAPRLLIYGASTRATGIPDRFSGSGSGTDFTLTIGRLEPEDLAVYYCQQYGTSPYTFGQGTKLEI

SEQ ID NO: 40817 - protein, 97 aa, synthetic construct
DIQMTQSPSSLSASVGDRVTITCQASQDINNYLNWYQQKPGKAPKLLIYDASNLQTGVPSRFSGSGSGTDFTFTIEDIATYYCQQYTFGPGTKVDIK

SEQ ID NO: 40818 - protein, 109 aa, synthetic construct
DIQMTQSPSSLSASVGDRVTITCTASLSVSSTYLHWYQQKPGSSPKLWIYSTSNLASGVPSRFSGSGSGTSYTLTISSLQPEDFATYYCHQYHRSPLTFGGGTKVEIKR

SEQ ID NO: 40819 - protein, 107 aa, synthetic construct
DIQMTQSPSSLSASVGDRVTITCKASQDVGTAVAWYQQKPGKAPKLLIYSASYRSTGVPSRFSGSGSGTDFTLTISSLQPEDFATYYCQHHYSAPWTFGGGTKVEIK

SEQ ID NO: 40820 - protein, 108 aa, synthetic construct
DIQMTQSFSSLSASVGDRVTITCRASQDISNYLNWYQQKPGKAPKLLIYYTSRLHSGVPSRFSGSGSGTDYTLTISSLQPEDFATYFCQQGNTLPWTFGGGTKLEIKR

SEQ ID NO: 40821 - protein, 107 aa, synthetic construct
DIQMTQSPPSLSASVGGKVTITCKASQDIDRYMAWYQDKPGKGPKLLIHDTSTLQPGIPSRFSGSGSGRDYSFSISNLEPEDIATYYCLQYDNLWTFGGGTKLEIKR

SEQ ID NO: 40822 - protein, 107 aa, synthetic construct
DIQMTQSPASLSASVGETVTITCRVSGNIHNYLAWYQQKQGKSPQLLVYNAKTLADGVPSRFSGSGSGTQYSLKINSLQPEDFGSYYCQHFWSNPYTFGGGTKLEIK

SEQ ID NO: 40823 - protein, 107 aa, synthetic construct
DIQMTQSPASLSASVGETVTIICRASVNIYSYLAWYQQKQGKSPQLLVYNAKILAEGVPSRFSGSGSGTQFSLKINSLQPEDFGSYYCQHHYGTFTFGSGTKLEIKR

SEQ ID NO: 40824 - protein, 107 aa, synthetic construct
DIVMTQSHKFMSTSVGDRVSVTCKASQNVGNNVAWYQQKPGQSPKVLIYSASYRYSGVPDRFTGSGSGTDFTLTISNVQSEDLAEYFCQQYNTYPFTFGSGTKLEIK

SEQ ID NO: 40825 - protein, 108 aa, synthetic construct
DIQMTQSSSSFSVSLGDRVTITCKASEDIYIRLAWYQQKPGNAPRLLISAATSLETGIPSRFSGSGSGEDYTLTITSLQTEDVATYYCQQYWTTPWTFGGGTKLEIKR

SEQ ID NO: 40826 - protein, 107 aa, synthetic construct
DIQMTQSSSSFSVSLGDRVTITCMASEDIYIRLAWYQQKPGNAPRLLISAATSLETGVPSRFSGSGSGKDYTLSITSLQTEDVGTYYCQQYWSSPWTFGGGTKLEIN

SEQ ID NO: 40827 - protein, 107 aa, synthetic construct; identical to SEQ ID NO: 40826

SEQ ID NO: 40828 - protein, 106 aa, synthetic construct
QIVLTQSPAIMSASPGEKVTISCSASSSVSYMYWYQQKPGSSPKPWIYRTSNLASGVPARFSGSGSGTSYSLTISNMEAEDAAAYYCQQYHSYPTTFGGGTKLEVK

SEQ ID NO: 40829 - protein, 108 aa, synthetic construct
DIQMTQSPSSLSASVGDRVTITCRASQSISSYLNWYQQKPGKAPKLLIYDASNLETGVPSRFSGSGSGTDFTFTISSLQPEDIATYYCQQYDNLPLTFGGGTKVDIKR

SEQ ID NO: 40830 - protein, 113 aa, synthetic construct
DVVMTQSPLSLPVSLGDQASISCRSSQRLVHSNGNTYLHWYLQKPGQSPKLLIYRVSNRFPGVPDRFSGSGSGTDFTLKISRVEAEDLGIYFCSQSTHVPYTFGGGTKLEIKR

SEQ ID NO: 40831 - protein, 109 aa, synthetic construct
SYELTQPPSVSVSPGQTATISCSGDQLGGKYGHWYQKKPGQSPVLVLYQDRKRPAGIPERFSGSSSGNTITLTISGTQAVDEADYYCQAWDTNLGGVFGGGTKVTVLGQ

SEQ ID NO: 40832 - protein, 113 aa, synthetic construct
NFMLTQPHSVSESPGKTVTISCTRSSGSIASKYVQWYQQRPGSSPTTVIYEDNQRPSGVPDRFSGSIDTSSNSASLTISGLRTEDEADYYCHSYDSNNHSVFGGGTKVTVLGQ

SEQ ID NO: 40833 - protein, 108 aa, synthetic construct
DIQMNQSPSSLSASLGDTITITCHASQNINVWLSWYQQKPGNIPKLLIYKASNLHTGVPSRFSGSGSGTGFTITISSLQPEDIATYYCQQGQSYPWTFGGGTKLEIKR

SEQ ID NO: 40834 - protein, 108 aa, synthetic construct
DILLTQSPAILSVSPGERVSFSCRASQNIGTSIHWYQQRTNGSPRLLIKYASESVSGIPSRFSGSGSGTDFTLSINSVESEDIADYYCQHTNSWPTTFGGGTKLEIKR

SEQ ID NO: 40835 - protein, 113 aa, synthetic construct
DIVMTQSPDSLAVSLGERATINCKSSQSLLNSGDQKNYLTWYQQKPGQPPKLLIYWASTRESGVPDRFSGSGSGTDFTLTISSLQAEDVAVYYCQNDYSYPLTFGQGTKVEIK

SEQ ID NO: 40836 - protein, 107 aa, synthetic construct
DIQMTQSPSSLSASVGDRVTITCKASQDVSIAVAWYQQKPGKAPKVLIYSASYRYTGVPDRFSGSGSGTDFTFTISSLQPEDIAVYYCQQHYITPLTFGGGTKVEIK

SEQ ID NO: 40837 - protein, 110 aa, synthetic construct
QAVVTQPPSASGTPGQRVTISCSGSSSNIGSNTVNWYQQVPGTAPKLLIYSNNQRPSGVPDRFSGSKSGTSASLAISGLQSEDEADYYCAAWDDSLNGWVFGGGTKLTVL

SEQ ID NO: 40838 - protein, 107 aa, synthetic construct
DIQMTQSPSTLSASVGDRVTITCRASQNINKWLAWYQQRPGKAPQLLIYKASSLESGVPSRFSGSGSGTEYTLTISSLQPDDFATYYCQQYNSYATFGQGTKVEIKR

SEQ ID NO: 40839 - protein, 109 aa, synthetic construct
QSVVTQPPSVSVAPGKTARITCGRNNIGSKSVHWYQQKPGQAPVLVVYDDSDRPSGIPERFSGSNSGNTATLTISRVEAGDEADYYCQVWDSSSDHVVFGGGTKLTVLG

SEQ ID NO: 40840 - protein, 111 aa, synthetic construct
DIVLTQSPASLAVSLGQRATISCRASESVDNYGNTFMHWYQQKPGQPPKLLIYRASNLESGIPARFSGSGSRTDFTLTINPVEADDVATYYCQQSNEDPPTFGAGTKLELK

SEQ ID NO: 40841 - protein, 108 aa, synthetic construct
EIVLTQSPGTLSLSPGERATLSCRASQSVSNTYLAWYHQRPGQAPRLLIYGASSRATGIPDRFSGSGSGTDFALTISSLEPEDFAVYYCQQYSNSWTFGQGTKVEIKR

SEQ ID NO: 40842 - protein, 108 aa, synthetic construct
ELTQDPAVSVALGQTVRITCQGDSLRSNYANWYQQKPGQAPVLVIYGQNNRPSGIPDRFSGSSSGNTASLTITGAQAADEADYYCDSRVSTGNHVVFGGGTKLTVLGQ

SEQ ID NO: 40843 - protein, 106 aa, synthetic construct
DIQMTQSPSSLSASVGDRVTITCSATSSISYMHWYQQKPGKAPKGWIYDTSKLAHGVPSRFSGSGSGTDFTLTISSLQPEDFATYYCHQRRSYPFTFGQGTKVEIK

SEQ ID NO: 40844 - protein, 108 aa, synthetic construct
DIQMTQSPSSLSASVGDRVTITCKASQGFNKYVAWYQQKPGKAPKLLIYYTSTLQPGVPSRFSGSGSGRDYTLTISSLQPEDFATYYCLQYGNLLYAFGQGTKVEIKR

SEQ ID NO: 40845 - protein, 107 aa, synthetic construct
DIQMTQSPSSLSASVGDRVTITCRASQDIRYYLNWYQQKPGKAPKLLIYVASSLQSGVPSRFSGSGSGTEFTLTVSSLQPEDFATYYCLQVYSTPRTFGQGTKVEIK

SEQ ID NO: 40846 - protein, 107 aa, synthetic construct
EIVMTPSSATLSVSPGERATLSCRASQSVSRNLAWYQQKPGQAPRLLIYGASTRATGIPARFSGSGSGTEFTLTISSLQSEDFAVYYCHQYSNWMCSFGQGTKLEIK

SEQ ID NO: 40847 - protein, 108 aa, synthetic construct
DIQMTQSPSSLSASVGDRVTITCKASKNIRSYLAWYQQKPGKAPKLLIYSGSTLHSGVPSRFSGSGSGTDFTLTISSLQPEDFATYYCQQHHEYPLTFGQGTKVEIKR

SEQ ID NO: 40848 - protein, 110 aa, synthetic construct
QSVVTQPPSVSAAPGQKVTISCSGSSSNIGNNYVSWYQQLPGTAPKLLIYDNNKRPSGIPDRFSGSKSGTSATLGITGLQTGDEADYYCGTWDGSLYTMLFGGGTKLTVL

SEQ ID NO: 40849 - protein, 113 aa, synthetic construct
QSVLTQPPSVSGAPGQRVTISCTGSSSNIGAGYDVHWYQQLPGTAPKLLIFGNSNRPSGVPDRFSGFKSGTSASLAITGLQAEDEADYFCQSYDSSLSGSGVFGTGTKVTVLG

SEQ ID NO: 40850 - protein, 114 aa, synthetic construct
LPVLTQPPSASGTPGQRVTISCSGRSSNIGSNSVNWYRQLPGAAPKLLIYSNNQRPPGVPVRFSGSKSGTSASLAISGLQSEDEATYYCATWDDNLNVHYVFGTGTKVTVLGSR

SEQ ID NO: 40851 - protein, 111 aa, synthetic construct
DIVLTQSPASLAVSLGERATINCRASESVSVIGAHLIHWYQQKPGQPPKLLIYLASNLETGVPARFSGSGSGTDFTLTISSLQAEDAAIYYCLQSRIFPRTFGQGTKLEIK

SEQ ID NO: 40852 - protein, 112 aa, synthetic construct
DIVLTQSPATLSLSPGDRATLSCRASESVTILGSHLIYWYQQKPGQAPRLLIQLASNVQTGIPARFSGSGSRTDFTLTISSLEPEDFAVYYCLQSRTIPRTFGQGTKLEIKR

SEQ ID NO: 40853 - protein, 113 aa, synthetic construct
DFVMTQSPDSLAVSLGERVTMSCKSSQSLLNSGNQKNYLTWYQQKPGQPPKLLIYWASTRESGVPDRFSGSGSGTDFTLTISSLQAEDVAVYYCQNDYSYPYTFGQGTKLEIK

SEQ ID NO: 40854 - protein, 113 aa, synthetic construct; identical to SEQ ID NO: 40853

SEQ ID NO: 40855 - protein, 108 aa, synthetic construct
DVQITQSPSYLAASPGETITINCRASKSISKDLAWYQEKPGKTNKLLIYSGSTLQSGIPSRFSGSGSGTDFTLTISSLEPEDFAMYYCQQHNKYPYTFGGGTKLEIKR

SEQ ID NO: 40856 - protein, 106 aa, synthetic construct
EIVLTQSPTSMTASPGEQVTITCRASSSINYMHWYQQKPGASPRPWIYETSKLASGVPDRFSGSASGTSYSLTINNMEAEDAATYYCQQWNYPSWTFGGGTKLELK

SEQ ID NO: 40857 - protein, 113 aa, synthetic construct
DIVMTQSPSSLAVSEGETVTINCKSSQSFLSSGDGKNYVAWYQYKPGQSPKLLIYWASTRQSGVPDRFIGSGSGTDFTLTISTVQAEDLAIYYCQQYYDTPLTFGSGTKLEIK

SEQ ID NO: 40858 - protein, 113 aa, synthetic construct
DVLMTQTPVSLPVSLGGQVSISCRSSQSLVHSDGDTYLHWYLQKPGQSPQLLIYRVSNRFSGVPDRFSGSGSGTDFTLKISRVEPEDLGLYYCLQTTHFPPWTFGGGTKLEMK

SEQ ID NO: 40859 - protein, 112 aa, synthetic construct
DIVMTQSPATLSLSPGERATLSCRSSKSLQNVNGNTYLYWFQQKPGQSPQLLIYRMSNLNSGVPDRFSGSGSGTEFTLTISSLEPEDFAVYYCMQHLEYPITFGAGTKLEIK

SEQ ID NO: 40860 - protein, 108 aa, synthetic construct; identical to SEQ ID NO: 8719

SEQ ID NO: 40861 - protein, 111 aa, synthetic construct
QIVLSQSPAILSASPGEKVTMTCRASSSVSYMHWYQQKPGSSPKPWIYATSNLASGVPARFSGSGSGTSYSFTISRVEAEDAATYYCQQWTFNPPTFGGGTRLEIKRTVAA

SEQ ID NO: 40862 - protein, 107 aa, synthetic construct; identical to SEQ ID NO: 40769

SEQ ID NO: 40863 - protein, 107 aa, synthetic construct
DIQMTQSPSSLSASVGDRVTINCKASQDINSYLSWFQQKPGKAPKTLIYRANRLVDGVPSRFSGSGSGQDYTLTISSLQPEDFATYYCLQYDEFPLTFGGGTKVEIK

SEQ ID NO: 40864 - protein, 112 aa, synthetic construct
DIVMTQTPLSLSVTPGQPASISCKSSQSLLDGDGKTYLNWLLQKPGQSPQRLIYLVSKLDSGVPDRFSGSGSGTDFTLKISRVEAEDVGVYYCWQGTHFPRTFGQGTKLEIK

SEQ ID NO: 40865 - protein, 106 aa, synthetic construct
DIQMTQSPSSLSASVGDRVTITCKASQDVSTAVAWFQQKPGKAPKLLIYSPSYRYTGVPSRFSGSGSGTDFTLTISSLQPEDFTYYCQQLYSTPYTFGQGTKVEIK

SEQ ID NO: 40866 - protein, 111 aa, synthetic construct
DIQMTQSPSSLSASVGDRVTITCRASQSVSTSSYNYMHWYQQKPGKPPKLLIKYASNLESGVPSRFSGSGSGTDFTLTISSLQPEDFATYYCQHSWEIPLTFGQGTKVEIK

SEQ ID NO: 40867 - protein, 108 aa, synthetic construct
EIVLTQSPATLSASPGERVTLTCRASSNVISSYVHWYQQKPGSSPRLFLYSTSNLASGVPSRFSGSGSGTDFTFTISSLEAEDAATYYCQQYSGYPLTFGQGTRLEIK

SEQ ID NO: 40868 - protein, 108 aa, synthetic construct
EIVLTQSPATLSLSPGERATLSCRASSNVISSYVHWYQQKPGQAPRLLIYSTSNLASGIPARFSGSGSGTDFTLTISSLEPEDFAVYYCQQYSGYPLTFGQGTRLEIK

SEQ ID NO: 40869 - protein, 112 aa, synthetic construct
DVVMTQTPLSLPVSLGDQASISCRSSQSLVHSNGNTYLRWYLQKPGQSPKVLIYKVSNRVSGVPDRFSGSGSGTDFTLKINRVEAEDLGVYFCSQSTHVPWTFGGGTKLEIK

SEQ ID NO: 40870 - protein, 110 aa, synthetic construct [sequence omitted]

SEQ ID NO: 40871 - protein, 113 aa, synthetic construct
QSVVTQPPSVSGAPGQRVTISCTGSSSNIGAGYDVHWYQQLPGTAPKLLIYGNSNRPSGVPDRFSGSKSGTSASLAITGLQAEDEADYYCQSYDSSLSGSYVFGTGTKLTVLG

SEQ ID NO: 40872 - protein, 111 aa, synthetic construct
QSVVTQPASVSGSPGQSITISCTGTSSDVGGYNYVSWYQQHPGKAPKLMIYDVSKRPSGVSNRFSGSKSGNTASLTISGLQAEDEADYYCSSYTSSSTLVFGGGTKLTVLG

SEQ ID NO: 40873 - protein, 108 aa, synthetic construct
DVVMTQSPSSLSASVGDRVTITCQSSLDISHYLNWYQQKPGKAPKLLIYDASNLETGVPSRFSGSGSGTHFTFTISSLQPEDFATYYCQQYDNLPLTFGGGTKLEIKR

SEQ ID NO: 40874 - protein, 124 aa, synthetic construct
DVMLTQTPLSLPVSLGDQASISCRSSQSILHSTGDTYLEWYLQKPGQSPKLLINKVSNRLSGVPDRFSGSGSGTDFTLKISRVEAEDLGVYYCFQGSHVPWTFGGGTKLEIKRADAAPTVSIFP

SEQ ID NO: 40875 - protein, 108 aa, synthetic construct
LPVLTQPPSVSVAPGKTARITCGGNNIGSKSVHWYQQKPGQAPVLVVYDDSDRPSGIPERFSGSNSGNTATLTISRVEAGDEADYYCQVWDSSSDYVVFGGGTKLTVL

SEQ ID NO: 40876 - protein, 111 aa, synthetic construct
ELVMTQSPASLAVSLGQRATISCRASESVDSYGKSFMHWYQLKPGQPPKLLIYRASNLESGVPARFSGSGSRTDFTLTIDPVEADDAATYYCQQNNEDPWTFGGGTKLEIK

SEQ ID NO: 40877 - protein, 107 aa, synthetic construct
DVVMTQSPSSLSASVGDRVTITCMASEDIYIRLAWYQQKPGNAPKLLIYAATSLETGVPSRFSGSGSGTDFTLTISSLQPEDFATYYCQQYWSSPWTFGGGTKVEIK

SEQ ID NO: 40878 - protein, 109 aa, synthetic construct
EIVLTQSPATLSLSPGERATLSCSASSSVSYMYWYQQKPGQAPRLLIYRTSNLASGIPARFSGSGSGTDFTLTISSLEPEDFAVYYCQQYHSYPTTFGQGTKVEIKRTV

SEQ ID NO: 40879 - protein, 107 aa, synthetic construct
DVVMTQSPSSLSASVGDRVTITCKASEDIYIRLAWYQQKPGKAPKLLIYAATSLETGVPSRFSGSGSGTDFTLTISSLQPEDFATYYCQQYWTTPWTFGGGTKVEIK

SEQ ID NO: 40880 - protein, 108 aa, synthetic construct
DIQLTQSPSFLSASVGDRVTITCRASQGISTDLNWYQQKPGKAPKLLIYAASNLESGVPSRFSGSGSGTEFTLTISSLQPEDFATYYCQQSYNWPYTFGGGTKVEIKR

SEQ ID NO: 40881 - protein, 108 aa, synthetic construct
DIQLTQSPSFLSASVGDRVTITCSLSLGISTWRDWFPPRLGRGLEPLTYAASTLQSGVPSRFSGSGSGTEFTLTISSLQPEDFATYYCQQLNSYPLTFGGGTKVEIKR

SEQ ID NO: 40882 - protein, 108 aa, synthetic construct
DIQMTQTTSSLSASLGDRVTISCRASQDISNYLNWYQQKPDGTVKLLIYYTSILHSGVPSRFSGSGSGTDYSLTISNLEQEDFATYFCQQGNTLPWTFGGGTKLEIKA

SEQ ID NO: 40883 - protein, 116 aa, synthetic construct
DIVMTQSPDSLAVSLGERATINCKSSQSLLYRSNQKNYLAWYQQKPGQPPKLLIYWASTRESGVPDRFSGSGSGTDFTLTISSLQAEDVAVYYCQQYYNYPRTFGQGTKVEIKRTV

SEQ ID NO: 40884 - protein, 113 aa, synthetic construct
DVVMTQSPLSLPVTLGQPASISCRSSQSLLHSSGNTYLEWYQQRPGQSPRPLIYKISTRFSGVPDRFSGSGSGTDFTLKISRVEAEDVGVYYCFQGSHVPYTFGGGTKVEIKR

SEQ ID NO: 40885 - protein, 109 aa, synthetic construct
DIQMTQSPSSLSASVGDRVTITCRASENIYSNLAWYQQKPGKAPKLLIYAATNLADGVPSRFSGSGSGTDFTLTISSLQPEDFATYYCQHFWGTPTFGQGTKVEIKRTV

SEQ ID NO: 40886 - protein, 113 aa, synthetic construct
DFVMTQSPLSLPVTPGEPASISCRSSQSIVHSNGNTYLEWYLQKPGQSPQLLIYKVSNRFSGVPDRFSGSGSGTDFTLKISRVEAEDVGVYYCFQGSHVPLTFGQGTKLEIKR

SEQ ID NO: 40887 - protein, 106 aa, synthetic construct
DIQLTQSPSFLSASVGDRVTITCSARSSISFMYWYQQKPGKAPKLLIYDTSNLASGVPSRFSGSGSGTEFTLTISSLEAEDAATYYCQQWSSYPLTFGQGTKLEIK

SEQ ID NO: 40888 - protein, 112 aa, synthetic construct
QLVLTQSPSASASLGSSVKLTCTLSSGHKTDTIDWYQQQPGKAPRYLMKLEGSGSYNKGSGVPDRFSGSSSGADWYLTISSLQSEDEADYYCGTDYPGNYLFGGGTQLTVLG

SEQ ID NO: 40889 - protein, 108 aa, synthetic construct
DIQLTQSPSSLSASVGDRVSFTCQASQDINNFLNWYQQKPGKAPKLLIYDASNLETGVPSRFSGSGSGTDFTFTISSLQPEDIATYYCQQYGNLPFTFGGGTKVEIKR

SEQ ID NO: 40890 - protein, 108 aa, synthetic construct; identical to SEQ ID NO: 40889

SEQ ID NO: 40891 - protein, 108 aa, synthetic construct
DIQMTQSPSSLSASLGDRVTITCRASQGIRNDLGWYQQKPGKAPKRLIYASSTLQSGVPSRFSGSGSGTEFTLTISSLQPEDFATYYCLQHNNFPWTFGQGTKVEIKR

SEQ ID NO: 40892 - protein, 109 aa, synthetic construct
EIVLTQSPDTLSLSPGEKATLSCRASQSVSSSFLAWYQQKPGQAPSLLIYVASRRAAGIPDRFSGSGSGTDFTLTISRLEPEDFGMFYCQHYGRTPFTFGPGTKVDIKR

SEQ ID NO: 40893 - protein, 108 aa, synthetic construct
DIQLTQSPSFLSASVGDRVTITCRASQGISSYLAWYQQKPGKAPKLLIYAASTLQSGVPSRFSGSGSGTEFTLTISSLQPEDFATYYCQQVNSYPLTFGGGTKVEIKR

SEQ ID NO: 40894 - protein, 112 aa, synthetic construct
QSALTQPRSVSGSPGHSVTISCTGTSSDVGDYNYVSWYQQRPGKVPKLLIYDVSKRPSGVPDRFSGSKSGNTASLTISGLQAEDEAIYFCASYAGNYNVVFGGGTKLTVLGQ

SEQ ID NO: 40895 - protein, 108 aa, synthetic construct
DIQMTQSPSSLSASVGDRVTITCSASQGINNYLNWYQQKPGKAPKLLIHYTSGLHAGVPSRFSGSGSGTDYTLTISSLQPEDVATYYCQQYSILPWTFGGGTKVEIKR

SEQ ID NO: 40896 - protein, 113 aa, synthetic construct
DIQMTQSPSSLSASVGDRVTITCKSSQSVLYSSNQKNYLAWFQQKPGKAPKLLIYWASTRESGVPSRFSGSGSGTDFTLTISSLQPEDFATYFCHQYLSSYTFGQGTKVEIKR

SEQ ID NO: 40897 - protein, 108 aa, synthetic construct; identical to SEQ ID NO: 8731

SEQ ID NO: 40898 - protein, 109 aa, synthetic construct
DIQMTQSPSSLSASVGDRVTITCTASSRVSSSYLHWFQQKPGKAPKLLIYSTSNLASGVPSRFSGSGSGTDFTLTISSLQPEDFATYYCHQYHRSPYTFGQGTKVEIKR

SEQ ID NO: 40899 - protein, 106 aa, synthetic construct
DIQMTQSPSSLSASVGDRVTITCSASSSVTYMYWYQQKPGKAPKLLIYDTSNLASGVPSRFSGSGSGTDYTLTISSLQPEDFATYYCQQWSNYPLTFGQGTKVEIK

SEQ ID NO: 40900 - protein, 107 aa, synthetic construct
EIVLTQSPSSLSASVGDRVTITCRASENIYSYLAWYQQKPGKAPKLLIYNTKTLGEGVPSRFSGSGSGTDFTLTISSLQPEDFATYYCQHHYGTPFTFGPGTKVDIK

SEQ ID NO: 40901 - protein, 107 aa, synthetic construct
QIVLTQSPAIMSASPGEKVTMTCSASSSVSYMHWYQQKSGTSPKRWIYDTSKLASGVPDRFSGSGSGTSYFLTINNMEAEDAATYYCQQWNINPLTFGAGTKLELKR

SEQ ID NO: 40902 - protein, 108 aa, synthetic construct
DIQMTQSSAYLSVSLGGRVTITCKASDHINNWLAWYQHKPGNAPRLLISGATTLETGVPSRFSGSGSGKDYTLSITSLQTEDVATYYCQQSWNTPWTFGGGTKLEIKR

SEQ ID NO: 40903 - protein, 108 aa, synthetic construct; identical to SEQ ID NO: 20388

SEQ ID NO: 40904 - protein, 109 aa, synthetic construct
EIVLTQSPGTLSLSPGERATLSCRASQSVSSSYLAWYQQKPGQAPRLLIYGASSRATGIPDRFSGSGSGTDFTLTISRLEPEDFAVYYCQQYHHSPLTFGGGTKVEIKR

SEQ ID NO: 40905 - protein, 108 aa, synthetic construct
EIVLTQSPGTLSLSPGERATLSCRASQSVSSDYLAWYQQKPGQAPRLLIYGASRRATGIPDRFSGSGSGTDFTLTISRLEPEDFAVYYCQQYVSYWTFGGGTKVEIKR

SEQ ID NO: 40906 - protein, 109 aa, synthetic construct
DIQMTQSPSSLSASVGDRVTITCRASQDVNTAVAWYQQKPGKAPKLLIYSASFLYSGVPSRFSGSRSGTDFTLTISSLQPEDFATYYCQQHYTTPPTFGQGTKVEIKRT

SEQ ID NO: 40907 - protein, 107 aa, synthetic construct
DIQMTQSPSSVSASVGDRVTITCRASQGITRWLAWYQQKPGKAPKLLIYAASVLQSGVPSRFSGSGSGTDFTLTISSLQPEDFATYYCQQSNSFPRTFGQGTKVEIK

SEQ ID NO: 40908 - protein, 107 aa, synthetic construct
DIQMTQSPSSVSASVGDRVTITCRASQDISRWLAWYQQKPGKAPKLLISAASRLQSGVPSRFSGSGSGTDFTLTISSLQPEDFAIYYCQQAKSFPRTFGQGTKVEIK

SEQ ID NO: 40909 - protein, 112 aa, synthetic construct
DTVMTQTPLSSHVTLGQPASISCRSSQSLVHSDGNTYLSWLQQRPGQPPRLLIYRISRRFSGVPDRFSGSGAGTDFTLEISRVEAEDVGVYYCMQSTHVPRTFGQGTKVEIK

SEQ ID NO: 40910 - protein, 107 aa, synthetic construct
DIQLTQSPSFLSASVGDRVTITCWASQGINNYLAWYQQKPGKAPKLLIYAASTLQTGVPSRFSGSGSGTEFTLTISSLQPEDFATYYCQQLNSYPLTFGGGTKVEIK

SEQ ID NO: 40911 - protein, 108 aa, synthetic construct
EIVLTQSPGTLSLSPGERATLSCRASQSVNKNYLAWYQQKPGQAPRLLIYGASSRATGIPDRFSGSGSGTDFTLTISRLEPEDFAVYYCQQYDRSPLTFGGGTKVEIK

SEQ ID NO: 40912 - protein, 112 aa, synthetic construct
DVVMTQTPLSLPVTLGQPASISCRSSQSLVYRDGNTYLSWFQQRPGQSPRRLIYKVSNWQSGVPDRFSGGGSGTDFTLKISRVEAEDVGVYYCMQGTHWPPTFGQGTKVEIK

SEQ ID NO: 40913 - protein, 106 aa, synthetic construct
IVMTQTPKFLLVSAGDRVTITCKASQSVNNDVSWFQQKPGQSPTLLIYYASNRYTGVPDRFTGSGYGTDFTFTISTVQAEDLAVYFCQQDYSSPYTFGGGTKLEIK

SEQ ID NO: 40914 - protein, 106 aa, synthetic construct
DIQMTQSPSSLSASVGDRVTITCRASQSINNYLNWYQQKPGKAPTLLIYAASSLQSGVPSRFSGSRSGTDFTLTISSLQPEDFAAYFCQQTYSNPTFGQGTKVEVK

SEQ ID NO: 40915 - protein, 108 aa, synthetic construct
SYELTQPPSVSVSPGQTASITCSGDKLGDKYASWYQQKPGQSPVLVIYQDNRRPSGIPERFSGSNSGNTATLTISGTQAMDEADYYCQAWDSDTYVFGTGTKVTVLGQ

SEQ ID NO: 40916 - protein, 107 aa, synthetic construct
DIQMTQSPSSLSASVGDRVTITCRASQSISSYLNWYQQKPGKAPKLLIYAASSLQSGVPSRFSGSGSGTDFTLTISSLQPEDFATYYCQQSYITPLTFGGGTKVEIK

SEQ ID NO: 40917 - protein, 113 aa, synthetic construct
DIVLTQSPASLAVSLGQGATISCRASKSVSTSGYTYMHWYQQKPGQPPKLLIYLASNLESGVPARFSGSGSGTDFTLNIHPVEEEDAATYYCQHSGELPPSFGGGTKLEIKRA

SEQ ID NO: 40918 - protein, 112 aa, synthetic construct
DIQMTQSPSSLSASVGDRVTITCSASQGIRNYLNWYQQKPGKVPKLLIYYTSRLHSGVPSRFSGSGSGTDFTLTISSLQPEDVATYYCQQYGKLPYTFGQGTKLEIKRTVAA

SEQ ID NO: 40919 - protein, 116 aa, synthetic construct
DIVMTQSPDSLAVSLGERATINCRAGESVDIFGVGFLHWYQQKPGQPPKLLIYRASNLESGVPDRFSGSGSGTDFTLTIRPLQAEDVAVYYCQQTNEDPYTFGQGTKLEIKRTVAA

SEQ ID NO: 40920 - protein, 112 aa, synthetic construct
DIVLTQSPATLSLSPGERATLSCRASQNIVFNLAWYQQKPGQAPRLLIYDASNRATGVPARFSGSGSGTDFTLTISSLEPEDFAVYYCQQKKSMPLTFGQGTKVEIKRTVAA

SEQ ID NO: 40921 - protein, 113 aa, synthetic construct
QTVVTQEPSLTVSPGGTVTLTCGSSTGAVTTSNYANWVQQKPGQAPRGLIGGTNKRAPGTPARFSGSLLGGKAALTLSGVQPEDEAEYYCALWYSNLWVFGGGTKLTVLTVAA

SEQ ID NO: 40922 - protein, 114 aa, synthetic construct
EIVLTQSPGTLSLSPGERATLSCRASQSVSSSYLAWYQQKPGQAPRLLIYGASSRATGIPDRFSGSGSGTDFTLTISRLEPEDFAVYYCQQYTNEHYYTFGQGTKVEIKRTVAA

SEQ ID NO: 40923 - protein, 113 aa, synthetic construct
EIVLTQSPATLSLSPGERATLSCSVSSSISSSNLHWYQQKPGQAPRLLIYGTSNLASGIPARFSGSGSGTDFTLTISSLEPEDFAVYYCQQWSSYPHTFGGGTKVEIKRTVAA

SEQ ID NO: 40924 - protein, 112 aa, synthetic construct
DIQMTQSPSSLSASVGDRVTITCKAGQNVGTSVAWYQQKPGKAPKLLIYSASYRYSGVPSRFSGSGSGTDFTLTISSLQPEDFATYYCQQYITYPYTFGQGTKVEIKRTVAA

SEQ ID NO: 40925 - protein, 112 aa, synthetic construct
DIQMTQSPSSLSASVGDRVTITCSASQDIGNFLNWYQQKPGKAPKLLIYYTSSLYSGVPSRFSGSGSGTDFTLTISSLQPEDFATYYCQQYSKLPLTFGQGTKLEIKRTVAA

SEQ ID NO: 40926 - protein, 112 aa, synthetic construct
DVQVTQSPSSLSASVGDRVTITCRSSQSLANSYGNTFLSWYLHKPGKAPQLLIYGISNRFSGVPDRFSGSGSGTDFTLTISSLQPEDFATYYCLQGTHQPYTFGQGTKVEIK

SEQ ID NO: 40927 - protein, 107 aa, synthetic construct
DIQMTQSPSSLSASVGDRVTITCRASQDISNYLNWYQQKPGKAVKLLIYYTSILHSGVPSRFSGSGSGTDYTLTISSLQPEDFATYFCQQGNTLPWTFGGGTKVEIK

SEQ ID NO: 40928 - protein, 108 aa, synthetic construct
DIQMTQSPSSLSASVGDRVTITCRASQDISNYLNWYQQKPGKAPKLLIYYTSILHSGVPSRFSGSGSGTDFTLTISSLQPEDFATYYCQQGNTLPWTFGQGTKVEIKR

SEQ ID NO: 40929 - protein, 108 aa, synthetic construct
DIQMTQSPSSLSASVGDRVTITCKASDHINNWLAWYQQKPGKAPKLLIYGATTLETGVPSRFSGSGSGTDFTLTISSLQPEDFATYYCQQSWNTPWTFGQGTKVEIKR

SEQ ID NO: 40930 - protein, 108 aa, synthetic construct
SYVLTQPPSVSVAPGQTARITCGGNNIGSKSVHWYQQPPGQAPVVVVYDDSDRPSGIPERFSGSNSGNTATLTISRVEAGDEAVYYCQVWDSSSDHVVFGGGTKLTVL

SEQ ID NO: 40931 - protein, 108 aa, synthetic construct
DIQMTQSPSSLSASVGDRVTITCMASEDIYIRLAWYQQKPGKAPKLLIYAATSLETGVPSRFSGSGSGTDFTLTISSLQPEDFATYYCQQYWSSPWTFGQGTKVEIKR

SEQ ID NO: 40932 - protein, 112 aa, synthetic construct
DIQMTQSPSSVSASVGDRVTITCRASESVDNYGISFMNWYQQKPGKAPKLLISAASNRATGVPSRFSGSGSGTDFTLTISSLQPEDFAIYYCQQSKEVPWTFGQGTKVEIKR

SEQ ID NO: 40933 - protein, 112 aa, synthetic construct
DIQLTQSPSSLSASVGDRVTITCRASKSVSTSGYSYMHWYQQKPGKAPKLLIYLVSNLESGVPSRFSGSGSGTDFTLTISSLQPEDFATYYCQQFSELPWTFGQGTKVEIKR

SEQ ID NO: 40934 - protein, 109 aa, synthetic construct
DIQMTQSPSSVSASVGDRVTITCRASQFISSSYLSWYQQKPGKAPKLLISGSSSRATGVPSRFSGSGSGTDFTLTISSLQPEDFAIYYCQQLYSSPMTFGQGTKVEIKR

SEQ ID NO: 40935 - protein, 107 aa, synthetic construct
EIVLTQSPATLSLSPGERATLSCRASQSVSSYLAWYQQKPGQAPRLLIYDASNRATGIPARFSGSGSGTDFTLTISSLEPEDFAVYYCQQRSNWPLTFGQGTKVEIK

SEQ ID NO: 40936 - protein, 113 aa, synthetic construct
DIVMTQSPDSLAVSLGERATINCKSSQSVLYSSNNKNYLAWYQQKPGQPPKLLIYWASTRESGVPDRFSGSGSGTDFTLTISSLQAEDVAVYYCQQYYSTPLTFGQGTKVEIK

SEQ ID NO: 40937 - protein, 108 aa, synthetic construct
DIQMTQSPSSLSASVGDRVTITCRASQSINKWLNWYQQKPGKAPKLLIYAASSLQSGVPSRFSGSGSGTDFTLTISSLQPEDFATYYCQQDYNFPYTFGQGTKVEIKR

SEQ ID NO: 40938 - protein, 107 aa, synthetic construct
DIQLTQSHKFLSTSVGDRVSITCKASQDVYNAVAWYQQKPGQSPKLLIYSASSRYTGVPSRFTGSGSGPDFTFTISSVQAEDLAVYFCQQHFRTPFTFGSGTKLEIK

SEQ ID NO: 40939 - protein, 106 aa, synthetic construct
DIQLTQSPSSLSASVGDRVTITCKASQDVGTSVAWYQQKPGKAPKLLIYWTSTRHTGVPSRFSGSGSGTDFTFTISSLQPEDIATYYCQQYSLYRSFGQGTKVEIK

SEQ ID NO: 40940 - protein, 105 aa, synthetic construct
DIQLTQSPSSLSASVGDRVTITCSTSSSVSYMHWYQQKPGKAPKLLIYSTSNLASGVPSRFSGSGSGTDFTFTISSLQPEDIATYYCHQWSSYPTFGQGTKVEIK

SEQ ID NO: 40941 - protein, 109 aa, synthetic construct; identical to SEQ ID NO: 8733

SEQ ID NO: 40942 - protein, 111 aa, synthetic construct
EIVLTQSPGTLSLSPGERATLSCRASQSVSSDYLAWYQQKPGQAPRLLIYGASSRATGIPDRFSGSGSGTDFTLTISRLPEDFAVYYCQQYVSYWTFGGGTKVEIKRTVAA

SEQ ID NO: 40943 - protein, 109 aa, synthetic construct
SYELIQPPSAAVTLGNTVSLTCVGDELPKRYAYWYQQKPDQSIVRVIYEDSVRPPGISDRFSGSSSGTTATLTIRDAQNEDEADYYCQSTYGDDKLYIFGGGTKLTVLG

SEQ ID NO: 40944 - protein, 109 aa, synthetic construct
SVIELTQSPKFMSTSVGDRVNVTYKASQNVGTNVAWFQQKPGQSPKVLIYSASYRYSGVPDRFTGSGSGTDFTLTISNVQSEDLAEYFCQQYHTYPLTFGGGTKLEIKR

SEQ ID NO: 40945 - protein, 108 aa, synthetic construct
DIQMTQSPSSVSASVGDRVTITCRASQSVSSYLNWYQQKPGKAPKLLIYAASSLQSGVPSRFSGSGSGTDFTLTISSLQPEDFATYYCQQSYSTPWTFGQGTKLEIKR

SEQ ID NO: 40946 - protein, 111 aa, synthetic construct
QSALTQPRSVSGSPGQSVTISCTGTSSDVGSYNYVSWYQQSPGKAPKLMIYDVSNRPSGVSNRFSGSKSGNTASLTISGLQSEDEADYYCTSYGSYDIPVIFGGGTKVEIK

SEQ ID NO: 40947 - protein, 108 aa, synthetic construct
DVVMTQSPSSLSASVGDRVTITCKASQSVSSYLNWYQQKPGKAPKLLIYAASSLETGVPSRFSGSGSGTDFTLTISSLQPEDFATYYCQQSYSTPWTFGQGTKVEIKR

SEQ ID NO: 40948 - protein, 108 aa, synthetic construct
DIQMTQSPSSVSASVGDRVTITCRASQSISSYLNWYQQKPGKAPKLLIYAASSLQSGVPSRFSGSGSGTDFTLTISSLQPEDFATYYCQQSYSTPWTFGQGTKVEIKR

SEQ ID NO: 40949 - protein, 107 aa, synthetic construct
DTVLTQSPALAVSPGERVTISCKASESVSTRMHWYRQKPGQQPKLLIYKTSNLASGVPARFSGSGSGTDFTLTIDPVEADDTATYFCQQSWNGPLTFGSGTKLEIKR

SEQ ID NO: 40950 - protein, 114 aa, synthetic construct
DLVMTQSPFSLAVSEGEMVTIKCKSSQSLLSSRHQKNFLAWYRQKPGQSPKLLIYHASTRQSGVPDRFIGSGSGTDFTLTISDVQAEDLADYYCLQHYTSPYTFGAGTKLELKR

SEQ ID NO: 40951 - protein, 109 aa, synthetic construct [sequence omitted]

SEQ ID NO: 40952 - protein, 107 aa, synthetic construct
ELQMTQSPSSLSASVGDRVAITCRASQSISSHLNWYQQKPGKAPKLLIYAASSLQSGVPSRFSGSGSGTDFTLTISSLQPEDFATYYCQQSYSTPYTFGQGTKLEIK

SEQ ID NO: 40953 - protein, 108 aa, synthetic construct
DIVMTQSHKFMSTSVGDRVSIICKASQDVGTAVDWYQQKPGQSPKLLIYWASTRHTGVPDRFTGSGSGTDFTLAITNVQSEDLADYFCQQYNSYPLTFGAGTKLEIKR

SEQ ID NO: 40954 - protein, 108 aa, synthetic construct; identical to SEQ ID NO: 8732

SEQ ID NO: 40955 - protein, 108 aa, synthetic construct; identical to SEQ ID NO: 8732

SEQ ID NO: 40956 - protein, 108 aa, synthetic construct; identical to SEQ ID NO: 40953

SEQ ID NO: 40957 - protein, 107 aa, synthetic construct
EIVLTQSPATLSLSPGERATLSCSATSSVSYIHWYQQKPGQAPRLLIYSTSNLASGIPARFSGSGSGTDFTLTIGRLEPEDFAVYYCQQRSSSPFTFGQGTKVEIKR

SEQ ID NO: 40958 - protein, 106 aa, synthetic construct
QIVLTQSPAIMSASPGEEVTLTCSATSSVSYIHWFQQRPGTSPKLWIYSTSNLASGVPVRFSGSGYGTSYSLTISRMEAEDAATYYCQQRSSSPFTFGSGTKLEIK

SEQ ID NO: 40959 - protein, 113 aa, synthetic construct
DIVLTQSPASLAVSPGQRATITCRASKSVSTSGYSYMHWYQQKPGQPPKLLIYLASNLESGVPARFSGSGSGTDFTLTINPVEANDTANYYCQHSRELPFTFGGGTKVEIKRT

SEQ ID NO: 40960 - protein, 108 aa, synthetic construct
DIQMTQSPSSLSVSVGDRVTITCKASQNVRTVVAWYQQKPGLAPKTLIYLASNRHTGVPSRFSGSGSGTDFTFTISSLQPEDIATYFCQQHWSYPLTFGQGTKVEVKR

SEQ ID NO: 40961 - protein, 113 aa, synthetic construct
DIQMTQSPSSLSASVGDRVTITCKSSQSLLYSSNQKNYLAWFQQKPGKAPKLLIYWASTRESGVPSRFSGSGSGTDFTLTISSLQPEDFATYFCHQYLSSYTFGQGTKVEIKR

SEQ ID NO: 40962 - protein, 113 aa, synthetic construct; identical to SEQ ID NO: 40896

SEQ ID NO: 40963 - protein, 113 aa, synthetic construct; identical to SEQ ID NO: 40961

SEQ ID NO: 40964 - protein, 108 aa, synthetic construct; identical to SEQ ID NO: 8731

SEQ ID NO: 40965 - protein, 108 aa, synthetic construct
DIQMTQSPSSLSASVGDRVTITCRASQDISSYLNWYQQKPGKAPKLLIYYTSRLHSGVPSRFSGSGSGTDFTLTISSLQPEDFATYYCQQGNTLPYTFGQGTKVEIKR

SEQ ID NO: 40966 - protein, 108 aa, synthetic construct; identical to SEQ ID NO: 8734

SEQ ID NO: 40967 - protein, 109 aa, synthetic construct
QSVLTQPPSVSVSPGQTASITCSGDKLGDKFACWYQQKPGQSPVLVIYQDSKRPSGIPERFSGSNSGNTATLTISGTQAMDEADYYCQAWDSDGKATVVFGTGTKVEIK

SEQ ID NO: 40968 - protein, 109 aa, synthetic construct
QSVLTQPPSVSVSPGQTASITCSGDKLGDKYACWYQQKPGQSPVLVIYQDSKRPSGIPERFSGSNSGNTATLTISGTQAMDEADYYCQAWDSDGKATVVFGTGTKVEIK

SEQ ID NO: 40969 - protein, 109 aa, synthetic construct
QSVLTQPPSVSVSPGQTASITCSGDKLGDKYACWYQQKPGQSPVLVIYQDTKRPSGIPERFSGSNSGNTATLTISGTQAMDEADYYCQAWDSDGKATVVFGTGTKVEIK

SEQ ID NO: 40970 - protein, 109 aa, synthetic construct
QSVLTQPPSVSVSPGQTASITCSGDKLGNKYACWYQQKPGQSPVLVIYQDSKRPSGIPERFSGSNSGNTATLTISGTQAMDEADYYCQAWDSDGKATVVFGTGTKVEIK

SEQ ID NO: 40971 - protein, 114 aa, synthetic construct
NFMLTQPHSVSESPGKTVTISCTRSSGSIASNYVQWYQQRPGSAPTTVIYEDNQRPSGVPDRFSGSIDSSSNSASLTISGLKTEDEADYYCQSYDLAADVRVVFGTGTKVTVSS

SEQ ID NO: 40972 - protein, 114 aa, synthetic construct
NFMLTQPHSVSESPGKTVTISCTRRSGSIASNYVQWYQQRPGSAPTTVIYEDNQRPSGVPDRFSGSIDSSSNSASLTISGLKTEDEADYYCQSYDLAADVRVVFGTGTKVTVSS

SEQ ID NO: 40973 - protein, 114 aa, synthetic construct
NFMLTQPHSVSESPGKTVTISCTRNSGSIASNYVQWYQQRPGSAPTTVIYEDNQRPSGVPDRFSGSIDSSSNSASLTISGLKTEDEADYYCQSYDLAADVRVVFGTGTKVTVSS

SEQ ID NO: 40974 - protein, 114 aa, synthetic construct
NFMLTQPHSVSESPGKTVTISCTRSSGSIANNYVQWYQQRPGSAPTTVIYEDNQRPSGVPDRFSGSIDSSSNSASLTISGLKTEDEADYYCQSYDLAADVRVVFGTGTKVTVSS

SEQ ID NO: 40975 - protein, 105 aa, synthetic construct
DIVMTQTPATLSVSAGERVTITCKASQSVSNDVTWYQQKPGQAPRLLIYSASNRYSGVPARFSGSGYGTEFTFTISSVQSEDFAVYFCQQDYSSFGQGTKLEIKR

SEQ ID NO: 40976 - protein, 105 aa, synthetic construct
DIQMTQSPSSLSASVGDRVTITCKASQSVSNDVTWYQQKPGQAPKLLIYSASNRYSGVPARFSGSGYGTEFTFTISSVQSEDFAVYFCQQDYSSFGQGTKLEIKR

SEQ ID NO: 40977 - protein, 109 aa, synthetic construct
DIQMTQSPSSLSASVGDRVTITCRASSSVSSSYLHWYQQKPGKAPKVWIYSTSNLASGVPSRFSGSGSGTDFTLTISSLQPEDFATYYCQQYSGYPITFGQGTKVEIKR

SEQ ID NO: 40978 - protein, 109 aa, synthetic construct
ENVLTQSPAIMSASPGEKVTMTCRASSSVSSSYLHWYQQKSGASPKVWIYSTSNLASGVPGRFSGSGSGTSYSLTISSVEAEDAATYYCQQYSGYPITFGAGTKVEVKR

SEQ ID NO: 40979 - protein, 113 aa, synthetic construct
DIVMTQSPDSLAVSLGERATINCKSSQSLLNSGNQKNYLAWYQQKPGQPPKLLIYWGSTRSTGVPDRFSGSGSGTDFTLTISSLQAEDVAVYYCQNDYTYPFTFGQGTKLEIK

SEQ ID NO: 40980 - protein, 113 aa, synthetic construct
DIVMTQSPDSLAVSLGERATINCKSSQSLLNSGNNKNYVTWYQQKPGQPPKLLIYWGSTRSTGVPDRFSGSGSGTDFTLTISSLQAEDVAVYYCQNDYTYPFTFGQGTKLEIK

SEQ ID NO: 40981 - protein, 107 aa, synthetic construct
QIVLTQSPAIMSVSPGEKVTMTCSASSSVNYMHWFQQKPGTSPKLWVYSTSNLASGVPARFSGSGSGTSYSLTISSMEAEDAATYYCQQRSIYPPWTFGGGTKLEIK

SEQ ID NO: 40982 - protein, 107 aa, synthetic construct
QIVLTQSPAIMSASPGEKVTITCSASSSVSYLHWFQQKPGTSPKLWVYSTSNLPSGVPARFGGSGSGTSYSLTISRMEAEDAATYYCQQRSIYPPWTFGGGTKLEIK

SEQ ID NO: 40983 - protein, 107 aa, synthetic construct
QIVLTQSPAIMSASPGEKVTITCSASSSVNYLHWFQQKPGTSPKLWVYSTSNLPSGVPARFGGSGSGTSYSLTISRMEAEDAATYYCQQRSIYPPWTFGGGTKLEIK

SEQ ID NO: 40984 - protein, 109 aa, synthetic construct
EIVLTQSPATLSLSPGERATLSCSVSSSISSSNLHWYQQKPGQAPRLLIYATSNLASGIPARFSGSGSGTDFTLTISSLEPEDFAVYYCQQWSSYPHTFGGGTKVEIKR

SEQ ID NO: 40985 - protein, 108 aa, synthetic construct; identical to SEQ ID NO: 8719

SEQ ID NO: 40986 - protein, 108 aa, synthetic construct; identical to SEQ ID NO: 8719

SEQ ID NO: 40987 - protein, 108 aa, synthetic construct; identical to SEQ ID NO: 40929

SEQ ID NO: 40988 - protein, 108 aa, synthetic construct; identical to SEQ ID NO: 40929

SEQ ID NO: 40989 - protein, 112 aa, synthetic construct
DIQLTQSPSSLSASVGDRVTITCKASQSVDYDGDSFLNWYQQKPGKAPKLLIYAASNLESGVPSRFSGSGSGTDFTLTISSLQPEDFATYYCQQSNEDPLTFGQGTKVEIKR

SEQ ID NO: 40990 - protein, 112 aa, synthetic construct; identical to SEQ ID NO: 40989

SEQ ID NO: 40991 - protein, 112 aa, synthetic construct; identical to SEQ ID NO: 40785

SEQ ID NO: 40992 - protein, 112 aa, synthetic construct; identical to SEQ ID NO: 40785

SEQ ID NO: 40993 - protein, 111 aa, synthetic construct
DIVMTQSPDSLAVSLGERATINCKASQSVDYEGDSFLNWYQQKPGQPPKLLIYAASNLESGVPSRFSGSGSGTDFTLTISSLQPEDVAVYYCQQSNEDPLTFGQGTKVEIK

SEQ ID NO: 40994 - protein, 111 aa, synthetic construct
DIVMTQSPDSLAVSLGERATINCKASQSVDYEGDSFLNWYQQKPGQPPKLLIYAARKLGRGVPSRFSGSGSGTDFTLTISSLQPEDVAVYYCQQSNEDPLTFGQGTKVEIK

SEQ ID NO: 40995 - protein, 111 aa, synthetic construct
DIVMTQSPDSLAVSLGERATINCKASQSVDYDGDSFLNWYQQKPGQPPKLLIYAASNLESGVPSRFSGSGSGTDFTLTISSLQPEDVAVYYCQQSNDDPLTFGQGTKVEIK

SEQ ID NO: 40996 - protein, 113 aa, synthetic construct
DIQMTQSPSSLSASVGDRVTITCKSSQSLLDSDGKTYLNWYQQKPGKAPKLLIYLVSKLDSGVPSRFSGSGSGTDFTLTISSLQPEDFATYYCFQGTHFPFTFGQGTKVEIKR

SEQ ID NO: 40997 - protein, 113 aa, synthetic construct; identical to SEQ ID NO: 40996

SEQ ID NO: 40998 - protein, 113 aa, synthetic construct
DIQMTQSPSSLSASVGDRVTITCKSSQSLLDSDGKTYLNWYQQKPGKAPKLLIYLVSKLDSGVPSRFSGSGSGTDFTLTISSLQPEDFATYYCWQGTHFPFTFGQGTKVEIKR

SEQ ID NO: 40999 - protein, 113 aa, synthetic construct; identical to SEQ ID NO: 40998

SEQ ID NO: 41000 - protein, 113 aa, synthetic construct
DIQMTQSPSSLSASVGDRVTITCKSSQSLLDSDGKTYLNWYQQKPGKAPKLLIYLVSKLDSGVPSRFSGSGSGTDFTLTISSLQPEDFATYYCFQGTHFPYTFGQGTKVEIKR

SEQ ID NO: 41001 - protein, 113 aa, synthetic construct; identical to SEQ ID NO: 41000

SEQ ID NO: 41002 - protein, 113 aa, synthetic construct; identical to SEQ ID NO: 40996

SEQ ID NO: 41003 - protein, 111 aa, synthetic construct
DIVLTQSPASLAVSLGQRATISCKASQSVDYDGDSFLNWYQKPGQPPKLFIYAASNLESGIPARFSGSGSGTDFTLNIHPVEEEDAATYYCQQSNEDPLTFGAGTELELKR

SEQ ID NO: 41004 - protein, 107 aa, synthetic construct
QIVLTQSPAIMSASPGEKVTMTCSASSSVSFMHWYQQKSGTSPKRWIYDTSTLASGVPARFGGSGSGTSYSLTISSMEAEDAATYYCQQWSSNPLTFGAGTKLELKR

SEQ ID NO: 41005 - protein, 112 aa, synthetic construct
DIVMTQSPLSLPVTPGEPASISCRSSKSLLHSNGITYLYWYLQKPGQSPQLLIYRMSNRASGVPDRFSGSGSGTDFTLKISRVEAEDVGVYHCGQLLENPYTFGQGTKLEIK

SEQ ID NO: 41006 - protein, 111 aa, synthetic construct
EIVLTQSPGTLSLSPGERATLSCKASQSVSISGINLMNWYQQKPGQQPRLLIYHASILASGIPDRFSGSGSGTDFTLTISRLEPEDFAVYYCQQTRESPLTFGQGTRLEIK

SEQ ID NO: 41007 - protein, 112 aa, synthetic construct; identical to SEQ ID NO: 41005

SEQ ID NO: 41008 - protein, 111 aa, synthetic construct; identical to SEQ ID NO: 41006

SEQ ID NO: 41009 - protein, 107 aa, synthetic construct [sequence omitted]

SEQ ID NO: 41010 - protein, 108 aa, synthetic construct
DIQMTQSPSSLSASVGDRVTITCRASQDVRNIVVWFQQKPGKAPKLLIYSGSYRYSGVPSRFSGSGSGTDFTLTISSLQPEDFATYYCQQHYSPPYTFGQGTKVEIKR

SEQ ID NO: 41011 - protein, 112 aa, synthetic construct
DIVLTQSPLSLAVSLGQPAIISCRASQSVSFAGTSLMHWYHQKPGQQPRLLIYRASNLEAGVPDRFSGSGSKTDFTLTISPVEAEDAATYYCQQSREYPYTFGGGTKLEIKR

SEQ ID NO: 41012 - protein, 109 aa, synthetic construct
DIQMTQSPSSLSASVGDRVTITCRASQDVNTAVAWYQQKPGKAPKLLIYSAYFLYSGVPSRFSGSRSGTDFTLTISSLQPEDFATYYCQQYSRYSPVTFGQGTKVEIKR

SEQ ID NO: 41013 - protein, 109 aa, synthetic construct
DIQMTQSPSSLSASVGDRVTITCRASQDINTAVAWYQQKPGKAPKLLIYSAYFLYSGVPSRFSGSRSGTDFTLTISSLQPEDFATYYCQQYSRYSPVTFGQGTKVEIKR

SEQ ID NO: 41014 - protein, 108 aa, synthetic construct; identical to SEQ ID NO: 8729

SEQ ID NO: 41015 - protein, 108 aa, synthetic construct
DIQMTQSPSSLSASVGDRVTITCKASDLIHNWLAWYQQKPGKAPKLLIYGATSLETGVPSRFSGSGSGTDFTLTISSLQPEDFATYYCQQYWTTPFTFGQGTKVEIKR

SEQ ID NO: 41016 - protein, 107 aa, synthetic construct; identical to SEQ ID NO: 40935

SEQ ID NO: 41017 - protein, 107 aa, synthetic construct
EIVLTQSPATLSLSPGERATLSCRASQSVSSYLAWYQQKPGQAPRLLIYDASNRATGIPARFSGSGSGTDFTLTISSLEPEDFAVYYCQQRSDWPLTFGGGTKVEIK

SEQ ID NO: 41018 - protein, 108 aa, synthetic construct; identical to SEQ ID NO: 8728

SEQ ID NO: 41019 - protein, 107 aa, synthetic construct [sequence omitted]

SEQ ID NO: 41020 - protein, 112 aa, synthetic construct
DIQMTQSPSSLSASVGDRVTITCQASENIYSFLAWYQQKPGKAPKLLIYSASKLAAGVPSRFSGSGSGTDFTLTISSLQPEDFATYYCQQTNRYSNPDIYNVFGQGTKLTVL

SEQ ID NO: 41021 - protein, 113 aa, synthetic construct
DIVMTQSPATLSVSPGERATISCRSSQSIVHSNGNTYLEWYQQKPGQAPRLLIYKVSNRFSGIPDRFSGSGSGTDFTLTISRLEPEDFAVYYCFQGSHVPRTFGGGTKLEIKR

SEQ ID NO: 41022 - protein, 111 aa, synthetic construct
QSALTQPASVSGSPGQSITISCTGTSSDVGGYNYVSWYQQHPGKAPKLMIYDVSNRPSGVSNRFSGSKSGNTASLTISGLQAEDEADYFCSSYTSSSTPVVFGGGTKLTVL

SEQ ID NO: 41023 - protein, 108 aa, synthetic construct
EIVMTQSPGTLSLSPGERATLSCRASQSVSSSYLAWYQQKPGQAPRLLIYGASSRATGIPDRFSGSGSGTDFTLTISRLEPEDFAVYYCQQYGSSPLTFGGGTKVEIK

SEQ ID NO: 41024 - protein, 108 aa, synthetic construct
EIVLTQSPATLSLSPGERATLSCRASQSVSSYLAWYQQKPGQAPRLLIYGASSRATGIPARFSGSGSGTDFTLTISSLEPEDFAVYYCQQRSNWPPYTFGQGTKLEIK

SEQ ID NO: 41025 - protein, 108 aa, synthetic construct; identical to SEQ ID NO: 41024

SEQ ID NO: 41026 - protein, 108 aa, synthetic construct; identical to SEQ ID NO: 41023

SEQ ID NO: 41027 - protein, 107 aa, synthetic construct
DIQMTQSPSSLSASVGDRVTITCRASQSISSYLNWYQQKPGKAPKLLIYDASTLQSGVPSRFSGSGSGTDFTLTISSLQPEDFATYYCQQSDGNPTTFGQGTKVEIK

SEQ ID NO: 41028 - protein, 98 aa, synthetic construct; identical to SEQ ID NO: 20393

SEQ ID NO: 41029 - protein, 98 aa, synthetic construct; identical to SEQ ID NO: 20394

SEQ ID NO: 41030 - protein, 120 aa, synthetic construct
QVQLQQSGAELVKPGASVKISCKASGYAFSSYWMNWVKQRPGKGLEWIGQIYPGDGDTTYNGKFKGKATLTADKSSSTVYMQLNSLTSEDSAVYFCVRYYYGSSGYFDYWGQGTTLTVSS

SEQ ID NO: 41031 - protein, 120 aa, synthetic construct
ALQLQQSGAELVRPGASVTLSCKASGYTFTDYEMHWVKQTPVHGLEWIGAIDPETGGTAYNQKFEGKAILTADKSSSTAYMELRSLTSEDSPVYYCARRRYYGSSSFDYWGQGTTLTVSS

SEQ ID NO: 41032 - protein, 117 aa, synthetic construct; identical to SEQ ID NO: 20405

SEQ ID NO: 41033 - protein, 121 aa, synthetic construct
QVQLVQSGAEVKKPGSSVKVSCKASGGTFSNYWMHWVRQAPGQGLEWMGATYRGHSDTYYNQKFKGRVTITADKSTSTAYMELSSLRSEDTAVYYCARGAIYDGYDVLDNWGQGTLVTVSS

SEQ ID NO: 41034 - protein, 120 aa, synthetic construct [sequence omitted]

SEQ ID NO: 41035 - protein, 122 aa, synthetic construct
QVQLQQSGSELMMPGASVKISCKATGYTFSNYWIEWVKQRPGHGLEWIGEILPGTGRTIYNEKFKGKATFTADISSNTVQMQLSSLTSEDSAVYYCARRDYYGNFYYAMDYWGQGTSVTVSS

SEQ ID NO: 41036 - protein, 118 aa, synthetic construct
EVQLQQSGPELVKPGASVKMSCKASGYTFTDYYMKWMKQSHGKSLEWIGDINPNNGGTTYNQKFKGKATLTVDKSSSTAYMQLNSLTSEDSAVYYCARDYGYGYFDYWGQGTTLTVSS

SEQ ID NO: 41037 - protein, 120 aa, synthetic construct
QVQLQESGPGLVKPSQTLSLTCTVSGGSISTSGMGVGWIRQHPGKGLEWIGHIWWDDDKRYNPALKSRVTISVDTSKNQFSLKLSSVTAADTAVYYCARMELWSYYFDYWGQGTLVTVSS

SEQ ID NO: 41038 - protein, 120 aa, synthetic construct
EVKLQESGPGLVAPSQSLSVTCTVSGVSLPDYGVSWIRQPPRKGLEWLGVIWGSETTYYNSALKSRLTIIKDNSKSQVFLKMNSLQTDDTAIYYCAKHYYYGGSYAMDYWGQGTSVTVSS

SEQ ID NO: 41039 - protein, 120 aa, synthetic construct
QVQLQESGPGLVKPSETLSLTCTVSGVSLPDYGVSWIRQPPGKGLEWIGVIWGSETTYYNSSLKSRVTISKDNSKNQVSLKLSSVTAADTAVYYCAKHYYYGGSYAMDYWGQGTLVTVSS

SEQ ID NO: 41040 - protein, 122 aa, synthetic construct
EVQLVESGGGLVQPGRSLRLSCAASGFTFNDYAMHWVRQAPGKGLEWVSTISWNSGSIGYADSVKGRFTISRDNAKKSLYLQMNSLRAEDTALYYCAKDIQYGNYYYGMDVWGQGTTVTVSS

SEQ ID NO: 41041 - protein, 119 aa, synthetic construct
QVQLVQSGAEVKKPGSSVKVSCKASGYAFSYSWINWVRQAPGQGLEWMGRIFPGDGDTDYNGKFKGRVTITADKSTSTAYMELSSLRSEDTAVYYCARNVFDGYWLVYWGQGTLVTVSS

SEQ ID NO: 41042 - protein, 120 aa, synthetic construct
EVQLVESGGGLVQPGGSLRLSCAASGYEFSRSWMNWVRQAPGKGLEWVGRIYPGDGDTNYSGKFKGRFTISADTSKNTAYLQMNSLRAEDTAVYYCARDGSSWDWYFDVWGQGTLVTVSS

SEQ ID NO: 41043 - protein, 117 aa, synthetic construct
QVQLVQSGAEVKKPGSSVKVSCKASGGTFSSYAISWVRQAPGQGLEWMGGIIPILGTANYAQKFQGRVTITADESTSTAYMELSSLRSEDTAVYYCARWGGGAFDIWGQGTMVTVSS

SEQ ID NO: 41044 - protein, 112 aa, synthetic construct
QVQLQQWGAGLLKPSETLSLTCAVYGGSFSAYYWSWIRQPPGKGLEWIGDINHGGGTNYNPSLKSRVTISVDTSKNQFSLKLNSVTAADTAVYYCASLTAYWGQGSLVTVSS

SEQ ID NO: 41045 - protein, 117 aa, synthetic construct
QVQLVQSGAEVKKPGASVKVSCKVSGYTFTDYYITWVRQAPGQALEWMGWIYPGSGNTKYSQKFQGRFVFSVDTSASTAYLQLSSLKAEDTAVYYCANYGNYWFAYWGQGTLVTVSS

SEQ ID NO: 41046 - protein, 119 aa, synthetic construct
EVQLVQSGGGLVHPGGSLRLSCAGSGFAFSSSTMHWIRQAPGKGLEWISLIGSGGGIYYGDSVKGRFTISRDNAKNSLYLQMNSLRAEDMAVYYCVRGYFDWVDYFDYWGQGTLVTVSS

SEQ ID NO: 41047 - protein, 120 aa, synthetic construct
EVQLVESGGGLVQPGGSLRLSCAASGFTFSSYGMHWVRQAPGKGLEWVAYITTRSSTIYYADSVKGRFTISRDNAKNSLYLQMNSLRAEDTAVYYCTREPLTGYYAMDYWGQGTSVTVSS

SEQ ID NO: 41048 - protein, 116 aa, synthetic construct
DVQLQESGPGLVKPSQSLSLTCTVTGFSITSDYSWNWIRQFPGNKLEWMGYISYSGHTSYNPSLESRISITRDTSKNQFFLQLNSVTTEDTATYYCTRGNWDVVYWGQGTLVTVSA

SEQ ID NO: 41049 - protein, 118 aa, synthetic construct
QVQLQQPGAEVVKPGASVKMSCKASGYTFTSYYIHWIKQTPGQGLEWVGVIYPGNDDISYNQKFQGKATLTADKSSTTAYMQLSSLTSEDSAVYYCAREVRLRYFDVWGQGTTVTVSS

SEQ ID NO: 41050 - protein, 122 aa, synthetic construct
QVQLVQSGAEVKKPGASVKVSCKASGYTFTNYGMNWVKQAPGQGLKWMGWINTYTGEPTYADDFKGRVTMTSDTSTSTAYLELHNLRSDDTAVYYCARWSWSDGYYVYFDYWGQGTTVTVSS

SEQ ID NO: 41051 - protein, 122 aa, synthetic construct
QIQLVQSGSELKKPGASVKVSCKASGYTFTNYGMNWVRQAPGQGLKWMGWINTNTGEPKYAEEFKGRFALSLDTSVSTAYLQINSLKAEDTAVYFCARGYGNYARGAWLAYWGQGTLVTVSS

SEQ ID NO: 41052 - protein, 121 aa, synthetic construct
QVQLKESGPELEKPGASVKISCKASGYSFTAYSMNWVKQNNGMSLEWIGSIDPYYGDTKYAQKFKGKATLTVDKASSTAYLQLKSLTSEDSAVYYCARRMITTGDWYFDVWGAGTTVTVSS

SEQ ID NO: 41053 - protein, 121 aa, synthetic construct; identical to SEQ ID NO: 41052

SEQ ID NO: 41054 - protein, 118 aa, synthetic construct
QVQLVQSGAEVKKPGASVKVSCKASGYTFTNYGMNWVRQAPGQGLEWMGWINTYTGEPTYADAFKGRFAFSLDTSTSTAYLQINSLRSDDTAVYYCARDYGDYGMDYWGQGTTVTVSS

SEQ ID NO: 41055 - protein, 113 aa, synthetic construct
QVQLQQPGAELVRPGASVKLSCKASGYTFTSYWMNWVKQRPGQGLEWIGMIDPSDSETHYNHIFKDKATLTVDKSSSTAYLQLSSLTSEDSAVYYCARNLYLWGQGTSVTVSS

SEQ ID NO: 41056 - protein, 117 aa, synthetic construct [sequence omitted]

SEQ ID NO: 41057 - protein, 123 aa, synthetic construct
EVQLQQSVAELVKPGASVKMSCKVSGYTLTDHTIHWMKQRPEQGLEWIGYIYPRDGITGYNEKFKGKATLTADTSSSTAYMQLNSLTSEDSAVYFCARWGYSYRNYAYYYDYWGQGTTLTVSS

SEQ ID NO: 41058 - protein, 125 aa, synthetic construct
QVQLQESGPGLAKPSETLSLTCTVSGDSITSYYWSWIRQPPGKGLEWIGYIYYSGSTNYNPSLKSRVTISVDTSKNQFSLKLSSVTAADTAVYYCARDQRRIAAAGTHFYGMDVWGQGTTVTVSS

SEQ ID NO: 41059 - protein, 116 aa, synthetic construct
QVQLLESGGGLVQPGGSLRLSCAASGFTFSSYAMSWVRQAPGKGLEWVSVIRSSGSSTYYADSVKGRFTISRDNSKNTLYLQMNSLRAEDTAVYYCARGGGYFDYWGQGTLVTVSS

SEQ ID NO: 41060 - protein, 118 aa, synthetic construct
QVQLLESGGGLVQPGGSLRLSCAASGFTFSSHGMHWVRQAPGKGLEWVSVISGSGSNTGYADSVKGRFTISRDNSKNTLYLQMNSLRAEDTAVYYCARQWGSYAFDSWGQGTLVTVSS

SEQ ID NO: 41061 - protein, 118 aa, synthetic construct
QVQLEESGPELVKPGASVKLSCKASGYTFTEYIIHWVKQRSGQGLEWIGWFYPGSGSIKYNEKFKDKATLTADKSSSTVYMELSGLTSEDSAVYFCARHDGYSYFDYWGQGTTLTVSS

SEQ ID NO: 41062 - protein, 115 aa, synthetic construct
ESGRGLVQPGGSRKLSCAASGFTFSTSGMHWVRQAPEKGLEWVAYISSGSTTIYHADTVKGRFTISRDNPKNTLFLQMTSLRSEDTAMYYCCARSGQFGNYFDYWGQGTTLTVSS

SEQ ID NO: 41063 - protein, 120 aa, synthetic construct
EVQLQQSGPELVKPGASVKMSCKASGYTFTSYFIHWVKQKPGQGLEWIGFINPYNDGSKYNEKFKGKATLTSDKSSSTAYMELSSLTSEDSAVYYCTRDDGYYGYAMDYWGQGTSVTVSS

SEQ ID NO: 41064 - protein, 120 aa, synthetic construct
EVQLQQSGPELVKPGASVKMSCKASGYTFTSYVMHWVKQKPGQGLEWIGYINPYNDGTKYNEKFKGKATLTSDTSSSTAYMELNSLTSEDSAVYFCARPIYFDNDYFDYWGQGTTLKVSS

SEQ ID NO: 41065 - protein, 119 aa, synthetic construct
EVQLVESGGGLVQPGGSLRLSCAASGFDFSRYWMSWVRQAPGKGLEWIGEINPDSSTINYAPSLKDKFIISRDNAKNSLYLQMNSLRAEDTAVYYCARPDGNYWYFDVWGQGTLVTVSS

SEQ ID NO: 41066 - protein, 120 aa, synthetic construct
QVQLQQPGAELVRPGASVKLSCKASGYSFTTYWMNWVKQRPGQGLEWIGMIHPSDSETRLNQKFKDKATLTVDKSSSTAYMQLSSPTSEDSAVYYCARSTMIATRAMDYWGQGTSVTVSS

SEQ ID NO: 41067 - protein, 120 aa, synthetic construct
QVQLVQSGAEVKKPGASVKVSCKVSGYTLTELSIHWVRQAPGKGLEWMGGFDPEENEIVYAQRFQGRVTMTEDTSTDTAYMELSSLRSEDTAVYYCAIVGSFSGIAYRPWGQGTMVTVSS

SEQ ID NO: 41068 - protein, 120 aa, synthetic construct
QVQLVQSGAEVKKPGASVKVSCKVSGYTLTELSIHWVRQAPGKGLEWMGGFDPEENEIVYAQRFQGRVTMTEDTSTDTAYMELSSLRSEDTAVYYCAIVGSFSPLTLGLWGQGTMVTVSS

SEQ ID NO: 41069 - protein, 124 aa, synthetic construct
QITLKESGPTLVKPTQTLTLTCTFSGFSLSTSGMGVGWIRQPPGKALEWLAHIWWDDVKRYSPSLKSRLTITKDTSKNQVVLTMTNMDPVDTATYYCARIVSFDNDVVSAMDYWGQGTLVTVSS

SEQ ID NO: 41070 - protein, 118 aa, synthetic construct
QVQLVQSGAEVKKPGASVKVSCKASGYTFTNYGMNWVRQAPGQGLEWMGWINTYTGEPTYADDFKGRVTMTTDTSTSTAYMELRSLRSDDTAVYYCARIGDSSPSDYWGQGTLVTVSS

SEQ ID NO: 41071 - protein, 119 aa, synthetic construct
QVQLKQSGPGLVQPSQSLSITCTVSGFSLTNYGVHWVRQSPGKGLEWLGVIWSGGNTDYNTPFTSRLSINKDNSKSQVFFKMNSLQSNDTAIYYCARALTYYDYEFAYWGQGTLVTVSA

SEQ ID NO: 41072 - protein, 114 aa, synthetic construct
EIQLVQSGAEVKKPGESLRISCKGSGFNIEDYYIHWVRQMPGKGLEWMGRIDPENDETKYGPIFQGHVTISADTSINTVYLQWSSLKASDTAMYYCAFRGGVYWGQGTTVTVSS

SEQ ID NO: 41073 - protein, 127 aa, synthetic construct
EVQLLESGGGVVQPGRSLRLSCAASGFTFSSYGMHWVRQAPGKGLEWVAVISYDGSNKYYADSVKGRFTISRDNSKNTLYLQMNSLRAEDTAVYYCAKDMGWGSGWRPYYYYGMDVWGQGTTVTVSS

SEQ ID NO: 41074 - protein, 120 aa, synthetic construct
EVQLLEQSGAELVRPGTSVKISCKASGYAFTNYWLGWVKQRPGHGLEWIGDIFPGSGNIHYNEKFKGKATLTADKSSSTAYMQLSSLTFEDSAVYFCARLRNWDEPMDYWGQGTTVTVSS

SEQ ID NO: 41075 - protein, 124 aa, synthetic construct
VHEVQLVQSGAEVKKPGSSVKVSCKASGGTFSSYAISWVRQAPGQGLEWMGGIIPIFGTANYAQKFQGRVTITADKSTSTAYMELSSLRSEDTAVYYCATFALFGFREQAFDIWGQGTTVTVSS

SEQ ID NO: 41076 - protein, 122 aa, synthetic construct [sequence omitted]

SEQ ID NO: 41077 - protein, 118 aa, synthetic construct
QVQLVQSGAEVVKPGASVKISCKASGYTFTGYFMNWVKQSPGQSLEWIGRIHPYDGDTFYNQKFQGKATLTVDKSSNTAHMELLSLTSEDFAVYYCTRYDGSRAMDYWGQGTTVTVSS

SEQ ID NO: 41078 - protein, 113 aa, synthetic construct
EVQLVQSGAEVEKPGASVKISCKASGSSFTGYNMNWVRQNIGKSLEWIGAIDPYYGGTSYNQKFKGRATLTVDKSTSTAYMHLKSLRSEDTAVYYCVSGMEYWGQGTSVTVSS

SEQ ID NO: 41079 - protein, 121 aa, synthetic construct
QVQLVESGPGVVQPGRSLRISCAVSGFSVTNYGVHWVRQPPGKGLEWLGVIWAGGITNYNSAFMSRLTISKDNSKNTVYLQMNSLRAEDTAMYYCASRGGHYGYALDYWGQGTLVTVSSTR

SEQ ID NO: 41080 - protein, 119 aa, synthetic construct
EVTLVESGGDFVKPGGSLKVSCAASGFAFSHYAMSWVRQTPAKRLEWVAYISSGGSGTYYSDSVKGRFTISRDNAKNTLYLQMRSLRSEDSAMYFCTRVKLGTYYFDSWGQGTTLTVSS

SEQ ID NO: 41081 - protein, 118 aa, synthetic construct
EQLKESGGGLFKPTDTLTLTCTVSGFSLSYYGVNWVRQAPGNGLEWIGTIGGSGDTYYASWAKSRSTIIRNTNENTVTLKMTSLTAADTATYFCVRYANIGYEYFNVWGPGTLVTVSS

SEQ ID NO: 41082 - protein, 121 aa, synthetic construct
EVQLVESGGGLVQPGESLRLSCVASGFTFSRYKMNWVRQAPGKGLEWVSYISRSGRDIYYADSVKGRFTISRDNAKNSLYLQMNSLRDEDTAVYYCAGTVTTYYYFGMDVWGHGTTVTVSS

SEQ ID NO: 41083 - protein, 116 aa, synthetic construct
EVQLVESGGGLIQPGGSLRLSCAASGFTFSNYAMNWVRQAPGKGLEWVSTINGRGSSTIYADSVKGRFTISRDNSKNTLYLQMNSLRAEDTATYYCARYISRGLGDSWGQGTLVTV

SEQ ID NO: 41084 - protein, 117 aa, synthetic construct
EVQLVESGGGLVKPGGSLRLSCAASGFTFSDYYMSWIRQAPGKGLEWVSYISSSGSTIYYADSVKGRFTISRDNAKNSLYLQMNSLRAEDTAVYYCARGYGKAYDQWGQGTLVTVSS

SEQ ID NO: 41085 - protein, 120 aa, synthetic construct
EVQLVESGGGLVQPGGSLRLSCAASGFNIKDTYIHWVRQAPGKGLEWVARIYPTNGYTRYADSVKGRFTISADTSKNTAYLQMNSLRAEDTAVYYCSRWGGDGFYAMDVWGQGTLVTVSS

SEQ ID NO: 41086 - protein, 135 aa, synthetic construct
QPQLQESGPTLVEASETLSLTCAVSGDSTAACNSFWGWVRQPPGKGLEWVGSLSHCASYWNRGWTYHNPSLKSRLTLALDTPKNLVFLKLNSVTAADTATYYCARFGGEVLRYTDWPKPAWVDLWGRGTLVTVSS

SEQ ID NO: 41087 - protein, 128 aa, synthetic construct
LEQSGAEVKKPGSSVQVSCKASGGTFSMYGFNWVRQAPGHGLEWMGGIIPIFGTSNYAQKFRGRVTFTADQATSTAYMELTNLRSDDTAVYYCARDFGPDWEDGDSYDGSGRGFFDFWGQGTLVTVSS

SEQ ID NO: 41088 - protein, 118 aa, synthetic construct
EVQLLESGGGLVQPGGSLRLSCAASGFTFSWYSMTWVRQAPGKGLEWVSSIVPWGDFTQYADSVKGRFTISRDNSKNTLYLQMNSLRAEDTAVYYCAKGPGWGSFDLWGRGTLVTVSS

SEQ ID NO: 41089 - protein, 116 aa, synthetic construct
EVQLVESGGGLVQPGGSLRLSCAASGFSLTKYGVHWVRQAPGKGLEWVGVKWAGGSTDYNSALMSRFTISKDNAKNSLYLQMNSLRAEDTAVYYCARDHRDAMDYWGQGTLVTVSS

SEQ ID NO: 41090 - protein, 122 aa, synthetic construct
EVQLVESGGGLVQPGGSLRLSCAASGFTFSRNGMSWVRQAPGKGLEWVATVSSGGSYIYYADSVKGRFTISRDNAKNSLYLQMNSLRAEDTAVYYCARQGTTALATRFFDVWGQGTLVTVSS

SEQ ID NO: 41091 - protein, 117 aa, synthetic construct
EVQLVQSGGGLVQSGGSLRLSCRASGYTFTRYWMLWVRQRPGKGLEWVAEINPRNDRTNYNEKFKTRFTISVDRSKNTLYLQMDSLRAEDTAVYFCALGGGYAMDYWGQGTLVTVSS

SEQ ID NO: 41092 - protein, 118 aa, synthetic construct
QVQLVQSGAELVKPGASVKMSCKASGYIFTNYNIHWVKKSPGQGLEWIGAIYPGNGDAPYSQKFQDRATLTADTSSSTTYMELSSLTSEDSAVYYCVRANWDVAFAYWGQGTLVSVSS

SEQ ID NO: 41093 - protein, 119 aa, synthetic construct
QVQLQQSGASVKVSCKASELVRPGTGYAFTNYLIEWVKQRPGQGLEWIGVINPGSGGTNYNEKFKGKATLTADKSSSTAYMQLSSLTSDDSAVYFCARYRSYDWYFDVWGAGTTVTVSS

SEQ ID NO: 41094 - protein, 119 aa, synthetic construct
QVQLKESGPGLVAPSQSLSITCTISGFSLTSYGVHWVRQPPGKGLEWLVVIWSDGSTTYNSALKSRLSISKDNSKSQVFLKMNSLQTDDTAIYYCASHYGSTLAFASWGHGTLVTVSAA

SEQ ID NO: 41095 - protein, 127 aa, synthetic construct
EVQLEESGGGLVQPGGSMKLSCVASGFTFSNYWMNWVRQSPEKGLEWVAEIRFKSHNYATHFAESVKGRFTISRDDSKSSVYLQMNNLRAEDTGIYYCTRRIGNSDYDWWYFDVWGAGTSVTVSSAS

SEQ ID NO: 41096 - protein, 118 aa, synthetic construct
DVQLQESGPGLVKPSQSLSLTCTVTGYSITIDYTWNWIRQFPGNKLEWMGYITYSGSTDYNPSLKSRSSITRDTSMNQFFLQLNSVTTEDTATYYCARLGRRYALDYWGQGTSVTVSS

SEQ ID NO: 41097 - protein, 118 aa, synthetic construct
DVQLQESGPGLVKPSQSLSLTCTVTGYSITSDYTWNWIRQFPGNKLEWMGYITYSGSTSYNPSLKSRNSITRDTSKNQFFLQLNSVTTEDTATYYCARLGRRYTMDYWGQGTSVTVSS

SEQ ID NO: 41098 - protein, 118 aa, synthetic construct; identical to SEQ ID NO: 41097

SEQ ID NO: 41099 - protein, 120 aa, synthetic construct
EVQLVESGGGLVQPKGSLKLSCAASGFSFNTYAMNWVRQAPGKGLEWIAHIRSKSNNFATYYADSVKDRFSISRDASENILFLQMNNLKTEDTAMYYCVRQGGDFPMDYWGQGTSVTVSS

SEQ ID NO: 41100 - protein, 120 aa, synthetic construct
QVQLVESGGGVVQPGRSLRLSCAASGFTFSSYAMHWVRQAPGKGLEWVAVISYDGSNKYYADSVKGRFTISRDNSKNTLYLQMNSLRAEDTAVYYCARAHNSSSWSFDYWGQGTLVTVSS

SEQ ID NO: 41101 - protein, 124 aa, synthetic construct
EVRLQQSGPDLIKPGASVKMSCKASGYTFTGYVMHWVKQRPGQGLEWIGFINPYNDDIQSNERFRGKATLTSDKSSTTAYMELSSLTSEDSAVYYCARGAGYNFDGAYRFFDFWGQGTTLTVSS

SEQ ID NO: 41102 - protein, 119 aa, synthetic construct
QVQLVESGAEVKKPGASVKVSCKASGYTFTGYYMHWVRQAPGQGLEWMGRINPNSGGTNYAQKFQGRVTMTRDTSISTAYMELSRLRSDDTAVYYCASPRGRGSAFDIWGQGTLVTVSS

SEQ ID NO: 41103 - protein, 118 aa, synthetic construct
EVQLVESGGGVVQPGGSLRLSCAASGFTFSSYAMSWVRQAPGKGLEWVSAISGSGGSTYYADSVKGRFSISRDNSKNTLYLQMNSLRAEDTAVYYCARTRSSGAFDIWGQGTLVTVSS

SEQ ID NO: 41104 - protein, 119 aa, synthetic construct
EVQLQQSGPELVKPGASVKISCKASGYSFTGYFMNWVKQSHGKSLEYIGRFNPYNGETLYNQKFKGKATLTVDKSSSTVHMELLSVTSEDSAVYYCGRSGNDDAMDYWGQGTSVTVSSA

SEQ ID NO: 41105 - protein, 116 aa, synthetic construct
QVQLQQSDAELVKPGASVKISCKASGYTFTDHAIHWVKQKPEQGLEWIGYFSPGNGDIKYNEKFKGKATLTADKSSSTAYMQLNSLTSEDSAVYFCKRSYGNYDYWGQGTTLTVSS

SEQ ID NO: 41106 - protein, 116 aa, synthetic construct
QVQLVQSGAEVKKTGSSVKVSCKASGYTFTDHAIHVWRQAPGQALEWMGHFSPGNTDIKYNDKFKGRVTLTVDRSMSTAYMELSSLRSEDTAMYYCKTSTFFFDYWGQGTMVTVSS

SEQ ID NO: 41107 - protein, 121 aa, synthetic construct
QIQLVQSGHEVKKPGASVKVSCKASGYTFTNYGMNWVRQAPGQGLEWMGWINTKTGEPTYAEEFKGRFVFSLETSASTAYLQISSLKAEDTAMYFCGRGGYGSSYWYFDVWGQGTTVTVSS

SEQ ID NO: 41108 - protein, 121 aa, synthetic construct
QMQLVQSGAEVKEPGESLRISCKGSGYSFTNFWISWVRQMPGKGLEWMGRVDPGYSYSTYSPSFQGHVTISADKSTSTAYLQWNSLKASDTAMYYCARVQYSGYYDWFDPWGQGTLVTVSS

SEQ ID NO: 41109 - protein, 118 aa, synthetic construct
QVQLVQSGAEVKKPGESLKISCKGSGYNFSNKWIGWVRQLPGRGLEWIAIIYPGYSDITYSPSFQGRVTISADTSINTAYLHWHSLKASDTAMYYCVRHTALAGFDYWGLGTLVTVSS

SEQ ID NO: 41110 - protein, 121 aa, synthetic construct
EVQLVQSGGGVMRPGGSLRLSCAASGFTFDDYGMSWVRQAPGKGLEWVSGINWNGGSTGYADSVRGRFTISRDNAKNSLYLQMNSLRAEDTALYYCARERGYGYHDPHDYWGQGTLVTVSS

SEQ ID NO: 41111 - protein, 118 aa, synthetic construct
QIQLVQSGPELKKPGETVKISCKASGYIFTNYGMNWVKQAPGKSFKWMGWINTYTGESTYSADFKGRFAFSLETSASTAYLHINDLKNEDTATYFCARSGGYDPMDYWGQGTSVTVSS

SEQ ID NO: 41112 - protein, 119 aa, synthetic construct
QVQLVESGGGVVQPGRSLRLSCAASGFTFSSYDMHWVRQAPGKGLEWVAVISYDGTNEYYADSVKGRFTISRDTSKNTLYLQMNSLRAEDTAVYYCARERYFDWSFDYWGQGTLVSVSS

SEQ ID NO: 41113 - protein, 118 aa, synthetic construct
EVQLVQSGAEVKKPGASVKVSCKASGYTFTSYAMHWVRQAPGQRLEWMGWINAGNGNTKYSQKFQGRVTITRDTSASTAYMELSSLRSEDTAVYYCARDISYGSFDYWGQGTLVTVSS

SEQ ID NO: 41114 - protein, 116 aa, synthetic construct
EVQLVQSGAEVKKPGASVKVSCKASGYTFTNFWIHWVRQAPGQGLEWIGEIDPSDSYTNYNQKFKGRVTITRDTSTSTAYLELSSLRSEDTAVYYCAREITTVDYWGQGTLVTVSS

SEQ ID NO: 41115 - protein, 121 aa, synthetic construct
EVQLVQSGAEVKKPGASVKVSCKASGYTFTSYWIGWVRQAPGQGLEWIGDIYPGGGYTNYNEKFKGRVTITRDTSTSTAYLELSSLRSEDTAVYYCARLDGSSYRGAMDSWGQGTLVTVSS

SEQ ID NO: 41116 - protein, 118 aa, synthetic construct
EVQLVESGGGLAKPGGSLRLSCAASGFRFTFNNYYMDWVRQAPGQGLEWVSRISSSGDPTWYADSVKGRFTISRENAKNTLFLQMNSLRAEDTAVYYCASLTTGSDSWGQGVLVTVSS

SEQ ID NO: 41117 - protein, 120 aa, synthetic construct
EVQLLESGGGLVQPGGSLRLSCAASGFTFSRYAMNWVRQAPGKGLEWVSGISGSGGRTYYADSVKGRFTISRDNSKNTLYLQMNSLRAEDTAVYYCAKDRDFWSGPFDYWGQGTLVTVSS

SEQ ID NO: 41118 - protein, 124 aa, synthetic construct
QVQLQESGPGLVKPSETLSLTCTVSGYTITSGYDWSWIRQPPGKGLEWIGYINYGGSTNYKPSLGSRVTISVDTSKNQFSLKLSSVTAADTAVYYCARYNEYKSYIYDWYFDFWGQGTLVTVSS

SEQ ID NO: 41119 - protein, 124 aa, synthetic construct
EVQLVESGGGLVKPGGSLRLSCAASGFTFSNAWMSWVRQAPGKGLEWVGFIRSKAYGGTTEYAASVKGRFTISRDDSKSIAYLQMNNLKTEDTAVYYCARDGLYSSSWYDSDYWGQGTLVTVSS

SEQ ID NO: 41120 - protein, 126 aa, synthetic construct
QMQLVQSGGGLVQPGRSLRLSCAASGFTFDDYAMHWVRQAPGKGLEWVSGISWNSGSIGYADSVKGRFTISRDNAKNSLYLQMNSLRAEDTALYYCAKDIHSGSYYGLLYYAMDVWGQGTTVTVSS

SEQ ID NO: 41121 - protein, 125 aa, synthetic construct
LEMAQVQLVQSGAEVKKPGSSVKVSCKASGGTFSSYAISWVRQAPGQGLEWMGRIIPILGIANYAQKFQGRVTITADKSTSTAYMELSSLRSEDTAVYYCARGGYYSHDMWSEDWGQGTLVTVSS

SEQ ID NO: 41122 - protein, 117 aa, synthetic construct
QVQLVQSGSELKKPGESVKISCKASGYTFTDYSINWVKQAPGQGLKWMGWINTETREPAYAYDFRGRFVFSLDTSASTAYLQISSLKAEDTAVYFCALDYSYAMDYWGQGTLVTVSS

SEQ ID NO: 41123 - protein, 117 aa, synthetic construct
QVQLVQSGSELKKPGESVKISCKASGYTFTHYSMNWVRQAPGQGLEWMGRINTETGEPLYADDFKGRFVFSLDTSASTAYLQISSLKAEDTAVYYCSNDYLYSLDYWGQGTLVTVSS

SEQ ID NO: 41124 - protein, 120 aa, synthetic construct
EVQLVQSGAELKKPGASVKVSCKASGYTFTDYYMKWVRQAPGQGLEWIGDIIPSNGATFYNQKFKGRVTITVDKSTSTAYMELSSLRSEDTAVYYCARSHLLRASWFAYWGQGTLVTVSS

SEQ ID NO: 41125 - protein, 120 aa, synthetic construct
QVQLVQSGAELKKPGASVKVSCKASGYTFTDYYMKWVRQAPGQGLEWIGDIIPSNGATFYNQKFKGRVTITVDKSTSTAYMELSSLRSEDTAVYYCARSHLLRASWFAYWGQGTLVTVSS

SEQ ID NO: 41126 - protein, 115 aa, synthetic construct
QVQLQQPGAELVRPGASVKLSCKASGYTFTSYWMNWVKQRPDQGLEWIGRIDPYDSETHYNQKFKDKAILTVDKSSSTAYMQLSSLTSEDSAVYYCARGNWDDYWGQGTTLTVSS

SEQ ID NO: 41127 - protein, 119 aa, synthetic construct
EVQLVESGGGLVQPGRSLKLSCAASGFTFSDYNMAWVRQAPKKGLEWVATILYDGGRTYYRGSVKGRFTISRDNAKSTLYLRMDSLRSEDTATYYCATHSRGTDYFDYWGQGVMVTVSS

SEQ ID NO: 41128 - protein, 121 aa, synthetic construct
EVKLQESGPSLVQSSQTLSLTCTVSGFSLTSYHIHWVRQTPGKGLEWMGVMWSDGDTSYNSALKSRLSISRDTSQSQVFLKMNSLQTEDTATYYCARGYYSSYLYLWFAYWGQGTLVTVSS

SEQ ID NO: 41129 - protein, 125 aa, synthetic construct
QVQLQQSGPELRRPGSSVRLSCKASGYRIKDFLIHWIKNRPEHGLEWIGWIDPEDGETKYAQKFQTKATLTADTSSNTAYMQLSSLTSEDTATYFCARWGDVYYGLMRGHVMDAWGQGTSVTVSS

SEQ ID NO: 41130 - protein, 121 aa, synthetic construct
EVQLVESGGGLVKPGGSLKLSCAASGYTFTSYVMHWVRQAPGKGLEWIGYINPYNDGTKYNEKFQGRVTISSDKSISTAYMELSSLRSEDTAMYYCARGTYYYGTRVFDYWGQGTLVTVSS

SEQ ID NO: 41131 - protein, 121 aa, synthetic construct; identical to SEQ ID NO: 8743

SEQ ID NO: 41132 - protein, 120 aa, synthetic construct
QVQLVQSGAEVKKPGASVKVSCKASGYTFTSYNMHWVRQAPGQRLEWMGGIYPGNGDTSYNQKFKGRVTITRDTSASTAYMELSSLRSEDTAVYYCARYDYNYAMDYWGQGTLVTVSSAS

SEQ ID NO: 41133 - protein, 122 aa, synthetic construct
EVQLVESGGGLVQPDRSLRLSCAASGFTFHDYAMHWVRQAPGKGLEWVSTISWNSGTIGYADSVKGRFTISRDNAKNSLYLQMNSLRAEDTALYYCAKDIQYGNYYYGMDVWGQGTTVTVSS

SEQ ID NO: 41134 - protein, 117 aa, synthetic construct
QVQLVQSGAEVKKPGASVKVSCKASGYTFTNYDINWVRQAPGQGLEWIGWIYPGDGSTKYNEKFKAKATLTADTSTSTAYMELRSLRSDDTAVYYCASGYEDAMDYWGQGTTVTVSS

SEQ ID NO: 41135 - protein, 114 aa, synthetic construct
QVQLVQSGAEVKKPGASVKVSCKASGYTFKDTYIHWVRQAPGQGLEWMGRIDPANGNTKYDPKFQGRVTMTRDTSISTAYMELSRLRSDDTAVYYCARRGGVDWGQGTLVTVSS

SEQ ID NO: 41136 - protein, 121 aa, synthetic construct
EVQLVQSGAEVKKPGASVKVSCKASGYTFTDYYLDVVVRQAPGQGLEWIGRVNPYNGGTIYNQKFKGRVTLTRDTSTSTAYLELSSLRSEDTAVYYCARDHYRYDPLLDYWGQGTLVTVSS

SEQ ID NO: 41137 - protein, 122 aa, synthetic construct
EVQLVQSGAEVKKPGASVKVSCKASGYSFTDYYMHWVRQAPGQGLEWIGRINPYNGAAFYSQNFKDRVTLTVDTSTSTAYLELSSLRSEDTAVYYCAIERGADLEGYAMDYWGQGTLVTVSS

SEQ ID NO: 41138 - protein, 123 aa, synthetic construct
QVQLQESGPGLVKPSETLSLTCAVSGYSITSAYYWNWIRQPPGKGLEWIGYISYDGRNNYNPSLKNRITINPDTSKNQFSLQLNSVTPEDTAVYYCAREGDYDVGNYYAMDYWGQGTLVTVSS

SEQ ID NO: 41139 - protein, 123 aa, synthetic construct
EVQLVESGGGLVQPGRSLRLSCAASGYSITSAYYWNWVRQAPGKGLEWVSYISYDGRNNYNPSLKNRFTISRDNAKKSLYLQMNSLRAEDTALYYCAKEGDYDVGNYYAMDYWGQGTTVTVSS

SEQ ID NO: 41140 - protein, 118 aa, synthetic construct
GVKLDETGGGLVQPGGAMKLSCVTSGFTFGHYWMNWVRQSPEKGLEWVAQFRNKPYNYETYYSDSVKGRFTISRDDSKSSVYLQMNNLRVEDTGIYYCTGASYGMEYLGQGTSVTVST

SEQ ID NO: 41141 - protein, 126 aa, synthetic construct [sequence omitted]

SEQ ID NO: 41142 - protein, 114 aa, synthetic construct
EVQLVETGGNLVQPGASLRLSCAASGFSFSGTAMHWVRQAPGKGLEWVSTISSTGRSTYYRDSVKGRFTISRDNSKNTLYLQMNSLRGEDTAVYYCARVSFDYWGQGTLVTVSS

SEQ ID NO: 41143 - protein, 118 aa, synthetic construct
EVQLVESGGAFVQPGGSLRLSCAASGFTFSSYAMTWVRQAPGKGLEWVSTISGRGRSTFYADSVKGRFTISRDNSKNTLYLQMNSLRAEDTAVYYCARYYHAGAFDLWGQGTLVTVSS

SEQ ID NO: 41144 - protein, 123 aa, synthetic construct
QVQLVQSGGGVVQPGGSLRVSCAASGVTLSDYGMHWVRQAPGKGLEWVAFIRNDGSDKYYADSVKGRFTISRDNSEKTVSLQMSSLRAEDTAVYYCAKNGESGPLDYWYLDLWGRGTLVTVSS

SEQ ID NO: 41145 - protein, 114 aa, synthetic construct
QVKLQQSGPSLVKPGASVKMSCKASGYTFTDFYMKWVKQSHGKSLEWIGDINPNIGDTFYNQKFKGKATLTVDKSSSTAYMQLNSLTSEDSAVYFCSVGYFDVWGAGTTVTVSS

SEQ ID NO: 41146 - protein, 130 aa, synthetic construct
EVQLVQSGAEVKKPGESLKISCKGSGYSFTSYWIGWVRQMPGKGLEWMGIIYPGDSDTRYSPSFQGQVTISADKSISTAYLQWSSLKASDTAMYYCARQVWGWQGGMYPRSNWWYNLDSWGQGTLVTVSS

SEQ ID NO: 41147 - protein, 120 aa, synthetic construct
EVQLEQSGPELVKPGASVKMSCKASGYTFTNYYMKWVKQSHGKSLEWIGDLNPNNGDTFYNQKFKGKATLTVDKSSNTAYMQLNSLTSEDSAVYYCARTGRYEENAMDYWGQGTSVTVSS

SEQ ID NO: 41148 - protein, 118 aa, synthetic construct
QVQLQESGPGLVKPSQTLSLTCTVSGYSITSDYTWNWIRQPPGNGLEWIGYITYSGSTSYNPSLKSRVLISVDTSKNQVSLKLSSVTAADTAVYYCARLGRRYTMDYWGQGTTVTVSS

SEQ ID NO: 41149 - protein, 120 aa, synthetic construct
EVQLVESGGGLVQPGGSLRLSCAASGFSFNTYAMNWVRQAPGKGLEWVSHIRSKSNNFATYYADSVKDRFTISRDNAKNSLYLQMNSLRAEDTAVYYCARQGGDFPMDYWGQGTLVTVSS

SEQ ID NO: 41150 - protein, 118 aa, synthetic construct
QVQLQESGPGLVKPSQTLSLTCTVSGYSITIDYTWNWIRQPPGKGLEWIGYITYSGSTDYNPSLKSRVLISVDTSKNQVSLKLSSVTAADTAVYYCARLGRRYALDYWGQGTTVTVSS

SEQ ID NO: 41151 - protein, 122 aa, synthetic construct
EVQLVESGGGLVKPGGSLRLSCAASGFTFSNFEMNWVRQAPGKGLEWVSGISSNGRYINYADSVKGRFTISRDNAKNSLYLQMNSLRAEDTAVYYCARVVDFDQDYNGFDYWGQGTLVTVSS

SEQ ID NO: 41152 - protein, 120 aa, synthetic construct
EVQLVESGGGLVKPGGSLRLSCAASGFTFSTYGMSWVRQAPGKGLEWVAYINNGSGYIYYADSVKGRFTISRDNAKNSLYLQMNSLRAEDTAVYYCARGQWWSGGDFDYWGQGTLVTVSS

SEQ ID NO: 41153 - protein, 122 aa, synthetic construct
EVQLVESGGGLVKPGGSLKLSCAASGFAFSIYDMSWVRQTPEKRLEWVAYISSGGGTYYPDTVKGRFTISRDNAKNTLYLQMSSLKSEDTAMYYCARHSGYGTHWGVLFAYWGQGTLVTVSA

SEQ ID NO: 41154 - protein, 124 aa, synthetic construct
EVQLLESGGGLVQPGGSLRLSCAASGYSITSDYAWNWVRQAPGKGLEWVSYISNSGSTSYNPSLKSRFTISRDNSKNTLYLQMNSLRAEDTAVYYCAKERNYDYDDYYYAMDYWGQGTLVTVSS

SEQ ID NO: 41155 - protein, 120 aa, synthetic construct
QVQLVQSGAEVKKPGASVKVSCKASGLTIEDYYMHWVRQAPGQGLEWMGWIDPENGDTEYGPKFQGRVTMTRDTSINTAYMELSRLRSDDTAVYYCAVHNAHYGTWFAYWGQGTLVTVSS

SEQ ID NO: 41156 - protein, 116 aa, synthetic construct
EVQLVESGGGLVQPGGSLRLSCAASGFSLTNYGVHWVRQAPGKGLEWVSVIWSGGSTDYNAAFISRFTISADTSKNTAYLQMNSLRAEDTAVYYCARELIHAMDNWGQGTLVTVSS

SEQ ID NO: 41157 - protein, 119 aa, synthetic construct
EVQLVESGAEVKKPGASVKVSCKASGYTFTSYWIHWVRQAPGQGLEWMGENDPSNGRTNYNEKFKNRVTLTVDTSISTAYMELSRLRSDDTAVYYCARGPNYFYSMDYWGQGTMVTVSS

SEQ ID NO: 41158 - protein, 119 aa, synthetic construct
QVQLVQSGAEVKKPGASVKVSCKASGYTFTGSWMNWVRQAPGQGLEWIGRIYPGDGETNYNGKFKDRVTITADKSTSTAYMELSSLRSEDTAVYYCARIYGNNVYFDVWGQGTTVTVSS

SEQ ID NO: 41159 - protein, 121 aa, synthetic construct
QEQLVESGGGLVQPGGSLRLSCAASGFTFSDYYMSWIRQAPGKGLEWVATIYPSSGKTYYADSAKGRLTISSDNAKDSLYLQMNSLRAEDTAVYYCTRDSYADDAALFDIWGQGTTVTVSS

SEQ ID NO: 41160 - protein, 124 aa, synthetic construct
QVQLQESGPGLVKPSQTLSLTCTVSGGSISSGGFYWSWIRQHPGKGLEWIGYIHHSGSTHYNPSLKSRVTISIDTSKNLFSLRLSSVTAADTAVYYCASLVYCGGDCYSGFDYWGQGTLVTVSS

SEQ ID NO: 41161 - protein, 122 aa, synthetic construct
QVQLQESGPGLVKPSETLSLTCTVSGGSISSYYWSWIRQPPGKGLEWIGYIYYSGSTNYNPSLKSRVTISVDTSKNQFSLKLSSVTAADTAVYYCVSLVYCGGDCYSGFDYWGQGTLVTVSS

SEQ ID NO: 41162 - protein, 127 aa, synthetic construct
QVTLKESGPVLVKPTETLTLTCTVSGFSLINARMGVSWIRQPPGKALEWLAHIFSNAEKSYRTSLKSRLTISKDTSKSQVVLTMTNMDPVDTATYYCARIPGYGGNGDYHYYGMDVWGQGTTVTVSS

SEQ ID NO: 41163 - protein, 120 aa, synthetic construct
QIQLVESGGGVVQPGRSLRLSCVASGFTFKNYGMHWVRQAPGKGLEWVAVIWYDGSNEYYGDPVKGRFTISRDNSKNMLYLQMNSLRADDTAVYYCARSGIAVAGAFDYWGQGTLVTVSS

SEQ ID NO: 41164 - protein, 122 aa, synthetic construct
QLQLQESGPGLVKPSETLSLTCTVSGGSISSSTYYWGWIRQPPGKGLEWIGSIYFTGSTDYNPSLKSRVSISVDTSKNQFSLKLSSVTAADTAVYYCAKEDDSSGYYSFDYWGQGNLVTVSS

SEQ ID NO: 41165 - protein, 121 aa, synthetic construct
QVQLVQSGSELKKPGASVKVSCKASGYTFNTYAMNWVRQAPGQGLEWMGWINTNTGNPTYAQGFTGRFVFSLDTSVSTAYLQISSLKAEDTAVYYCARRYFDWLLGAFDIWGQGTMVTVSS

SEQ ID NO: 41166 - protein, 117 aa, synthetic construct
QVQLVQSGAEVKKPGSSVKVSCKASGYAFSSSWMNWVRQAPGQGLEWMGRIYPGDGNTHYAQKFQGRVTLTADKSTSTAYMELSSLRSEDTAVYYCGEGYLDPMDYWGQGTLVTVSS

SEQ ID NO: 41167 - protein, 115 aa, synthetic construct
EVQLVESGGGLVQPGGSLRLSCAASGYTFTTYWMHWVRQAPGKGLEWVGYIRPSTGYTEYNQKFKDRFTISADTSKNTAYLQMNSLRAEDTAVYYCARSRWLLDYWGQGTLVTVS

SEQ ID NO: 41168 - protein, 117 aa, synthetic construct
EVQLVESGGGLVQPGGSLRLSCAASGFTFSDYFMSWVRQAPGKGLEWVATISNGGTYTYYPDSVKGRFTISRDNSKNTLYLQMNSLRAEDTAVYYCARFDGYIFDYWGQGTLVTVSS

SEQ ID NO: 41169 - protein, 123 aa, synthetic construct
EVQLVESGGGLVQPGGSLRLSCAASGYAFSNSWINWVRQAPGKGLEWVGQIYPGDYDTNYNGKFKGRFTISRDKSKNTAYLQMNSLRAEDTAVYYCARGGSIYYGNLGFFDVWGQGTLVTVSS

SEQ ID NO: 41170 - protein, 116 aa, synthetic construct
QVQLVQSGAEVKKPGASVKVSCKASGYSFIEYTINWVRQAPGQGLEWIGNIDPYYGTTYYNQMFTGRATLTVDTSISTAYMELSRLRSDDTAVYYCARGSAWFPYWGQGTLVTVSS

SEQ ID NO: 41171 - protein, 115 aa, synthetic construct
QVQLVQSGAEVKKPGASVKVSCKASGYTFSDYWVHWVRQAPGQGLEWMGAIDGSDTFNDYSQKFKGRVTMTRDTSISTAYMELSRLRSDDTAVYYCARGGLLQYWGQGTLVTVSS

SEQ ID NO: 41172 - protein, 119 aa, synthetic construct
QVQLQQSGPELVKPGASVKISCKASGYAFSSSWMNWVKQRPGKGLEWIGRIYPGDEDTNYSGKFKDKATLTADKSSTTAYMQLSSLTSEDSAVYFCARSLLYGDYLDYWGQGTTLTVSS

SEQ ID NO: 41173 - protein, 121 aa, synthetic construct
QVQLQQSGAELVRPGSSVKISCKASGYAFSSYWVNWMKQRPGQGLEWIGQIYPGDGDTNYNGKFKGRATVTADKSSSTSYMQFSSLTSEDSAVYFCARSITTVVGCAMDYWGQGTSVTVSS

SEQ ID NO: 41174 - protein, 120 aa, synthetic construct; identical to SEQ ID NO: 20407

SEQ ID NO: 41175 - protein, 117 aa, synthetic construct
EVQLVESGGGLVQPGGSLRLSCAASGFTFSGRSMNWVRQAPGKGLEWVSYISSDSRTIYYADSVKGRFTISRDNAKNSLYLQMNSLRAEDTAVYYCARGGHGYFDLWGRGTLVTVSS

SEQ ID NO: 41176 - protein, 121 aa, synthetic construct
QVQLVESGGGVVQPGRSLRLSCAASGFTFSSYGMHWVRQAPGKGLEWVAGIWWDGSNEKYADSVKGRFTISRDNSKNTLYLQMNSLRAEDTAVYYCAKEAPYYAKDYMDVWGKGTTVTVSS

SEQ ID NO: 41177 - protein, 120 aa, synthetic construct
EVQLVESGGGLVQPGGSLRLSCAASGFNIKDTYIHWVRQAPGKGLEWVARIYPTNGYTRYADSVKGRFTISADTSKNTAYLQMNSLRAEDTAVYYCSRWGGWGFYAMDYWGQGTLVTVSS

SEQ ID NO: 41178 - protein, 117 aa, synthetic construct
QVQLVESGGGLVKPGGSLRLSCAASGFTFSDYYMTWIRQAPGKGLEWISYISSSGSTIYYADSVKGRFTISRDNAKNSLYLQMNSLRAEDTAVYYCARDRNSHFDYWGQGTLVTVSS

SEQ ID NO: 41179 - protein, 117 aa, synthetic construct
QVQLVESGGGLVKPGGSLRLSCAASGFTFSDHYMSWIRQAPGKGLEWFSYISSSGGIIYYADSVKGRFTISRDNAKNSLYLQMNSLRAEDTAVYYCARDVGSHFDYWGQGTLVTVSS

SEQ ID NO: 41180 - protein, 124 aa, synthetic construct
QVQLVESGGGVVQSGRSLRLSCAASGFTFRNYGMHWVRQAPGKGLEWVAVIWYDGSDKYYADSVRGRFTISRDNSKNTLYLQMNSLRAEDTAVYYCARDGYDILTGNPRDFDYWGQGTLVTVSS

SEQ ID NO: 41181 - protein, 122 aa, synthetic construct
EVQLVESGGGLVQPGGSLRLSCAASGFPFSSYDMHWVRQATGKGLEWVSAIGTAGATYYPGSVKGRFTISRENAKNSLYLQMNSLRAGDTAVYYCARGDYVWGTYRPLFDYWGQGTLVTVSS

SEQ ID NO: 41182 - protein, 118 aa, synthetic construct
QVQLQESGPGLVKPSETLSLTCTVSGASISSFYWSWIRQPPGKGLEWIGYIYYSGTTNYNPSLKSRVTISVDTSKNQFSLKLSSVTAADTAVYYCARIAVAGFFFDYWGQGTLVTVSS

SEQ ID NO: 41183 - protein, 123 aa, synthetic construct
QVQLVQSGAEVKKPGASVKVSCKASGYTFTNYYMHWVRQAPGLGLEWMGIINPSDGSTSYAQKFQGRVTMTRDTSTNTVYMDLSSLRSEDTAVYYCARGGNSAFYSYYDMDVWGQGTTVTVSS

SEQ ID NO: 41184 - protein, 116 aa, synthetic construct
QVQLQQSGPELVKPGASVRISCKASGYTFTTYYIHWVKQRPGQGLEWIGWIYPGNVNTNYNEKFKGKATLTADKSSSTAYMQLTSLTSEDSAVYFCARGVYYFDYWGQGTILTVSS

SEQ ID NO: 41185 - protein, 119 aa, synthetic construct
QVQLQESGPGLVKPSQTLSLTCTVSGGSINNNNYYWTWIRQHPGKGLEWIGYIYYSGSTFYNPSLKSRVTISVDTSKTQFSLKLSSVTAADTAVYYCAREDTMTGLDVWGQGTTVTVSS

SEQ ID NO: 41186 - protein, 122 aa, synthetic construct
EVQLVQSGAEVKKPGASVKVSCKASGDTFKRYYVHWVRQAPGQGLEWMGIINPSGVSTTYAQKFQGRVTMTRDTSTSTVYMELSSLRSEDTAVYYCAEVRGSGFNYFGMDVWGQGTLVTVSS

SEQ ID NO: 41187 - protein, 122 aa, synthetic construct
EVQLLESGGGLVQPGGSLRLSCAASGFTFSSYAMSWVRQAPGKGLEVVVSAISGGGGRTYYADSVKGRFTISRDNSKNTLYLQMNSLRAEDTAVYYCAREEMAFRAYRFDIWGQGTLVTVSS

SEQ ID NO: 41188 - protein, 124 aa, synthetic construct
EVQLVESGGDLVKPGGSLKLSCAVSGFTFSSYGMSWVRQTPDKRLEWVATVSSGGTYTYYPDSVKGRFTISRDNAKNTLYLQMSSLKSEDSAMYYCARHRGNYYATYYYAMDYWGQGTSVTVSS

SEQ ID NO: 41189 - protein, 119 aa, synthetic construct
EVQLVESGGGLVQPGGSLRLSCAASGFTFSDAWMDWVRQAPGKGLEWVGEIRSKVNNHETYYAESVKGRFTISRDDSKNSLYLQMNSLKTEDTAVYYCARNDYFDYWGQGTTVTVSSAS

SEQ ID NO: 41190 - protein, 123 aa, synthetic construct
EVQLQESGAEVKKPGSSVKVSCKASGFNIKDTYMHWVRQAPGQGLEWMGRIDPANGNSKYVPKFQGRVTITADESTSTAYMELSSLRSEDTAVYYCAPFGYYVSDYAMAYWGQGTTVTVSSAS

SEQ ID NO: 41191 - protein, 120 aa, synthetic construct
QVQLVQSGAEVKKPGSSVKVSCKASGGTFSSYAISWVRQAPGQGLEWMGLIIPRYGKARYAQKFQGRVTITADESTSTAYMELSSLRSEDTAVYYCARNWPYYYMDFWGQGTLVTVSSAS

SEQ ID NO: 41192 - protein, 122 aa, synthetic construct
EVQLVESGGGLVKPGGSLRLSCAASGFTFSNAWMSWVRQAPGKGLEWVGRIKSKTEGGTTDYAAPVKGRFTISRDDSKNTLYLQMNSLKTEDTAVYYCTTPYEWSWYDYWGQGTLVTVSSAS

SEQ ID NO: 41193 - protein, 121 aa, synthetic construct
QVQLVQSGAEVKKPGASVKVSCKASGYTFTSYYMHWVRQAPGQGLEWMGIINPSGGSTSYAQKFQGRVTMTHDTSTSTVYMELSSLRSEDTAVYYCARSFFTGFHLDYWGQGTLVTVSSAS

SEQ ID NO: 41194 - protein, 128 aa, synthetic construct
QVQLVQSGAEVKKPGASVKVSCKASGYTFTNYLIEWVRQAPGQGLEWMGLINPGSGGTNYNEKFKGRVTMTTDTSTSTAYMELRSLRSDDTAVYYCARRSPLGSWIYYAYDGVAYWGQGTLVTVSSAS

SEQ ID NO: 41195 - protein, 114 aa, synthetic construct
EVQLVESGGGLVQPGGSLRLSCAASGFTFSRYWMSWVRQAPGKGLEWVAEINPDSSTIQYTPSLKARFTLSVDRSKNTLYLQMNSLRAEDTAVYYCARPAYWGQGTLVTVSSAS

SEQ ID NO: 41196 - protein, 121 aa, synthetic construct
QVQLVQSGAEVKKPGASVKVSCKASGYTFTGYNIHWVRQAPGQRLEWMGAIYPGNGDTSYKQKFRGRVTITRDTSASTAYMELSSLRSEDTAVYYCARGETARATFAYWGQGTLVTVSSAS

SEQ ID NO: 41197 - protein, 121 aa, synthetic construct
EVQLVQSGAEVKKPGASVKVSCKASGYRFTNYWIHWVRQAPGQGLEWIGGINPGNNYATYRRKFQGRVTMTADTSTSTVYMELSSLRSEDTAVYYCTREGYGNYGAWFAYWGQGTLVTVSS

SEQ ID NO: 41198 - protein, 125 aa, synthetic construct
EVQLVESGGGLVKPGGSLKLSCAASGFAFSIYDMSWVRQAPGKGLEWVAYISSGGGTTYYPDTVKGRFTISRDNAKNTLYLQMSSLRAEDTAMYYCARHSGYGSSYGVLFAYWGQGTLVTVSSTR

SEQ ID NO: 41199 - protein, 122 aa, synthetic construct
EVQLVESGGGLVQPGGSLRLSCAASGFAFSIYDMSWVRQAPGKGLEWVAYISSGGGTYYPDTVKGRFTISRDNSKNTLYLQMNSLRAEDTAVYYCARHSGYGTHWGVLFAYWGQGTLVTVSS

SEQ ID NO: 41200 - protein, 121 aa, synthetic construct
EVQLVESGGGLVQPGGSLRLSCAASGYAFSSYWVNWVRQAPGKGLEWVAQIYPGDGDTNYNGKFKGRFTISRDNSKNTLYLQMNSLRAEDTAVYYCARSITTVVGCAMDYWGQGTLVTVSS

SEQ ID NO: 41201 - protein, 122 aa, synthetic construct
QLQLQESGPGLVKPSETLSLTCTVSGGSISSGSYFWGWIRQPPGKGLEWIGSIYYSGITYYNPSLKSRVTISVDTSKNQFSLKLSSVTAADTAVYYCARHDGAVAGLFDYWGQGTLVTVSSA

SEQ ID NO: 41202 - protein, 118 aa, synthetic construct; identical to SEQ ID NO: 41148

SEQ ID NO: 41203 - protein, 118 aa, synthetic construct
QVQLVESGGGLVKPGGSLRLSCAASGDSITSGYWNWIRQAPGKGLEWFSYISYSGSTYYNPSLKSRFTISRDNAKNSLYLQMNSLRAEDTAVYYCARPNYPFYAMDYWGQGTLVTVSS

SEQ ID NO: 41204 - protein, 118 aa, synthetic construct
EVQLVESGGGVVQPGRSLRLSCAASGFSLSTSGMGVGWVRQAPGKGLEWVAHIWWDDDKYYADSVKGRFTISRDNSKNTLYLQMNSLRAEDTAVYYCARSFGYGLDYWGQGTLVTVSS

SEQ ID NO: 41205 - protein, 124 aa, synthetic construct
QVQLVESGGGLVKPGGSLRLSCAASGDSVSSNSAAWGWIRQAPGKGLEWFSRIYYRSKWYNSYAVSVKSRFTISRDNAKNSLYLQMNSLRAEDTAVYYCARYDWVPKIGVFDSWGQGTLVTVSS

SEQ ID NO: 41206 - protein, 120 aa, synthetic construct
QVQLVQSGAEVKKPGSSVKVSCKASGGTFSTYAIHWVRQAPGQGLEWMGRIIPIEGRAYYAQKFQGRVTITADESTSTAYMELSSLRSEDTAVYYCARGRYSYRYWFDYWGQGTLVTVSS

SEQ ID NO: 41207 - protein, 122 aa, synthetic construct
EVQLVQSGAEVKKPGESLKISCKGSGYSFTSYWIGWVRQMPGKGLEWMGIIYPGDSDTRYSPSFQGQVTISADKSISTAYLQWSSLKASDTAMYYCARDVGRWAPGGFLDYWGQGTLVTVSS

SEQ ID NO: 41208 - protein, 118 aa, synthetic construct
QVQLVQSGAEVKKPGSSVKVSCKASGGTFSSYGISWVRQAPGQGLEWMGWISAIFGTANYAQKFQGRVTITADESTSTAYMELSSLRSEDTAVYYCARGVASWYLDYWGQGTLVTVSS

SEQ ID NO: 41209 - protein, 119 aa, synthetic construct
QVQLQQSGPELKKPGETVKISCKASGYPFTNYGMNWVKQAPGQGLKWMGWINTSTGESTFADDFKGRFDFSLETSANTAYLQINNLKSEDMATYFCARWEVYHGYVPYWGQGTTVTVSS

SEQ ID NO: 41210 - protein, 119 aa, synthetic construct
EVQLVESGGGVVQPGRSLRLSCSASGFDFTTYWMSWVRQAPGKGLEWIGEIHPDSSTINYAPSLKDRFTISRDNAKNTLFLQMDSLRPEDTGVYFCASLYFGFPWFAYWGQGTPVTVSS

SEQ ID NO: 41211 - protein, 124 aa, synthetic construct
GVHSQVQLQESGPGLVRPSQTLSLTCTVSGFTISSGYSWHWVRQPPGRGLEWIGYIQYSGITNYNPSLKSRVTMLVDTSKNQFSLRLSSVTAADTAVYYCAREDYDYHWYFDVWGQGTTVTVSS

SEQ ID NO: 41212 - protein, 120 aa, synthetic construct; identical to SEQ ID NO: 8757

SEQ ID NO: 41213 - protein, 121 aa, synthetic construct
QVQLVESGGGVVQPGRSLRLSCAASGFTFSSYAMHWVRQAPGKGLEWVAVISYDGSNKYYADSVKGRFTISRDNSKNTLYLQMNSLRAEDTAVYYCAKEAPYYAKDYMDVWGKGTTVTVSS

SEQ ID NO: 41214 - protein, 122 aa, synthetic construct
EVQLVETGGGLVQPGKSLELTCATSGFTFNTAWMHWVRQSPDKRLEWIARIKDTSNNYATDYVESMKGRFTISRDDSKGSVNLQMNSLKEEDTATYYCTTDFYDGTYYWNYWGQGVMVTVSS

SEQ ID NO: 41215 - protein, 126 aa, synthetic construct
RMAQVQLQQSGAELARPGASVKMSCKASGYTFTTYTIHWVRRRPGHDLEWIGYINPSSGCSDYNQNFKGKTTLTADKSSNTAYMQLNSLTSEDSAVYYCARRADYGNYEYTWFAYWGQGTTVTVSS

SEQ ID NO: 41216 - protein, 118 aa, synthetic construct
EVQLVESGGGLVQPGRSLRLSCAASGFTFDDYGMHWVRQAPGKGLEWVSGISWNSGSIGYADSAKGRFTISRDNSKNTLYLQMNSLRAEDTAVYYCAKRGNSNSFDYWGQGTLVTVSS

SEQ ID NO: 41217 - protein, 122 aa, synthetic construct
QMQLVQSGAEVKKPGSSVKVSCKASGGTFSSYAISWVRQAPGQGLEWMGGIIPIFGTANYAQKFQGRVTITADKSTSTAYMELSSLRSDDTAVYYCARDELWATNYYYMDVWGKGTLVTVSS

SEQ ID NO: 41218 - protein, 118 aa, synthetic construct
EVQLVESGGGLVRPGGSLRLSCAASGFTFDDYGMSWVRQAPGKGLEWVSGISWNSGSIGYADSVKGRFTISRDNAKNSLYLQMNSLRAEDTALYYCAKRGNSNSFDYWGQGTTVTVSS

SEQ ID NO: 41219 - protein, 118 aa, synthetic construct
EVQLVESGGGLVQPGRSLRLSCAASGFTFDDYAMHWVRQAPGKGLEWVSGISWNSGSIGYADSAKGRFTISRDNSKNTLYLQMNSLRAEDTAVYYCAKRGNSNSFDYWGQGTLVTVSS

SEQ ID NO: 41220 - protein, 119 aa, synthetic construct
QVQLKESGPGLVQPSQTLSLTCTVSGLSLTSNGVSWIRQPPGKGLEWLGVIWSNGGTDYNSAIKSRLSFSRDTSKSQVFLKMNSLQTEDTAMYFCARPRYNSGYFFDYWGQGVMVTVSS

SEQ ID NO: 41221 - protein, 124 aa, synthetic construct
QVQLKESGPGLVQPSQTLSLTCTVSGFSLTSYHVHWVRQPPGKGLEWMGVMWSDGDTLYNSALKSRLSISRDTSKSQVLLQMDSLQSEDTATYYCARLQVFGYPGIRDYVMDAWGQGASVTVSS

SEQ ID NO: 41222 - protein, 130 aa, synthetic construct [sequence omitted]

SEQ ID NO: 41223 - protein, 120 aa, synthetic construct
EVQLVESGGGLVQPGGSLRLSCAASGFTFSSYWMSWVRQAPGKGLEWVANIKQDGSEKYYVDSVKGRFTISRDNAKNSLYLRMNSLRAEDTAVYYCARAWGYSSYYFDYWGQGTLVTVSP

SEQ ID NO: 41224 - protein, 115 aa, synthetic construct
EVQLQQSGPELVKPGTSVRISCKTSGYTFTEYTIHWVKQSHGKSLEWIGNINPNNGGTTYNQKFEDKATLTVDKSSSTAYMELRSLTSEDSAVYYCAAGWNFDYWGQGTTLTVSS

SEQ ID NO: 41225 - protein, 115 aa, synthetic construct; identical to SEQ ID NO: 8756

SEQ ID NO: 41226 - protein, 115 aa, synthetic construct; identical to SEQ ID NO: 41224

SEQ ID NO: 41227 - protein, 115 aa, synthetic construct; identical to SEQ ID NO: 8756

SEQ ID NO: 41228 - protein, 122 aa, synthetic construct
EVQLVESGGGLVKPEGSLRLSCAASGFTFSRYGMSWVRQAPGKGLEWVSTISGGGTYIYYPDSVKGRFTISRDNAKNSLFLQMNSLRAEDTAVYYCARDNYGRNYDYGMDYWGQGTLVTVSS

SEQ ID NO: 41229 - protein, 122 aa, synthetic construct
EVKVVESGGDLVKPGGSLKLSCVVSGFTFSRYGMSWVRQTPGKRLEWVATISGGGTYIYYPDSVKGRFTISRDNAKNTLYLQMSSLKSEDTAMYHCTRDNYGRNYDYGMDYWGQGTSVTVSS

SEQ ID NO: 41230 - protein, 121 aa, synthetic construct
EVQLVESGGGLVKPGGSLRLSCAASGFTFSGYAMSWVRQAPGKGLEWVSTISSGGTYIYYPDSVKGRFTISRDNAKNSLYLQMNSLRAEDTAVYYCARLGGDNYYEYFDVWGKGTTVTVSS

SEQ ID NO: 41231 - protein, 117 aa, synthetic construct
EVQLLESGGGLVQPGGSLRLSCAASGFAFSTYDMSWVRQAPGKGLEWVATISSGGSYTYYLDSVKGRFTISRDSSKNTLYLQMNSLQAEDSAIYYCAPTTVVPFAYWGQGTLVTVSS

SEQ ID NO: 41232 - protein, 116 aa, synthetic construct
EVQLVESGGGLVQPGGSLRLSCAASGYTFTSYWLHWVRQAPGKGLEWVGYIRPSTGYTEYNQKFKDRFTISADTSKNTAYLQMNSLRAEDTAVYYCARSRWLLDYWGQGTLVTVSS

SEQ ID NO: 41233 - protein, 115 aa, synthetic construct
EVQLVESGGGLVQPGGSLRLSCAASGFTFTTYWMHWVRQAPGKGLEWVGYIRPSTGYTEYNQKFKDRFTISADTSKNTAYLQMNSLRAEDTAVYYCARSRWLLDYWGQGTLVTVS

SEQ ID NO: 41234 - protein, 115 aa, synthetic construct; identical to SEQ ID NO: 41167

SEQ ID NO: 41235 - protein, 117 aa, synthetic construct; identical to SEQ ID NO: 8755

SEQ ID NO: 41236 - protein, 117 aa, synthetic construct; identical to SEQ ID NO: 41168

SEQ ID NO: 41237 - protein, 122 aa, synthetic construct; identical to SEQ ID NO: 8758

SEQ ID NO: 41238 - protein, 122 aa, synthetic construct
EVQLLESGGGLVQPGGSLRLSCAASGFTFSSYAMSWVRQAPGKGLEWVSAISGSGGSTYYADSVKGRFTISRDNSKNTLYLQMNSLRAEDTAVYYCAKEQWEGDYFSAFDIWGQGTMVTVSS

SEQ ID NO: 41239 - protein, 122 aa, synthetic construct; identical to SEQ ID NO: 41238

SEQ ID NO: 41240 - protein, 122 aa, synthetic construct; identical to SEQ ID NO: 41238

SEQ ID NO: 41241 - protein, 122 aa, synthetic construct; identical to SEQ ID NO: 41238

SEQ ID NO: 41242 - protein, 124 aa, synthetic construct
EVQLLESGGGLVQPGGSLRLSCAASGFTFSSYAMSWVRQAPGKGLEWVSAISGSGGSTYYADSVKGRFTISRDNSKNTLYLQMNSLRAEDTAVYYCAKGGENTFESHPVAFDIWGQGTMVTVSS

SEQ ID NO: 41243 - protein, 124 aa, synthetic construct; identical to SEQ ID NO: 41242

SEQ ID NO: 41244 - protein, 124 aa, synthetic construct; identical to SEQ ID NO: 41242

SEQ ID NO: 41245 - protein, 124 aa, synthetic construct; identical to SEQ ID NO: 41242

SEQ ID NO: 41246 - protein, 119 aa, synthetic construct
QVQLVESGPGVVQPGRSLRISCAVSGFSVTNYGVHWVRQPPGKGLEWLGVIWAGGITNYNSAFMSRLTISKDNSKNTVYLQMNSLRAEDTAMYYCASRGGHYGYALDYWGQGTLVTVSS

SEQ ID NO: 41247 - protein, 119 aa, synthetic construct; identical to SEQ ID NO: 41246

SEQ ID NO: 41248 - protein, 118 aa, synthetic construct
QVQLQESGPGLVKPSQTLSITCTVSGFSLASYNIHWVRQPPGKGLEWLGVIWAGGSTNYNSALMSRLTISKDNSKNQVFLKMSSLTAADTAVYYCAKRSDDYSWFAYWGQGTLVTVSS

SEQ ID NO: 41249 - protein, 119 aa, synthetic construct
QVQLKESGPVLVAPSQTLSITCTVSGFSLASYNIHWVRQPPGKGLEWLGVIWAGGSTNYNSALMSRLSISKDNSKSQVFLQMNSLQTDDTAMYYCAKRSDDYSWFAYWGQGTLVTVSAS

SEQ ID NO: 41250 - protein, 118 aa, synthetic construct
QVQLVQSGAEVKKPGASVKVSCKASGYTFTSFWLNWVRQAPGQGLEWMGNIYPSTSYTVYNQKFKDRVTMTRDTSTSTVYMELSSLRSEDTAVYYCARTWRGNSFDYWGQGTTVTVSS

SEQ ID NO: 41251 - protein, 118 aa, synthetic construct
QVQLVQSGAEVKKPGASVKVSCKASGYTFTSFWLNWVRQAPGQGLEWMGNIYPSDSYTVYNQKFKDRVTMTRDTSTSTVYMELSSLRSEDTAVYYCARTWRGNSFDYWGQGTTVTVSS

SEQ ID NO: 41252 - protein, 117 aa, synthetic construct
EVQLQQSGPELVKPGASVKISCKASGYSFTGYTMNWVKQSHGKNLEWIGLINPYNGGTSYNQKFKAKATLTVDKSSSTAYMQLKSLTSEDSAVYYCARDYGYVLDYWGQGTSVTVSS

SEQ ID NO: 41253 - protein, 117 aa, synthetic construct
EVQLQQSGPELVKPGASMKISCKASGYSFTGYTMNWVKQSHGKNLEWIGLINPYNGGTSYNQKFKGKATLTIDKSSSTAYMELLSLTSEDSAVYYCARDYGYVLDYWGQGTTLTVSS

SEQ ID NO: 41254 - protein, 117 aa, synthetic construct; identical to SEQ ID NO: 41253

SEQ ID NO: 41255 - protein, 126 aa, synthetic construct
QVQLVQSGAEVKKPGASVKVSCKASGYTFTNYLIEWVRQAPGQGLEWMGLINPGSGGTNYNEKFKGRVTMTTDTSTSTAYMELRSLRSDDTAVYYCARRSPLGSWIYYAYDGVAYWGQGTLVTVSS

SEQ ID NO: 41256 - protein, 121 aa, synthetic construct
QVQLQQPGAELVKPGASVKMSCKASGYTFSSYWINWMKQKPGQGLEWIGQIYPGDGDTNYNGKFKGRATLTADTSSSTAYMQLSSLTSEDSAVYFCARSITTVVGCAMDYWGQGTSVTVSS

SEQ ID NO: 41257 - protein, 121 aa, synthetic construct
QVQLQQPGAELVKPGASVKMSCKASGYAFSSSWINWMKQKPGQGLEWIGQIYPGDGDTNYNGKFKGRATLTADTSSSTAYMQLSSLTSEDSAVYFCARSITTVVGCAMDYWGQGTSVTVSS

SEQ ID NO: 41258 - protein, 121 aa, synthetic construct
EVQLVESGGGLVQPGGSLRLSCAASGYTFSSYWVNWVRQAPGKGLEWVAQIYPGDGDTNYNGKFKGRFTISRDNSKNTLYLQMNSLRAEDTAVYYCARSITTVVGCAMDYWGQGTLVTVSS

SEQ ID NO: 41259 - protein, 121 aa, synthetic construct
EVQLVESGGGLVQPGGSLRLSCAASGYAFSNYWVNWVRQAPGKGLEWVAQIYPGDGDTNYNGKFKGRFTISRDNSKNTLYLQMNSLRAEDTAVYYCARSITTVVGCAMDYWGQGTLVTVSS

SEQ ID NO: 41260 - protein, 117 aa, synthetic construct [sequence omitted]

SEQ ID NO: 41261 - protein, 117 aa, synthetic construct
EVQLVESGGGLVQPGGSLRLSCAASGYTFTSYWIEWVRQAPGKGLEWIGEILPGGGDTNYNEIFKGRATFSADTSKNTAYLQMNSLRAEDTAVYYCTRRVPIRLDYWGQGTLVTVSS

SEQ ID NO: 41262 - protein, 117 aa, synthetic construct; identical to SEQ ID NO: 41261

SEQ ID NO: 41263 - protein, 117 aa, synthetic construct
QVQLQQPGAELVKPGASVKMSCKASGYTFTSYWINWMKQKPGQGLEWIGQILPGGGDTNYNGKFKGRATLTADTSSSTAYMQLSSLTSEDSAVYFCTRRVPIRLDYWGQGTSVTVSS

SEQ ID NO: 41264 - protein, 117 aa, synthetic construct; identical to SEQ ID NO: 41261

SEQ ID NO: 41265 - protein, 117 aa, synthetic construct; identical to SEQ ID NO: 41261

SEQ ID NO: 41266 - protein, 117 aa, synthetic construct
QVQLVQSGAEVKKPGASVKVSCKASGYTFTSYWINWVRQAPGQGLEWMGQILPGGGDTNYNGKFKGRVTITADTSTSTAYMELSSLRSEDTAVYYCTRRVPIRLDYWGQGTLVTVSS

SEQ ID NO: 41267 - protein, 113 aa, synthetic construct
EVQLVESGGGLVQPGGSLRLSCAASGYTFTSYWMNWVRQAPGKGLEWVGMIDPSDSETHYNHIFKDRFTISADTSKNTAYLQMNSLRAEDTAVYYCARNLYLFGQGTLVTVSS

SEQ ID NO: 41268 - protein, 113 aa, synthetic construct
EVQLVESGGGLVQPGGSLRLSCAASGYTFSSYWMNWVRQAPGKGLEWVGMIDPSDSETHYNHIFKDRFTISADTSKNTAYLQMNSLRAEDTAVYYCARNLYLWGQGTLVTVSS

SEQ ID NO: 41269 - protein, 113 aa, synthetic construct; identical to SEQ ID NO: 41267

SEQ ID NO: 41270 - protein, 113 aa, synthetic construct; identical to SEQ ID NO: 41268

SEQ ID NO: 41271 - protein, 113 aa, synthetic construct; identical to SEQ ID NO: 41267

SEQ ID NO: 41272 - protein, 113 aa, synthetic construct
EVQLVESGGGLVQPGGSLRLSCAASGYTFTNYWMNWVRQAPGKGLEWVGMIDPSDSETHYNHIFKDRFTISADTSKNTAYLQMNSLRAEDTAVYYCARNLYLWGQGTLVTVSS

SEQ ID NO: 41273 - protein, 113 aa, synthetic construct; identical to SEQ ID NO: 41272

SEQ ID NO: 41274 - protein, 117 aa, synthetic construct
EVQLQQSGAELMKPGASVKISCKATGYTFSSYWIEWVKQRPGHGLEWIGEILPGGGDTNYNEIFKGKATFTADTSSNTAYMQLSSLTSEDSAVYYCTRRVPVYFDYWGQGTSVTVSS

SEQ ID NO: 41275 - protein, 116 aa, synthetic construct
QVQLQQSGPELVKPGASVRISCKASGYTFTSYYIHWVKQRPGQGLEWIGWIYPGNLNTKYNEKFKGKATLTADKSSSTAYMQLSSLTSEDSAVYFCARYDWYFDVWGAGTTVTVSS

SEQ ID NO: 41276 - protein, 116 aa, synthetic construct
QVQLVESGGGVVQPGRSLRLSCAASGFSFSNYGMAWVRQAPGKGLEWVASISTGGGNTYYADSVKDRFTISRDNSKNTLYLQMNSLRAEDTAVYYCTRHDRGGLYWGQGTMVTVSS

SEQ ID NO: 41277 - protein, 117 aa, synthetic construct
ELQLLESGGGLVQPGGSLRLSCAASGFTFSKYAMAWVRQAPGKGLEWVASISTGGVNTYYADSVKDRFTISRDNAKNTLYLQMNSLRAEDTAVYYCATHTGDYFDYWGQGTMVTVSS

SEQ ID NO: 41278 - protein, 117 aa, synthetic construct; identical to SEQ ID NO: 41277

SEQ ID NO: 41279 - protein, 116 aa, synthetic construct; identical to SEQ ID NO: 41276

SEQ ID NO: 41280 - protein, 125 aa, synthetic construct
QLQLQESGPGLVKPSETLSLTCTVSGGSISSSSYWWGWTRQPPGRGLEWIGTMYYSGNIYYNPSLQSRATISVDTSKNQFSLKLSSVTAADTAVYYCARHVGYSYGRRFWYFDLWGRGTLVTVSS

SEQ ID NO: 41281 - protein, 120 aa, synthetic construct
EVQLVESGPGLVKPSETLSLTCTVSGFSLTRFGVHWVRQPPGKGLEWLGVIWRGGSTDYNAAFMSRLTISKDNSKNQVSLKLSSVTAADTAVYYCSNHYYGSSDYALDNWGQGTLVTVSS

SEQ ID NO: 41282 - protein, 118 aa, synthetic construct
QVQLVQSGAEVVKPGASVKISCKASGYTFTGYFMHWVKQSPGQSLEWIGRIHPYDGDTFYNQKFQGKATLTVDKSSNTAHMELLSLTSEDFAVYYCTRYDGSRAMDYWGQGTTVTVSS

SEQ ID NO: 41283 - protein, 121 aa, synthetic construct
EVQLVESGGGLVQPGGSLRLSCAASGFNVYASGMHWVRQAPGKGLEWVAKIYPDSDYTYYADSVKGRFTISADTSKNTAYLQMNSLRAEDTAVYYCSRDSSFYYVYAMDYWGQGTLVTVSS

SEQ ID NO: 41284 - protein, 121 aa, synthetic construct; identical to SEQ ID NO: 41283

SEQ ID NO: 41285 - protein, 117 aa, synthetic construct; identical to SEQ ID NO: 8753

SEQ ID NO: 41286 - protein, 116 aa, synthetic construct
EVQLVESGGGLVQPGGSLRLSCAASGYSITNDYAWNWVRQAPGKGLEWVGYISYSGYTTYNPSIKSRFTISRDTSKNTLYLQMNSLRAEDTAVYYCARWTSGLDYWGQGTLVTVSS

SEQ ID NO: 41287 - protein, 120 aa, synthetic construct; identical to SEQ ID NO: 41206

SEQ ID NO: 41288 - protein, 120 aa, synthetic construct
QVQLVQSGAEVKKPGSSVKVSCKASGGTFSSYAIHWVRQAPGQGLEWMGRIIPIEGRAYYAQKFQGRVTITADESTSTAYMELSSLRSEDTAVYYCARGRYSYRYWFDYWGQGTLVTVSS

SEQ ID NO: 41289 - protein, 118 aa, synthetic construct; identical to SEQ ID NO: 8752

SEQ ID NO: 41290 - protein, 122 aa, synthetic construct
EVQLVESGGGLVQPGGSLRLSCAASGFTFSSYAMSWVRQAPGKGLEWVSAISGSGGSTYYADSVKGRFTISRDNSKNTLYLQMNSLRAEDTAVYYCARLGYPTTTLLPFDYWGQGTLVTVSS

SEQ ID NO: 41291 - protein, 121 aa, synthetic construct
EVQLVESGGGLVQPGGSLRLSCAASGIDFNSNYYMCWVRQAPGKGLEWIGCIYVGSHVNTYYANWAKGRFTISRDNSKNTVYLQMNSLRAEDTAVYYCATSGSSVLYFKFWGQGTLVTVSS

SEQ ID NO: 41292 - protein, 118 aa, synthetic construct
QVQLVQSGPEVKKPGASVKVSCKASGYTFTSYHIQWVRQAPGQGLEWIGWIYPGDGSTQYNEKFKGRVTITADKSTSTAYMELSSLTSEDTAVYYCAREGTYYAMDYWGQGTSVTVSS

SEQ ID NO: 41293 - protein, 127 aa, synthetic construct
QVQLQQSGAGLLKPSETLSLTCAVSGGSFSGYYWTWIRQRPGKGLEWIGEINHRGSTDYNPSLKSRVTMSIDTSKSQFSLNLKSVTAADTAVYYCARAAWGSCYDGTCYPAEYFQYWGQGTLVTVSS

SEQ ID NO: 41294 - protein, 123 aa, synthetic construct
QVQLVQSGAEVKKPGASVKVSCKASGYSFTSYGINWVRQAPGQGLEWMGWISAYNGNTNYAQKLQGRVTMTRDTSTRTAYMELRSLRSDDTAVYYCAREYDILTGYSDAFDIWGQGTLVTVSS

SEQ ID NO: 41295 - protein, 119 aa, synthetic construct
QVQLVESGGGLVKPGGSLRLSCAASGFTFSSYSMHWVRQAPGKGLEWVSDISTNSRTRNYADSVKGRFTISRDNAKNSVYLQMHSLRDEDTAVYYCARDYGGIYYFDYWGQGTLVTVSS

SEQ ID NO: 41296 - protein, 127 aa, synthetic construct; identical to SEQ ID NO: 41293

SEQ ID NO: 41297 - protein, 123 aa, synthetic construct
QVQLVQSGAEVKKPGASVKVSCKASGYSFTSYGINWVRQAPGQGLEWMGWISAYNGYTNYAQKLQGRVTMTRDTSTRTAYMELRSLRSDDTAVYYCAREYDILTGYSDAFDIWGQGTLVTVSS

SEQ ID NO: 41298 - protein, 116 aa, synthetic construct
EVQLLESGGGLVQPGGSLRLSCAASGFTFSSYAMSWVRQAPGKGLEWVSSISTSGSYTAYADSVKGRFTISRDNSKNTLYLQMNSLRAEDTAVYYCAKGGYTFDYWGQGTLVTVSS

SEQ ID NO: 41299 - protein, 126 aa, synthetic construct; identical to SEQ ID NO: 20412

SEQ ID NO: 41300 - protein, 126 aa, synthetic construct; identical to SEQ ID NO: 20413

SEQ ID NO: 41301 - protein, 251 aa, synthetic construct
DVQMIQTPDSLAVSLGQRATISCRASESVDNYGISFMHWYQQKPGQSPKLLIYRASNLESGIPARFSGSGSRTDFTLTINPVETDDVATYYCQQNNKDPPTFGGGTKLEIKGGGGSGGGGSGGGGSGGGGSQVQLQQSGAELVKPGASVKISCKASGYAFSSYWMNWVKQRPGKGLEWIGQIYPGDGDTTYNGKFKGKATLTADKSSSTVYMQLNSLTSEDSAVYFCVRYYYGSSGYFDYWGQGTTLTVSS

SEQ ID NO: 41302 - protein, 242 aa, synthetic construct
DVQMIQTPSSLSASLGDRVTISCRASQDIGNYLNWYQQKPDGTVKLLIYYTSRLHSGVPSRFSGSGSGTEYSLTISNLEQEDIATYFCQQGSALPPTFGGGTKLEINGGGGSGGGGSGGGGSALQLQQSGAELVRPGASVTLSCKASGYTFTDYEMHWVKQTPVHGLEWIGAIDPETGGTAYNQKFEGKAILTADKSSSTAYMELRSLTSEDSPVYYCARRRYYGSSSFDYWGQGTTLTVSS

SEQ ID NO: 41303 - protein, 244 aa, synthetic construct
DIVLTQSPATLSLSPGDRATISCRASESVTILGSHLIYWYQQKPGQPPRLLIQLASNVQTGVPARFSGSGSRTDFTLTISSVEPEDFAVYYCLQSRTIPRTFGQGTKLEIKRGGGGSGGGGSGGGGSQVQLVQSGPEVKKPGESVKISCKASGYTFRHYSMNWVKQAPGQGLKWMGRINTESGVPIYADDFKGRFSFTVDTSASTAYLEISSLTSEDTAVYFCSNDYLYSLDFWGQGTTLTVSS

SEQ ID NO: 41304 - protein, 244 aa, synthetic construct
DIQMTQSPSSLSASVGDRVTITCSASQDISNYLNWYQQKPGKAPKLLIYYTSNLHSGVPSRFSGSGSGTDFTLTISSLQPEDFATYYCQQYRKLPWTFGQGTKLEIKRGGGGSGGGGSGGGGSQVQLVQSGAEVKKPGSSVKVSCKASGGTFSNYWMHWVRQAPGQGLEWMGATYRGHSDTYYNQKFKGRVTITADKSTSTAYMELSSLRSEDTAVYYCARGAIYDGYDVLDNWGQGTLVTVSS

SEQ ID NO: 41305 - protein, 249 aa, synthetic construct
DIVMTQSPDSLAVSLGERATINCESSQSLLNSGNQKNYLTWYQQKPGQPPKPLIYWASTRESGVPDRFSGSGSGTDFTLTISSLQAEDVAVYYCQNDYSYPYTFGQGTKLEIKRGGGGSGGGGSGGGGSEVQLVQSGAEVKKPGESLKISCKGSGYSFTDYYMKWARQMPGKGLEWMGDIIPSNGATFYNQKFKGQVTISADKSISTTYLQWSSLKASDTAMYYCARSHLLRASWFAYWGQGTMVTVSS

SEQ ID NO: 41306 - protein, 244 aa, synthetic construct
DIQMTQSTSSLSASLGDRVTISCSASQGINNYLNWYQQKPDGTVELLIYYTSTLQSGVPSRFSGSGSGTDYSLTISNLEPEDIGTYYCQQYSKLPRTFGGGTKLEIKGGGGSGGGGSGGGGSQVQLQQSGSELMMPGASVKISCKATGYTFSNYWIEWVKQRPGHGLEWIGEILPGTGRTIYNEKFKGKATFTADISSNTVQMQLSSLTSEDSAVYYCARRDYYGNFYYAMDYWGQGTSVTVSS

SEQ ID NO: 41307 - protein, 239 aa, synthetic construct
DIQMTQSPASLSVSVGETVTITCRASENIYSNLAWYQQKQGKSPQLLVYAATNLADGVPSRFSGSGSGTQYSLKINSLQSEDFGSYYCQHFWGTWTFGGGTTLEIKGGGGSGGGGSGGGGSEVQLQQSGPELVKPGASVKMSCKASGYTFTDYYMKWMKQSHGKSLEWIGDINPNNGGTTYNQKFKGKATLTVDKSSSTAYMQLNSLTSEDSAVYYCARDYGYGYFDYWGQGTTLTVSS

SEQ ID NO: 41308 - protein, 243 aa, synthetic construct
DEIVLTQSPATLSLSPGERATLSCSASSSVSYMHWYQQKPGQAPRLLIYDTSKLASGIPARFSGSGSGTDFTLTISSLEPEDVAVYYCFQGSVYPFTFGQGTKLEIKRGGGGSGGGGSGGGGSQVQLQESGPGLVKPSQTLSLTCTVSGGSISTSGMGVGWIRQHPGKGLEWIGHIWWDDDKRYNPALKSRVTISVDTSKNQFSLKLSSVTAADTAVYYCARMELWSYYFDYWGQGTLVTVSS

SEQ ID NO: 41309 - protein, 242 aa, synthetic construct
DIQMTQTTSSLSASLGDRVTISCRASQDISKYLNWYQQKPDGTVKLLIYHTSRLHSGVPSRFSGSGSGTDYSLTISNLEQEDIATYFCQQGNTLPYTFGGGTKLEITGGGGSGGGGSGGGGSEVKLQESGPGLVAPSQSLSVTCTVSGVSLPDYGVSWIRQPPRKGLEWLGVIWGSETTYYNSALKSRLTIIKDNSKSQVFLKMNSLQTDDTAIYYCAKHYYYGGSYAMDYWGQGTSVTVSS

SEQ ID NO: 41310 - protein, 242 aa, synthetic construct
EIVMTQSPATLSLSPGERATLSCRASQDISKYLNWYQQKPGQAPRLLIYHTSRLHSGIPARFSGSGSGTDYTLTISSLQPEDFAVYFCQQGNTLPYTFGQGTKLEIKGGGGSGGGGSGGGGSQVQLQESGPGLVKPSETLSLTCTVSGVSLPDYGVSWIRQPPGKGLEWIGVIWGSETTYYNSSLKSRVTISKDNSKNQVSLKLSSVTAADTAVYYCAKHYYYGGSYAMDYWGQGTLVTVSS

SEQ ID NO: 41311 - protein, 244 aa, synthetic construct
EIVLTQSPATLSLSPGERATLSCRASQSVSSYLAWYQQKPGQAPRLLIYDASNRATGIPARFSGSGSGTDFTLTISSLEPEDFAVYYCQQRSNWPITFGQGTRLEIKGGGGSGGGGSGGGGSEVQLVESGGGLVQPGRSLRLSCAASGFTFNDYAMHWVRQAPGKGLEWVSTISWNSGSIGYADSVKGRFTISRDNAKKSLYLQMNSLRAEDTALYYCAKDIQYGNYYYGMDVWGQGTTVTVSS

SEQ ID NO: 41312 - protein, 247 aa, synthetic construct
DIVMTQTPLSLPVTPGEPASISCRSSKSLLHSNGITYLYWYLQKPGQSPQLLIYQMSNLVSGVPDRFSGSGSGTDFTLKISRVEAEDVGVYYCAQNLELPYTFGGGTKVEIKRGGGGSGGGGSGGGGSQVQLVQSGAEVKKPGSSVKVSCKASGYAFSYSWINWVRQAPGQGLEWMGRIFPGDGDTDYNGKFKGRVTITADKSTSTAYMELSSLRSEDTAVYYCARNVFDGYWLVYWGQGTLVTVSS

SEQ ID NO: 41313 - protein, 248 aa, synthetic construct
DIQMTQSPSSLSASVGDRVTITCRSSQSIVHSVGNTFLEWYQQKPGKAPKLLIYKVSNRFSGVPSRFSGSGSGTDFTLTISSLQPEDFATYYCFQGSQFPYTFGQGTKVEIKRGGGGSGGGGSGGGGSEVQLVESGGGLVQPGGSLRLSCAASGYEFSRSWMNWVRQAPGKGLEWVGRIYPGDGDTNYSGKFKGRFTISADTSKNTAYLQMNSLRAEDTAVYYCARDGSSWDWYFDVWGQGTLVTVSS

SEQ ID NO: 41314 - protein, 242 aa, synthetic construct
EIVLTQSPGTLSLSPGERATLSCRASQSVGGYLAWYQQKPGQAPRLLIYDASNRATGIPARFSGSGSGTDFTLTISSLEPEDFAVYYCQQRNNWPPMYTFGQGTKLEIKRGGGGSGGGGSGGGGSQVQLVQSGAEVKKPGSSVKVSCKASGGTFSSYAISWVRQAPGQGLEWMGGIIPILGTANYAQKFQGRVTITADESTSTAYMELSSLRSEDTAVYYCARWGGGAFDIWGQGTMVTVSS

SEQ ID NO: 41315 - protein, 239 aa, synthetic construct
DIQMTQSPATIENTSLSASVGDRVTITCRASQGISSWLTWYQQKPEKAPKSLIYAASSLQSGVPSRFSGSGSGTDFTLTISSLQPEDFATYYCQQYDSYPITFGQGTRLEIKGGGGSGGGGSGGGGSQVQLQQWGAGLLKPSETLSLTCAVYGGSFSAYYWSWIRQPPGKGLEWIGDINHGGGTNYNPSLKSRVTISVDTSKNQFSLKLNSVTAADTAVYYCASLTAYWGQGSLVTVSS

SEQ ID NO: 41316 - protein, 243 aa, synthetic construct
EIVLTQSPDSLAVSLGERATINCKASQSVDFDGDSYLNWYQQKPGQPPKVLIYAASTLQSGVPSRFSGSGSGTDFTLTINSLEAEDAATYYCQQSNEDPWTFGGGTKVEIKGGGGSGGGGSGGGGSQVQLVQSGAEVKKPGASVKVSCKVSGYTFTDYYITWVRQAPGQALEWMGWIYPGSGNTKYSQKFQGRFVFSVDTSASTAYLQLSSLKAEDTAVYYCANYGNYWFAYWGQGTLVTVSS

SEQ ID NO: 41317 - protein, 241 aa, synthetic construct
DIQMTQSPSSLSASVGDRVTITCRASQGISSWLAWYQQKPEKAPKSLIYAASSLQSGVPSRFSGSGSGTDFTLTISSLQPEDFATYYCQQYNSYPPTFGGGTKVEIKGGGGSGGGGSGGGGSEVQLVQSGGGLVHPGGSLRLSCAGSGFAFSSSTMHWIRQAPGKGLEWISLIGSGGGIYYGDSVKGRFTISRDNAKNSLYLQMNSLRAEDMAVYYCVRGYFDWVDYFDYWGQGTLVTVSS

SEQ ID NO: 41318 - protein, 247 aa, synthetic construct
DVVMTQSPLSLPVTLGQPASISCRSSQSIVHSDGNTYLEWYQQRPGQSPRRLIYKVSNRFSGVPDRFSGSGSGTDFTLKISRVEAEDVGVYYCFQGSHAPWTFGGGTKVEIKGGGGSGGGGSGGGGSEVQLVESGGGLVQPGGSLRLSCAASGFTFSSYGMHWVRQAPGKGLEWVAYITTRSSTIYYADSVKGRFTISRDNAKNSLYLQMNSLRAEDTAVYYCTREPLTGYYAMDYWGQGTSVTVSS

SEQ ID NO: 41319 - protein, 237 aa, synthetic construct
QIVLTQSPALMSASPGEKVTMTCSASSSVRYMYWYQQKPRSSPKPWIHLTSNLASGVPARFSGSGSGTSYSLTISSMEAEDAATYYCQQWSSHPFTFGSGTKLEIKGGGGSGGGGSGGGGSDVQLQESGPGLVKPSQSLSLTCTVTGFSITSDYSWNWIRQFPGNKLEWMGYISYSGHTSYNPSLESRISITRDTSKNQFFLQLNSVTTEDTATYYCTRGNWDVVYWGQGTLVTVSA

SEQ ID NO: 41320 - protein, 246 aa, synthetic construct
EIVLTQSPGSLAVSPGERVTMSCKSSQSVFFSSSQKNYLAWYQQIPGQSPRLLIYWASTRESGVPDRFTGSGSGTDFTLTISSVQPEDLAIYYCHQYLSSRTFGQGTKLEIKRGGGGSGGGGSGGGGSQVQLQQPGAEVVKPGASVKMSCKASGYTFTSYYIHWIKQTPGQGLEWVGVIYPGNDDISYNQKFQGKATLTADKSSTTAYMQLSSLTSEDSAVYYCAREVRLRYFDVWGQGTTVTVSS

SEQ ID NO: 41321 - protein, 250 aa, synthetic construct
DIVMTQSPDSLTVSLGERTTINCKSSQSVLDSSKNKNSLAWYQQKPGQPPKLLLSWASTRESGIPDRFSGSGSGTDFTLTIDSLQPEDSATYYCQQSAHFPITFGQGTRLEIKGGGGSGGGGSGGGGSQVQLVQSGAEVKKPGASVKVSCKASGYTFTNYGMNWVKQAPGQGLKWMGWINTYTGEPTYADDFKGRVTMTSDTSTSTAYLELHNLRSDDTAVYYCARWSWSDGYYVYFDYWGQGTTVTVSS

SEQ ID NO: 41322 - protein, 250 aa, synthetic construct
DVLLTQSPLSLPVTLGQPASISCRSSQTIVHSNGNTYLEWFQQRPGQSPRLLIYQVSNRFSGVPDRFSGSGSGTDFTLKISRVEAEDVGVYYCFQGSHVPRTFGGGTKVEIKRGGGGSGGGGSGGGGSQIQLVQSGSELKKPGASVKVSCKASGYTFTNYGMNWVRQAPGQGLKWMGWINTNTGEPKYAEEFKGRFALSLDTSVSTAYLQINSLKAEDTAVYFCARGYGNYARGAWLAYWGQGTLVTVSS

SEQ ID NO: 41323 - protein, 245 aa, synthetic construct
DHIVLTQSPSSLSASLGDRVTISCRASQDISTYLNWYQQKPDGTVKLLIFYTSRLHAGVPSRFSGSGSGTHHSLTISNLEQEDIATYFCQQGNSLPFTFGSGTKLEIKRGGGGSGGGGSGGGGSQVQLKESGPELEKPGASVKISCKASGYSFTAYSMNWVKQNNGMSLEWIGSIDPYYGDTKYAQKFKGKATLTVDKASSTAYLQLKSLTSEDSAVYYCARRMITTGDWYFDVWGAGTTVTVSS

SEQ ID NO: 41324 - protein, 245 aa, synthetic construct; identical to SEQ ID NO: 41323

SEQ ID NO: 41325 - protein, 245 aa, synthetic construct
DIVMTQSPDSLAVSLGERATINCRASKSVSTSGYSFMHWYQQKPGQPPKLLIYLASNLESGVPDRFSGSGSGTDFTLTISSLQAEDVAVYYCQHSREVPWTFGQGTKVEIKRGGGGSGGGGSGGGGSQVQLVQSGAEVKKPGASVKVSCKASGYTFTNYGMNWVRQAPGQGLEWMGWINTYTGEPTYADAFKGRFAFSLDTSTSTAYLQINSLRSDDTAVYYCARDYGDYGMDYWGQGTTVTVSS

SEQ ID NO: 41326 - protein, 241 aa, synthetic construct
DIVMTQTPLTLSVTIGQPASISCKSSQSLLDSDGKTYLNWLLQRPGQSPERLIYLVSKLDSGVPDRFTGSGSGTDFTLKISRVEAEDLGVYCCWQGTHFPYTFGGGTKVEIKGGGGGSGGGGSGGGGSQVQLQQPGAELVRPGASVKLSCKASGYTFTSYWMNWVKQRPGQGLEWIGMIDPSDSETHYNHIFKDKATLTVDKSSSTAYLQLSSLTSEDSAVYYCARNLYLWGQGTSVTVSS

SEQ ID NO: 41327 - protein, 244 aa, synthetic construct
DIQLTQSPSSLSASVGDRVTITCKASQSVDYEGDSFLNWYQQKPGKAPKLLIYAASNLESGVPSRFSGSGSGTDFTLTISSLQPEDFATYYCQQSNEDPLTFGQGTKVEIKRGGGGSGGGGSGGGGSEVQLVESGGGLVQPGGSLRLSCAASGYTFSSYWIEWVRQAPGKGLEWIGEILPGGGDTNYNEIFKGRATFSADTSKNTAYLQMNSLRAEDTAVYYCTRRVPIRLDYWGQGTLVTVSS

SEQ ID NO: 41328 - protein, 252 aa, synthetic construct
DIVMSQSPSSLAVSVGEKVTMSCKSSQSLLHSSNQKNYLAWYQQKPGQSPKVLIYWASTRESGVPDRFTGSGSGTDFTLTITSVKSEDLAVYYCQQYYSYPWTFGGGTRLEIKRGGGGSGGGGSGGGGSEVQLQQSVAELVKPGASVKMSCKVSGYTLTDHTIHWMKQRPEQGLEWIGYIYPRDGITGYNEKFKGKATLTADTSSSTAYMQLNSLTSEDSAVYFCARWGYSYRNYAYYYDYWGQGTTLTVSS

SEQ ID NO: 41329 - protein, 249 aa, synthetic construct
EIVLTQSPGTLSLSPGERATLSCRASQSVSSSYLAWYQQKPGQAPRLLIYGTSSRATGIPDRFSGSGSGTDFTLTISRLEPEDFAVYYCQQYGSSPFTFGGGTKVEIKRGGGGSGGGGSGGGGSQVQLQESGPGLAKPSETLSLTCTVSGDSITSYYWSWIRQPPGKGLEWIGYIYYSGSTNYNPSLKSRVTISVDTSKNQFSLKLSSVTAADTAVYYCARDQRRIAAAGTHFYGMDVWGQGTTVTVSS

SEQ ID NO: 41330 - protein, 239 aa, synthetic construct
DIQMTQSPSSLSASVGDRVTITCRASQSISLWLNWYQQKPGKAPKLLIYAASTLQSGVPSRFSGSGSGTDFTLTISSLQPEDFATYYCQQYYTSPYTFGQGTKVEIKRGGGGSGGGGSGGGGSQVQLLESGGGLVQPGGSLRLSCAASGFTFSSYAMSWVRQAPGKGLEWVSVIRSSGSSTYYADSVKGRFTISRDNSKNTLYLQMNSLRAEDTAVYYCARGGGYFDYWGQGTLVTVSS

SEQ ID NO: 41331 - protein, 242 aa, synthetic construct
DIQMTQSPSSLSASVGDRVTITCRASQSISSYLNWYQQKPGKAPKLLIYAVSTLQSGVPSRFSGSGSGTDFTLTISSLQPEDFATYYCQQSGTFPPTTFGQGTKVEIKRGGGGSGGGGSGGGGSQVQLLESGGGLVQPGGSLRLSCAASGFTFSSHGMHWVRQAPGKGLEWVSVISGSGSNTGYADSVKGRFTISRDNSKNTLYLQMNSLRAEDTAVYYCARQWGSYAFDSWGQGTLVTVSS

SEQ ID NO: 41332 - protein, 234 aa, synthetic construct
MTQSPKFLLVSAGDRVTLTCKASQSVNNDVYWYQQEPGQSPKLLIYWASTRESGVPDRFTGSGSGTDFTLTISSVQAEDLAVYYCKQSYNLYTFGGGTKLEIKRGGGGSGGGGSGGGGSESGRGLVQPGGSRKLSCAASGFTFSTSGMHWVRQAPEKGLEWVAYISSGSTTIYHADTVKGRFTISRDNPKNTLFLQMTSLRSEDTAMYYCCARSGQFGNYFDYWGQGTTLTVSS

SEQ ID NO: 41333 - protein, 239 aa, synthetic construct
QSPSSLAVSAGEKVTMSCKSSQSLLNSRTRKNYLAWYQQKPGQSPKLLIYWASTRESGVPDRFTGSGSGTDFTLTISSVQAEDLAVYYCKQSNLYTFGGGTKLEIKGGGGSGGGGSGGGGSQVQLEESGPELVKPGASVKLSCKASGYTFTEYIIHWVKQRSGQGLEWIGWFYPGSGSIKYNEKFKDKATLTADKSSSTVYMELSGLTSEDSAVYFCARHDGYSYFDYWGQGTTLTVSS

SEQ ID NO: 41334 - protein, 242 aa, synthetic construct
DIQMTQSPSSLSASLGERVSLTCRATQELSGYLSWLQQKPDGTIKRLIYAASTLDSGVPKRFSGNRSGSDYSLTISSLESEDFADYYCLQYAIYPYTFGGGTKLEIKGGGGSGGGGSGGGGSEVQLQQSGPELVKPGASVKMSCKASGYTFTSYFIHWVKQKPGQGLEWIGFINPYNDGSKYNEKFKGKATLTSDKSSSTAYMELSSLTSEDSAVYYCTRDDGYYGYAMDYWGQGTSVTVSS

SEQ ID NO: 41335 - protein, 247 aa, synthetic construct
DTIVLTQSPASLAVSLGQRATISCRASESVDSYGNSFMHWYQQKPGQPPKLLIYLASNLESGVPARFSGSGSRTDFTLTIDPVEADDAATYYCQQNNYDPWTFGGGTKLEIKGGGGSGGGGSGGGGSEVQLQQSGPELVKPGASVKMSCKASGYTFTSYVMHWVKQKPGQGLEWIGYINPYNDGTKYNEKFKGKATLTSDTSSSTAYMELNSLTSEDSAVYFCARPIYFDNDYFDYWGQGTTLKVSS

SEQ ID NO: 41336 - protein, 241 aa, synthetic construct
DIQMTQSPSSLSASVGDRVTITCKASQDVGIAVAWYQQKPGKVPKLLIYWASTRHTGVPDRFSGSGSGTDFTLTISSLQPEDVATYYCQQYSSYPYTFGQGTKVEIKGGGGSGGGGSGGGGSEVQLVESGGGLVQPGGSLRLSCAASGFDFSRYWMSWVRQAPGKGLEWIGEINPDSSTINYAPSLKDKFIISRDNAKNSLYLQMNSLRAEDTAVYYCARPDGNYWYFDVWGQGTLVTVSS

SEQ ID NO: 41337 - protein, 242 aa, synthetic construct
DIVMTQSQKSMSTSVGDRVSITCKASQDVITGVAWYQQKPGQSPKLLIYSASYRYTGVPDRFTGSGSGTDFTFTISNVQAEDLAVYYCQQHYSTPLTFGAGTKLELKGGGGSGGGGSGGGGSQVQLQQPGAELVRPGASVKLSCKASGYSFTTYWMNWVKQRPGQGLEWIGMIHPSDSETRLNQKFKDKATLTVDKSSSTAYMQLSSPTSEDSAVYYCARSTMIATRAMDYWGQGTSVTVSS

SEQ ID NO: 41338 - protein, 248 aa, synthetic construct
QSVLTQPPSVSGAPGQRVTISCTGSGSNIGAPYDVSWYQQLPGTAPKLLIYHNNKRPSGVPDRFSGSKSGTSASLAITGLQAEDEADYYCATVEAGLSGSVFGGGTKLTVLGAGGGGSGGGGSGGGGSQVQLVQSGAEVKKPGASVKVSCKVSGYTLTELSIHWVRQAPGKGLEWMGGFDPEENEIVYAQRFQGRVTMTEDTSTDTAYMELSSLRSEDTAVYYCAIVGSFSPLTLGLWGQGTMVTVSS

SEQ ID NO: 41339 - protein, 248 aa, synthetic construct
QSVLTQPPSVSGAPGQRVTISCTGSGSNIGAPYDVSWYQQLPGTAPKLLIYHNNKRPSGVPDRFSGSKSGTSASLAITGLQAEDEADYYCQSYDSSSISTIFGGGTKLTVLGAGGGGSGGGGSGGGGSQVQLVQSGAEVKKPGASVKVSCKVSGYTLTELSIHWVRQAPGKGLEWMGGFDPEENEIVYAQRFQGRVTMTEDTSTDTAYMELSSLRSEDTAVYYCAIVGSFSGIAYRPWGQGTMVTVSS

SEQ ID NO: 41340 - protein, 246 aa, synthetic construct
DIQMTQSPSSLSASVGDRVTITCSASSSVSYMYWYQQKPGKAPKLLIYLTSNLASGVPSRFSGSGSGTDFTLTISSLQPEDFATYYCQQWRSNPFTFGQGTKLEIKRGGGGSGGGGSGGGGSQITLKESGPTLVKPTQTLTLTCTFSGFSLSTSGMGVGWIRQPPGKALEWLAHIWWDDVKRYSPSLKSRLTITKDTSKNQVVLTMTNMDPVDTATYYCARIVSFDNDVVSAMDYWGQGTLVTVSS

SEQ ID NO: 41341 - protein, 241 aa, synthetic construct
EIVMTQSPATLSVSPGERATLSCKASQSVSNDVVWYQQKPGQAPRLLIYYASNRYTGIPARFSGSGSGTEFTLTISSLQSEDFAVYYCQQDYTSPWTFGQGTKLEIKRGGGGSGGGGSGGGGSQVQLVQSGAEVKKPGASVKVSCKASGYTFTNYGMNWVRQAPGQGLEWMGWINTYTGEPTYADDFKGRVTMTTDTSTSTAYMELRSLRSDDTAVYYCARIGDSSPSDYWGQGTLVTVSS

SEQ ID NO: 41342 - protein, 241 aa, synthetic construct
DILLTQSPVILSVSPGERVSFSCRASQSIGTNIHWYQQRTNGSPRLLIKYASESISGIPSRFSGSGSGTDFTLSINSVESEDIADYYCQQNNNWPTTFGAGTKLELKGGGGSGGGGSGGGGSQVQLKQSGPGLVQPSQSLSITCTVSGFSLTNYGVHWVRQSPGKGLEWLGVIWSGGNTDYNTPFTSRLSINKDNSKSQVFFKMNSLQSNDTAIYYCARALTYYDYEFAYWGQGTLVTVSA

SEQ ID NO: 41343 - protein, 241 aa, synthetic construct
EIQLVQSGAEVKKPGESLRISCKGSGFNIEDYYIHWVRQMPGKGLEWMGRIDPENDETKYGPIFQGHVTISADTSINTVYLQWSSLKASDTAMYYCAFRGGVYWGQGTTVTVSSGGGGSGGGGSGGGGSDVVMTQSPDSLAVSLGERATINCKSSQSLLDSDGKTYLNWLQQKPGQPPKRLISLVSKLDSGVPDRFSGSGSGTDFTLTISSLQAEDVAVYYCWQGTHFPGTFGGGTKVEIK

SEQ ID NO: 41344 - protein, 249 aa, synthetic construct
ELQMTQSPSSLSASVGDRVTITCRASQSISSYLNWYQQKPGQPPKLLIYWASTRESGVPDRFSGSESGTNYTLTISSLQPEDFATYFCQQSDSLPITFGQGTRLDIQGGGGSGGGGSGGGGSEVQLLESGGGVVQPGRSLRLSCAASGFTFSSYGMHWVRQAPGKGLEWVAVISYDGSNKYYADSVKGRFTISRDNSKNTLYLQMNSLRAEDTAVYYCAKDMGWGSGWRPYYYYGMDVWGQGTTVTVSS

SEQ ID NO: 41345 - protein, 248 aa, synthetic construct
ELVMTQSPSSLTVTAGEKVTMSCKSSQSLLNSGNQKNYLTWYQQKPGQPPKLLIYWASTRESGVPDRFTGSGSGTDFTLTISSVQAEDLAVYYCQNDYSYPLTFGAGTKLEIKGGGGSGGGGSGGGGSEVQLLEQSGAELVRPGTSVKISCKASGYAFTNYWLGWVKQRPGHGLEWIGDIFPGSGNIHYNEKFKGKATLTADKSSSTAYMQLSSLTFEDSAVYFCARLRNWDEPMDYWGQGTTVTVSS

SEQ ID NO: 41346 - protein, 246 aa, synthetic construct
DIQMTQSPSSLSASVGDRVTITCRASQSISSYLNWYQQKPGKAPKLLIYAASSLQSGVPSRFSGSGSGTDFTLTISSLQPEDLATYYCQQSYSTPFTFGPGTKVDIKGGGGSGGGGSGGGGSVHEVQLVQSGAEVKKPGSSVKVSCKASGGTFSSYAISWVRQAPGQGLEWMGGIIPIFGTANYAQKFQGRVTITADKSTSTAYMELSSLRSEDTAVYYCATFALFGFREQAFDIWGQGTTVTVSS

SEQ ID NO: 41347 - protein, 240 aa, synthetic construct
YIHVTQSPSSLSVSIGDRVTINCQTSQGVGSDLHWYQHKPGRAPKLLIHHASSVEDGVPSRFSGTGFHTSFNLTINDLQADDIGTYYCQVLQSFGRGSRLDTKGGGGSGGGGSGGGGSRAHLVQSGTAMKKPGASVRVSCQTSGYTFTAHILFWFRQAPGRGLEWVGWIKPQYGAVNFGGGFRDRVTLTRDVYREIAYMDIRGLKPDDTAVYYCARDRSYGDSSWALDAWGQGTTVVVSA

SEQ ID NO: 41348 - protein, 245 aa, synthetic construct
DIVLTQSPLSLAVSLGQPAIISCKASQSVSFAGTSLMHWYHQKPGQQPRLLIYRASNLEAGVPDRFSGSGSKTDFTLTISPVEAEDAATYYCQQSREYPYTFGGGTKLEIKRGGGGSGGGGSGGGGSQVQLVQSGAEVVKPGASVKISCKASGYTFTGYFMNWVKQSPGQSLEWIGRIHPYDGDTFYNQKFQGKATLTVDKSSNTAHMELLSLTSEDFAVYYCTRYDGSRAMDYWGQGTTVTVSS

SEQ ID NO: 41349 - protein, 241 aa, synthetic construct
DVVMTQTPLSLPVTPGEPASISCRSSQSLVHRNGNTYLHWYLQKPGQSPKLLIHKVSNRFSGVPDRFSGSGSGTDFTLKISRVEAEDLGVYFCSQSTHVPPLTFGAGTKLELKGGGGSGGGGSGGGGSEVQLVQSGAEVEKPGASVKISCKASGSSFTGYNMNWVRQNIGKSLEWIGAIDPYYGGTSYNQKFKGRATLTVDKSTSTAYMHLKSLRSEDTAVYYCVSGMEYWGQGTSVTVSS

SEQ ID NO: 41350 - protein, 239 aa, synthetic construct
EIVMTQTPATLSVSAGERVTITCKASQSVSNDVTWYQQKPGQAPRLLIYSASNRYSGVPARFSGSGYGTEFTFTISSVQSEDFAVYFCQQDYSSFGQGTKLEIKRGGGGSGGGGSGGGGSQVQLVESGPGVVQPGRSLRISCAVSGFSVTNYGVHWVRQPPGKGLEWLGVIWAGGITNYNSAFMSRLTISKDNSKNTVYLQMNSLRAEDTAMYYCASRGGHYGYALDYWGQGTLVTVSS

SEQ ID NO: 41351 - protein, 242 aa, synthetic construct
DIQMTQTASSLPASLGDRVTISCSASQDISNYLNWYQQKPDGTVKLLIFYSSNLHSGVPSRFSGGGSGTDYSLTISNLEPEDIATYFCHQYSKLPWTFGGGTKLEIKRGGGGSGGGGSGGGGSEVTLVESGGDFVKPGGSLKVSCAASGFAFSHYAMSWVRQTPAKRLEWVAYISSGGSGTYYSDSVKGRFTISRDNAKNTLYLQMRSLRSEDSAMYFCTRVKLGTYYFDSWGQGTTLTVSS

SEQ ID NO: 41352 - protein, 244 aa, synthetic construct
QFVLTQSPSASAALGASAKLTCTLSSAHKTYTIDWYQQQKGKAPRYLIQVKSDGTYTKATGVPDRFSGSSSGADRYLIIPSVQADDEADYYCGTDYTGGYVFGGGTQLTVTGGGGSGGGGSGGGGSEQLKESGGGLFKPTDTLTLTCTVSGFSLSYYGVNWVRQAPGNGLEWIGTIGGSGDTYYASWAKSRSTIIRNTNENTVTLKMTSLTAADTATYFCVRYANIGYEYFNVWGPGTLVTVSS

SEQ ID NO: 41353 - protein, 243 aa, synthetic construct
DIQMTQSPSSLSASVGDRVTITCRASQGISSWLAWYQQKPEKAPKSLIYAASSLQSGVPSRFSGSGSGTDFTLTISSLQPEDFATYYCQQYNSYPPTFGGGTKVEIKGGGGSGGGGSGGGGSEVQLVESGGGLVQPGESLRLSCVASGFTFSRYKMNWVRQAPGKGLEWVSYISRSGRDIYYADSVKGRFTISRDNAKNSLYLQMNSLRDEDTAVYYCAGTVTTYYYFGMDVWGHGTTVTVSS

SEQ ID NO: 41354 - protein, 242 aa, synthetic construct
QSVVTQPPSMSAAPGQQVTISCSGGNSNIERNYVSWYLQLPGTAPKLVIFDNDRRPSGIPDRFSGSKSGTSATLGITGLQTGDEADYYCGTWDSSLRGWVFGGGTKLTVLGGGGGSGGGGSGGGGSEVQLVESGGGLIQPGGSLRLSCAASGFTFSNYAMNWVRQAPGKGLEWVSTINGRGSSTIYADSVKGRFTISRDNSKNTLYLQMNSLRAEDTATYYCARYISRGLGDSWGQGTLVTV

SEQ ID NO: 41355 - protein, 243 aa, synthetic construct
QSVLTQPPSASGTPGQRVTISCSGSRSNVGGNYVFWYQQVPGATPKLLIYRSNQRPSGVPDRFAGSKSGSSASLAISGLRSEDEADYYCATWDDSLSGFVFGTGTKVTVLGGGGGSGGGGSGGGGSEVQLVESGGGLVKPGGSLRLSCAASGFTFSDYYMSWIRQAPGKGLEWVSYISSSGSTIYYADSVKGRFTISRDNAKNSLYLQMNSLRAEDTAVYYCARGYGKAYDQWGQGTLVTVSS

SEQ ID NO: 41356 - protein, 242 aa, synthetic construct
DIQMTQSPSSLSASVGDRVTITCRASQDVNTAVAWYQQKPGKAPKLLIYSASFLESGVPSRFSGSRSGTDFTLTISSLQPEDFATYYCQQHYTTPPTFGQTKVEIKRGGGGSGGGGSGGGGSEVQLVESGGGLVQPGGSLRLSCAASGFNIKDTYIHWVRQAPGKGLEWVARIYPTNGYTRYADSVKGRFTISADTSKNTAYLQMNSLRAEDTAVYYCSRWGGDGFYAMDVWGQGTLVTVSS

SEQ ID NO: 41357 - protein, 255 aa, synthetic construct
QSALTQPPSASGSPGQSITISCTGTSNNFVSWYQQHAGKAPKLVIYDVNKRPSGVPDRFSGSKSGNTASLTVSGLQTDDEAVYYCGSLVGNWDVIFGGGTKLTVLGGGGSGGGGSGGGGSQPQLQESGPTLVEASETLSLTCAVSGDSTAACNSFWGWVRQPPGKGLEWVGSLSHCASYWNRGWTYHNPSLKSRLTLALDTPKNLVFLKLNSVTAADTATYYCARFGGEVLRYTDWPKPAWVDLWGRGTLVTVSS

SEQ ID NO: 41358 - protein, 250 aa, synthetic construct
ELVLTQSPGTLSLSAGERATLSCRASQSVSSGSLAWYQQKPGQAPRLLIYGASTRATGIPDRFSGSGSGTDFTLTIGRLEPEDLAVYYCQQYGTSPYTFGQGTKLEIGGGGSGGGGSGGGGSLEQSGAEVKKPGSSVQVSCKASGGTFSMYGFNWVRQAPGHGLEWMGGIIPIFGTSNYAQKFRGRVTFTADQATSTAYMELTNLRSDDTAVYYCARDFGPDWEDGDSYDGSGRGFFDFWGQGTLVTVSS

SEQ ID NO: 41359 - protein, 230 aa, synthetic construct
DIQMTQSPSSLSASVGDRVTITCQASQDINNYLNWYQQKPGKAPKLLIYDASNLQTGVPSRFSGSGSGTDFTFTIEDIATYYCQQYTFGPGTKVDIKGGGGSGGGGSGGGGSEVQLLESGGGLVQPGGSLRLSCAASGFTFSWYSMTWVRQAPGKGLEWVSSIVPWGDFTQYADSVKGRFTISRDNSKNTLYLQMNSLRAEDTAVYYCAKGPGWGSFDLWGRGTLVTVSS

SEQ ID NO: 41360 - protein, 240 aa, synthetic construct
DIQMTQSPSSLSASVGDRVTITCTASLSVSSTYLHWYQQKPGSSPKLWIYSTSNLASGVPSRFSGSGSGTSYTLTISSLQPEDFATYYCHQYHRSPLTFGGGTKVEIKRGGGGSGGGGSGGGGSEVQLVESGGGLVQPGGSLRLSCAASGFSLTKYGVHWVRQAPGKGLEWVGVKWAGGSTDYNSALMSRFTISKDNAKNSLYLQMNSLRAEDTAVYYCARDHRDAMDYWGQGTLVTVSS

SEQ ID NO: 41361 - protein, 244 aa, synthetic construct
DIQMTQSPSSLSASVGDRVTITCKASQDVGTAVAWYQQKPGKAPKLLIYSASYRSTGVPSRFSGSGSGTDFTLTISSLQPEDFATYYCQHHYSAPWTFGGGTKVEIKGGGGSGGGGSGGGGSEVQLVESGGGLVQPGGSLRLSCAASGFTFSRNGMSWVRQAPGKGLEWVATVSSGGSYIYYADSVKGRFTISRDNAKNSLYLQMNSLRAEDTAVYYCARQGTTALATRFFDVWGQGTLVTVSS

SEQ ID NO: 41362 - protein, 240 aa, synthetic construct
DIQMTQSFSSLSASVGDRVTITCRASQDISNYLNWYQQKPGKAPKLLIYYTSRLHSGVPSRFSGSGSGTDYTLTISSLQPEDFATYFCQQGNTLPWTFGGGTKLEIKRGGGGSGGGGSGGGGSEVQLVQSGGGLVQSGGSLRLSCRASGYTFTRYWMLWVRQRPGKGLEWVAEINPRNDRTNYNEKFKTRFTISVDRSKNTLYLQMDSLRAEDTAVYFCALGGGYAMDYWGQGTLVTVSS

SEQ ID NO: 41363 - protein, 240 aa, synthetic construct
DIQMTQSPPSLSASVGGKVTITCKASQDIDRYMAWYQDKPGKGPKLLIHDTSTLQPGIPSRFSGSGSGRDYSFSISNLEPEDIATYYCLQYDNLWTFGGGTKLEIKRGGGGSGGGGSGGGGSQVQLVQSGAELVKPGASVKMSCKASGYIFTNYNIHWVKKSPGQGLEWIGAIYPGNGDAPYSQKFQDRATLTADTSSSTTYMELSSLTSEDSAVYYCVRANWDVAFAYWGQGTLVSVSS

SEQ ID NO: 41364 - protein, 241 aa, synthetic construct
DIQMTQSPASLSASVGETVTITCRVSGNIHNYLAWYQQKQGKSPQLLVYNAKTLADGVPSRFSGSGSGTQYSLKINSLQPEDFGSYYCQHFWSNPYTFGGGTKLEIKGGGGSGGGGSGGGGSQVQLQQSGASVKVSCKASELVRPGTGYAFTNYLIEWVKQRPGQGLEWIGVINPGSGGTNYNEKFKGKATLTADKSSSTAYMQLSSLTSDDSAVYFCARYRSYDWYFDVWGAGTTVTVSS

SEQ ID NO: 41365 - protein, 241 aa, synthetic construct
DIQMTQSPASLSASVGETVTIICRASVNIYSYLAWYQQKQGKSPQLLVYNAKILAEGVPSRFSGSGSGTQFSLKINSLQPEDFGSYYCQHHYGTFTFGSGTKLEIKRGGGGSGGGGSGGGGSQVQLKESGPGLVAPSQSLSITCTISGFSLTSYGVHWVRQPPGKGLEWLVVIWSDGSTTYNSALKSRLSISKDNSKSQVFLKMNSLQTDDTAIYYCASHYGSTLAFASWGHGTLVTVSAA

SEQ ID NO: 41366 - protein, 249 aa, synthetic construct
DIVMTQSHKFMSTSVGDRVSVTCKASQNVGNNVAWYQQKPGQSPKVLIYSASYRYSGVPDRFTGSGSGTDFTLTISNVQSEDLAEYFCQQYNTYPFTFGSGTKLEIKGGGGSGGGGSGGGGSEVQLEESGGGLVQPGGSMKLSCVASGFTFSNYWMNWVRQSPEKGLEWVAEIRFKSHNYATHFAESVKGRFTISRDDSKSSVYLQMNNLRAEDTGIYYCTRRIGNSDYDWWYFDVWGAGTSVTVSSAS

SEQ ID NO: 41367 - protein, 241 aa, synthetic construct
DIQMTQSSSSFSVSLGDRVTITCKASEDIYIRLAWYQQKPGNAPRLLISAATSLETGIPSRFSGSGSGEDYTLTITSLQTEDVATYYCQQYWTTPWTFGGGTKLEIKRGGGGSGGGGSGGGGSDVQLQESGPGLVKPSQSLSLTCTVTGYSITIDYTWNWIRQFPGNKLEWMGYITYSGSTDYNPSLKSRSSITRDTSMNQFFLQLNSVTTEDTATYYCARLGRRYALDYWGQGTSVTVSS

SEQ ID NO: 41368 - protein, 240 aa, synthetic construct
DVQLQESGPGLVKPSQSLSLTCTVTGYSITSDYTWNWIRQFPGNKLEWMGYITYSGSTSYNPSLKSRNSITRDTSKNQFFLQLNSVTTEDTATYYCARLGRRYTMDYWGQGTSVTVSSGGGGSGGGGSGGGGSDIQMTQSSSSFSVSLGDRVTITCMASEDIYIRLAWYQQKPGNAPRLLISAATSLETGVPSRFSGSGSGKDYTLSITSLQTEDVGTYYCQQYWSSPWTFGGGTKLEIN

SEQ ID NO: 41369 - protein, 240 aa, synthetic construct
DIQMTQSSSSFSVSLGDRVTITCMASEDIYIRLAWYQQKPGNAPRLLISAATSLETGVPSRFSGSGSGKDYTLSITSLQTEDVGTYYCQQYWSSPWTFGGGTKLEINGGGGSGGGGSGGGGSDVQLQESGPGLVKPSQSLSLTCTVTGYSITSDYTWNWIRQFPGNKLEWMGYITYSGSTSYNPSLKSRNSITRDTSKNQFFLQLNSVTTEDTATYYCARLGRRYTMDYWGQGTSVTVSS

SEQ ID NO: 41370 - protein, 242 aa, synthetic construct
DQIVLTQSPAIMSASPGEKVTISCSASSSVSYMYWYQQKPGSSPKPWIYRTSNLASGVPARFSGSGSGTSYSLTISNMEAEDAAAYYCQQYHSYPTTFGGGTKLEVKGGGGSGGGGSGGGGSEVQLVESGGGLVQPKGSLKLSCAASGFSFNTYAMNWVRQAPGKGLEWIAHIRSKSNNFATYYADSVKDRFSISRDASENILFLQMNNLKTEDTAMYYCVRQGGDFPMDYWGQGTSVTVSS

SEQ ID NO: 41371 - protein, 243 aa, synthetic construct
DIQMTQSPSSLSASVGDRVTITCRASQSISSYLNWYQQKPGKAPKLLIYDASNLETGVPSRFSGSGSGTDFTFTISSLQPEDIATYYCQQYDNLPLTFGGGTKVDIKRGGGGSGGGGSGGGGSQVQLVESGGGVVQPGRSLRLSCAASGFTFSSYAMHWVRQAPGKGLEWVAVISYDGSNKYYADSVKGRFTISRDNSKNTLYLQMNSLRAEDTAVYYCARAHNSSSWSFDYWGQGTLVTVSS

SEQ ID NO: 41372 - protein, 252 aa, synthetic construct
DVVMTQSPLSLPVSLGDQASISCRSSQRLVHSNGNTYLHWYLQKPGQSPKLLIYRVSNRFPGVPDRFSGSGSGTDFTLKISRVEAEDLGIYFCSQSTHVPYTFGGGTKLEIKRGGGGSGGGGSGGGGSEVRLQQSGPDLIKPGASVKMSCKASGYTFTGYVMHWVKQRPGQGLEWIGFINPYNDDIQSNERFRGKATLTSDKSSTTAYMELSSLTSEDSAVYYCARGAGYNFDGAYRFFDFWGQGTTLTVSS

SEQ ID NO: 41373 - protein, 243 aa, synthetic construct
SYELTQPPSVSVSPGQTATISCSGDQLGGKYGHWYQKKPGQSPVLVLYQDRKRPAGIPERFSGSSSGNTITLTISGTQAVDEADYYCQAWDTNLGGVFGGGTKVTVLGQGGGGSGGGGSGGGGSQVQLVESGAEVKKPGASVKVSCKASGYTFTGYYMHWVRQAPGQGLEWMGRINPNSGGTNYAQKFQGRVTMTRDTSISTAYMELSRLRSDDTAVYYCASPRGRGSAFDIWGQGTLVTVSS

SEQ ID NO: 41374 - protein, 246 aa, synthetic construct
NFMLTQPHSVSESPGKTVTISCTRSSGSIASKYVQWYQQRPGSSPTTVIYEDNQRPSGVPDRFSGSIDTSSNSASLTISGLRTEDEADYYCHSYDSNNHSVFGGGTKVTVLGQGGGGSGGGGSGGGGSEVQLVESGGGVVQPGGSLRLSCAASGFTFSSYAMSWVRQAPGKGLEWVSAISGSGGSTYYADSVKGRFSISRDNSKNTLYLQMNSLRAEDTAVYYCARTRSSGAFDIWGQGTLVTVSS

SEQ ID NO: 41375 - protein, 242 aa, synthetic construct
DIQMNQSPSSLSASLGDTITITCHASQNINVWLSWYQQKPGNIPKLLIYKASNLHTGVPSRFSGSGSGTGFTITISSLQPEDIATYYCQQGQSYPWTFGGGTKLEIKRGGGGSGGGGSGGGGSEVQLQQSGPELVKPGASVKISCKASGYSFTGYFMNWVKQSHGKSLEYIGRFNPYNGETLYNQKFKGKATLTVDKSSSTVHMELLSVTSEDSAVYYCGRSGNDDAMDYWGQGTSVTVSSA

SEQ ID NO: 41376 - protein, 239 aa, synthetic construct
DILLTQSPAILSVSPGERVSFSCRASQNIGTSIHWYQQRTNGSPRLLIKYASESVSGIPSRFSGSGSGTDFTLSINSVESEDIADYYCQHTNSWPTTFGGGTKLEIKRGGGGSGGGGSGGGGSQVQLQQSDAELVKPGASVKISCKASGYTFTDHAIHWVKQKPEQGLEWIGYFSPGNGDIKYNEKFKGKATLTADKSSSTAYMQLNSLTSEDSAVYFCKRSYGNYDYWGQGTTLTVSS

SEQ ID NO: 41377 - protein, 244 aa, synthetic construct
DIVMTQSPDSLAVSLGERATINCKSSQSLLNSGDQKNYLTWYQQKPGQPPKLLIYWASTRESGVPDRFSGSGSGTDFTLTISSLQAEDVAVYYCQNDYSYPLTFGQGTKVEIKGGGGSGGGGSGGGGSQVQLVQSGAEVKKTGSSVKVSCKASGYTFTDHAIHVWRQAPGQALEWMGHFSPGNTDIKYNDKFKGRVTLTVDRSMSTAYMELSSLRSEDTAMYYCKTSTFFFDYWGQGTMVTVSS

SEQ ID NO: 41378 - protein, 243 aa, synthetic construct
DIQMTQSPSSLSASVGDRVTITCKASQDVSIAVAWYQQKPGKAPKVLIYSASYRYTGVPDRFSGSGSGTDFTFTISSLQPEDIAVYYCQQHYITPLTFGGGTKVEIKGGGGSGGGGSGGGGSQIQLVQSGHEVKKPGASVKVSCKASGYTFTNYGMNWVRQAPGQGLEWMGWINTKTGEPTYAEEFKGRFVFSLETSASTAYLQISSLKAEDTAMYFCGRGGYGSSYWYFDVWGQGTTVTVSS

SEQ ID NO: 41379 - protein, 246 aa, synthetic construct
QAVVTQPPSASGTPGQRVTISCSGSSSNIGSNTVNWYQQVPGTAPKLLIYSNNQRPSGVPDRFSGSKSGTSASLAISGLQSEDEADYYCAAWDDSLNGWVFGGGTKLTVLGGGGSGGGGSGGGGSQMQLVQSGAEVKEPGESLRISCKGSGYSFTNFWISWVRQMPGKGLEWMGRVDPGYSYSTYSPSFQGHVTISADKSTSTAYLQWNSLKASDTAMYYCARVQYSGYYDWFDPWGQGTLVTVSS

SEQ ID NO: 41380 - protein, 240 aa, synthetic construct
DIQMTQSPSTLSASVGDRVTITCRASQNINKWLAWYQQRPGKAPQLLIYKASSLESGVPSRFSGSGSGTEYTLTISSLQPDDFATYYCQQYNSYATFGQGTKVEIKRGGGGSGGGGSGGGGSQVQLVQSGAEVKKPGESLKISCKGSGYNFSNKWIGWVRQLPGRGLEWIAIIYPGYSDITYSPSFQGRVTISADTSINTAYLHWHSLKASDTAMYYCVRHTALAGFDYWGLGTLVTVSS

SEQ ID NO: 41381 - protein, 245 aa, synthetic construct
QSVVTQPPSVSVAPGKTARITCGRNNIGSKSVHWYQQKPGQAPVLVVYDDSDRPSGIPERFSGSNSGNTATLTISRVEAGDEADYYCQVWDSSSDHVVFGGGTKLTVLGGGGGSGGGGSGGGGSEVQLVQSGGGVVRPGGSLRLSCAASGFTFDDYGMSWVRQAPGKGLEWVSGINWNGGSTGYADSVRGRFTISRDNAKNSLYLQMNSLRAEDTALYYCARERGYGYHDPHDYWGQGTLVTVSS

SEQ ID NO: 41382 - protein, 244 aa, synthetic construct
DIVLTQSPASLAVSLGQRATISCRASESVDNYGNTFMHWYQQKPGQPPKLLIYRASNLESGIPARFSGSGSRTDFTLTINPVEADDVATYYCQQSNEDPPTFGAGTKLELKGGGGSGGGGSGGGGSQIQLVQSGPELKKPGETVKISCKASGYIFTNYGMNWVKQAPGKSFKWMGWINTYTGESTYSADFKGRFAFSLETSASTAYLHINDLKNEDTATYFCARSGGYDPMDYWGQGTSVTVSS

SEQ ID NO: 41383 - protein, 242 aa, synthetic construct
EIVLTQSPGTLSLSPGERATLSCRASQSVSNTYLAWYHQRPGQAPRLLIYGASSRATGIPDRFSGSGSGTDFALTISSLEPEDFAVYYCQQYSNSWTFGQGTKVEIKRGGGGSGGGGSGGGGSQVQLVESGGGVVQPGRSLRLSCAASGFTFSSYDMHWVRQAPGKGLEWVAVISYDGTNEYYADSVKGRFTISRDTSKNTLYLQMNSLRAEDTAVYYCARERYFDWSFDYWGQGTLVSVSS

SEQ ID NO: 41384 - protein, 241 aa, synthetic construct
ELTQDPAVSVALGQTVRITCQGDSLRSNYANWYQQKPGQAPVLVIYGQNNRPSGIPDRFSGSSSGNTASLTITGAQAADEADYYCDSRVSTGNHVVFGGGTKLTVLGQGGGGSGGGGSGGGGSEVQLVQSGAEVKKPGASVKVSCKASGYTFTSYAMHWVRQAPGQRLEWMGWINAGNGNTKYSQKFQGRVTITRDTSASTAYMELSSLRSEDTAVYYCARDISYGSFDYWGQGTLVTVSS

SEQ ID NO: 41385 - protein, 237 aa, synthetic construct
DIQMTQSPSSLSASVGDRVTITCSATSSISYMHWYQQKPGKAPKGWIYDTSKLAHGVPSRFSGSGSGTDFTLTISSLQPEDFATYYCHQRRSYPFTFGQGTKVEIKGGGGSGGGGSGGGGSEVQLVQSGAEVKKPGASVKVSCKASGYTFTNFWIHWVRQAPGQGLEWIGEIDPSDSYTNYNQKFKGRVTITRDTSTSTAYLELSSLRSEDTAVYYCAREITTVDYWGQGTLVTVSS

SEQ ID NO: 41386 - protein, 244 aa, synthetic construct
DIQMTQSPSSLSASVGDRVTITCKASQGFNKYVAWYQQKPGKAPKLLIYYTSTLQPGVPSRFSGSGSGRDYTLTISSLQPEDFATYYCLQYGNLLYAFGQGTKVEIKRGGGGSGGGGSGGGGSEVQLVQSGAEVKKPGASVKVSCKASGYTFTSYWIGWVRQAPGQGLEWIGDIYPGGGYTNYNEKFKGRVTITRDTSTSTAYLELSSLRSEDTAVYYCARLDGSSYRGAMDSWGQGTLVTVSS

SEQ ID NO: 41387 - protein, 240 aa, synthetic construct
DIQMTQSPSSLSASVGDRVTITCRASQDIRYYLNWYQQKPGKAPKLLIYVASSLQSGVPSRFSGSGSGTEFTLTVSSLQPEDFATYYCLQVYSTPRTFGQGTKVEIKGGGGSGGGGSGGGGSEVQLVESGGGLAKPGGSLRLSCAASGFRFTFNNYYMDWVRQAPGQGLEWVSRISSSGDPTWYADSVKGRFTISRENAKNTLFLQMNSLRAEDTAVYYCASLTTGSDSWGQGVLVTVSS

SEQ ID NO: 41388 - protein, 241 aa, synthetic construct
EIVMTQSPATLSVSPGERATLSCRASQSVSRNLAWYQQKPGQAPRLLIYGASTRATGIPARFSGSGSGTEFTLTIGSLQSEDFAVYYCQQYKTWPRTFGQGTNVEIKGGGGSGGGGSGGGGSQVQLQQWGAGLLKPSETLSLTCAVFGGSFSGYYWSWIRQPPGKGLEWIGEINHRGNTNDNPSLKSRVTISVDTSKNQFALKLSSVTAADTAVYYCARERGYTYGNFDHWGQGTLVTVSS

SEQ ID NO: 41389 - protein, 247 aa, synthetic construct
DIQMTQSPSSLSASVGDRVTITCKASKNIRSYLAWYQQKPGKAPKLLIYSGSTLHSGVPSRFSGSGSGTDFTLTISSLQPEDFATYYCQQHHEYPLTFGQGTKVEIKRGGGGSGGGGSGGGGSQVQLQESGPGLVKPSETLSLTCTVSGYTITSGYDWSWIRQPPGKGLEWIGYINYGGSTNYKPSLGSRVTISVDTSKNQFSLKLSSVTAADTAVYYCARYNEYKSYIYDWYFDFWGQGTLVTVSS

SEQ ID NO: 41390 - protein, 249 aa, synthetic construct
QSVVTQPPSVSAAPGQKVTISCSGSSSNIGNNYVSWYQQLPGTAPKLLIYDNNKRPSGIPDRFSGSKSGTSATLGITGLQTGDEADYYCGTWDGSLYTMLFGGGTKLTVLGGGGSGGGGSGGGGSEVQLVESGGGLVKPGGSLRLSCAASGFTFSNAWMSWVRQAPGKGLEWVGFIRSKAYGGTTEYAASVKGRFTISRDDSKSIAYLQMNNLKTEDTAVYYCARDGLYSSSWYDSDYWGQGTLVTVSS

SEQ ID NO: 41391 - protein, 254 aa, synthetic construct
QSVLTQPPSVSGAPGQRVTISCTGSSSNIGAGYDVHWYQQLPGTAPKLLIFGNSNRPSGVPDRFSGFKSGTSASLAITGLQAEDEADYFCQSYDSSLSGSGVFGTGTKVTVLGGGGGSGGGGSGGGGSQMQLVQSGGGLVQPGRSLRLSCAASGFTFDDYAMHWVRQAPGKGLEWVSGISWNSGSIGYADSVKGRFTISRDNAKNSLYLQMNSLRAEDTALYYCAKDIHSGSYYGLLYYAMDVWGQGTTVTVSS

SEQ ID NO: 41392 - protein, 254 aa, synthetic construct
LPVLTQPPSASGTPGQRVTISCSGRSSNIGSNSVNWYRQLPGAAPKLLIYSNNQRPPGVPVRFSGSKSGTSASLAISGLQSEDEATYYCATWDDNLNVHYVFGTGTKVTVLGSRGGGGSGGGGSGGGGSLEMAQVQLVQSGAEVKKPGSSVKVSCKASGGTFSSYAISWVRQAPGQGLEWMGRIIPILGIANYAQKFQGRVTITADKSTSTAYMELSSLRSEDTAVYYCARGGYYSHDMWSEDWGQGTLVTVSS

SEQ ID NO: 41393 - protein, 243 aa, synthetic construct
DIVLTQSPASLAVSLGERATINCRASESVSVIGAHLIHWYQQKPGQPPKLLIYLASNLETGVPARFSGSGSGTDFTLTISSLQAEDAAIYYCLQSRIFPRTFGQGTKLEIKGGGGSGGGGSGGGGSQVQLVQSGSELKKPGESVKISCKASGYTFTDYSINWVKQAPGQGLKWMGWINTETREPAYAYDFRGRFVFSLDTSASTAYLQISSLKAEDTAVYFCALDYSYAMDYWGQGTLVTVSS

SEQ ID NO: 41394 - protein, 244 aa, synthetic construct
DIVLTQSPATLSLSPGDRATLSCRASESVTILGSHLIYWYQQKPGQAPRLLIQLASNVQTGIPARFSGSGSRTDFTLTISSLEPEDFAVYYCLQSRTIPRTFGQGTKLEIKRGGGGSGGGGSGGGGSQVQLVQSGSELKKPGESVKISCKASGYTFTHYSMNWVRQAPGQGLEWMGRINTETGEPLYADDFKGRFVFSLDTSASTAYLQISSLKAEDTAVYYCSNDYLYSLDYWGQGTLVTVSS

SEQ ID NO: 41395 - protein, 248 aa, synthetic construct
DFVMTQSPDSLAVSLGERVTMSCKSSQSLLNSGNQKNYLTWYQQKPGQPPKLLIYWASTRESGVPDRFSGSGSGTDFTLTISSLQAEDVAVYYCQNDYSYPYTFGQGTKLEIKGGGGSGGGGSGGGGSEVQLVQSGAELKKPGASVKVSCKASGYTFTDYYMKWVRQAPGQGLEWIGDIIPSNGATFYNQKFKGRVTITVDKSTSTAYMELSSLRSEDTAVYYCARSHLLRASWFAYWGQGTLVTVSS

SEQ ID NO: 41396 - protein, 248 aa, synthetic construct
DFVMTQSPDSLAVSLGERVTMSCKSSQSLLNSGNQKNYLTWYQQKPGQPPKLLIYWASTRESGVPDRFSGSGSGTDFTLTISSLQAEDVAVYYCQNDYSYPYTFGQGTKLEIKGGGGSGGGGSGGGGSQVQLVQSGAELKKPGASVKVSCKASGYTFTDYYMKWVRQAPGQGLEWIGDIIPSNGATFYNQKFKGRVTITVDKSTSTAYMELSSLRSEDTAVYYCARSHLLRASWFAYWGQGTLVTVSS

SEQ ID NO: 41397 - protein, 238 aa, synthetic construct
DVQITQSPSYLAASPGETITINCRASKSISKDLAWYQEKPGKTNKLLIYSGSTLQSGIPSRFSGSGSGTDFTLTISSLEPEDFAMYYCQQHNKYPYTFGGGTKLEIKRGGGGSGGGGSGGGGSQVQLQQPGAELVRPGASVKLSCKASGYTFTSYWMNWVKQRPDQGLEWIGRIDPYDSETHYNQKFKDKAILTVDKSSSTAYMQLSSLTSEDSAVYYCARGNWDDYWGQGTTLTVSS

SEQ ID NO: 41398 - protein, 240 aa, synthetic construct
EIVLTQSPTSMTASPGEQVTITCRASSSINYMHWYQQKPGASPRPWIYETSKLASGVPDRFSGSASGTSYSLTINNMEAEDAATYYCQQWNYPSWTFGGGTKLELKGGGGSGGGGSGGGGSEVQLVESGGGLVQPGRSLKLSCAASGFTFSDYNMAWVRQAPKKGLEWVATILYDGGRTYYRGSVKGRFTISRDNAKSTLYLRMDSLRSEDTATYYCATHSRGTDYFDYWGQGVMVTVSS

SEQ ID NO: 41399 - protein, 249 aa, synthetic construct
DIVMTQSPSSLAVSEGETVTINCKSSQSFLSSGDGKNYVAWYQYKPGQSPKLLIYWASTRQSGVPDRFIGSGSGTDFTLTISTVQAEDLAIYYCQQYYDTPLTFGSGTKLEIKGGGGSGGGGSGGGGSEVKLQESGPSLVQSSQTLSLTCTVSGFSLTSYHIHWVRQTPGKGLEWMGVMWSDGDTSYNSALKSRLSISRDTSQSQVFLKMNSLQTEDTATYYCARGYYSSYLYLWFAYWGQGTLVTVSS

SEQ ID NO: 41400 - protein, 253 aa, synthetic construct
DVLMTQTPVSLPVSLGGQVSISCRSSQSLVHSDGDTYLHWYLQKPGQSPQLLIYRVSNRFSGVPDRFSGSGSGTDFTLKISRVEPEDLGLYYCLQTTHFPPWTFGGGTKLEMKGGGGSGGGGSGGGGSQVQLQQSGPELRRPGSSVRLSCKASGYRIKDFLIHWIKNRPEHGLEWIGWIDPEDGETKYAQKFQTKATLTADTSSNTAYMQLSSLTSEDTATYFCARWGDVYYGLMRGHVMDAWGQGTSVTVSS

SEQ ID NO: 41401 - protein, 267 aa, synthetic construct
INIYNAEPANPSEKNSPEFDIVMTQSPATLSLSPGERATLSCRSSKSLQNVNGNTYLYWFQQKPGQSPQLLIYRMSNLNSGVPDRFSGSGSGTEFTLTISSLEPEDFAVYYCMQHLEYPITFGAGTKLEIKGGGGSGGGGSGGGGSEVQLVESGGGLVKPGGSLKLSCAASGYTFTSYVMHWVRQAPGKGLEWIGYINPYNDGTKYNEKFQGRVTISSDKSISTAYMELSSLRSEDTAMYYCARGTYYYGTRVFDYWGQGTLVTVSS

SEQ ID NO: 41402 - protein, 244 aa, synthetic construct; identical to SEQ ID NO: 8767

SEQ ID NO: 41403 - protein, 246 aa, synthetic construct
QIVLSQSPAILSASPGEKVTMTCRASSSVSYMHWYQQKPGSSPKPWIYATSNLASGVPARFSGSGSGTSYSFTISRVEAEDAATYYCQQWTFNPPTFGGGTRLEIKRTVAAGGGGSGGGGSGGGGSQAYLQQSGAELVRPGASVKMSCKASGYTFTSYNMHWVKQTPRQGLEWIGGIYPGNGDTSYNQKFKGKATLTVGKSSSTAYMQLSSLTSEDSAVYFCARYDYNYAMDYWGQGTSVTVSSAS

SEQ ID NO: 41404 - protein, 245 aa, synthetic construct
DEIVLTQSPATLSLSPGERATLSCRASQSVSSYLAWYQQKPGQAPRLLIYDASNRATGIPARFSGSGSGTDFTLTISSLEPEDFAVYYCQQRSNWPITFGQGTRLEIKGGGGSGGGGSGGGGSEVQLVESGGGLVQPDRSLRLSCAASGFTFHDYAMHWVRQAPGKGLEWVSTISWNSGTIGYADSVKGRFTISRDNAKNSLYLQMNSLRAEDTALYYCAKDIQYGNYYYGMDVWGQGTTVTVSS

SEQ ID NO: 41405 - protein, 239 aa, synthetic construct
DIQMTQSPSSLSASVGDRVTINCKASQDINSYLSWFQQKPGKAPKTLIYRANRLVDGVPSRFSGSGSGQDYTLTISSLQPEDFATYYCLQYDEFPLTFGGGTKVEIKGGGGSGGGGSGGGGSQVQLVQSGAEVKKPGASVKVSCKASGYTFTNYDINWVRQAPGQGLEWIGWIYPGDGSTKYNEKFKAKATLTADTSTSTAYMELRSLRSDDTAVYYCASGYEDAMDYWGQGTTVTVSS

SEQ ID NO: 41406 - protein, 241 aa, synthetic construct
DIVMTQTPLSLSVTPGQPASISCKSSQSLLDGDGKTYLNWLLQKPGQSPQRLIYLVSKLDSGVPDRFSGSGSGTDFTLKISRVEAEDVGVYYCWQGTHFPRTFGQGTKLEIKGGGGSGGGGSGGGGSQVQLVQSGAEVKKPGASVKVSCKASGYTFKDTYIHWVRQAPGQGLEWMGRIDPANGNTKYDPKFQGRVTMTRDTSISTAYMELSRLRSDDTAVYYCARRGGVDWGQGTLVTVSS

SEQ ID NO: 41407 - protein, 242 aa, synthetic construct
DIQMTQSPSSLSASVGDRVTITCKASQDVSTAVAWFQQKPGKAPKLLIYSPSYRYTGVPSRFSGSGSGTDFTLTISSLQPEDFTYYCQQLYSTPYTFGQGTKVEIKGGGGSGGGGSGGGGSEVQLVQSGAEVKKPGASVKVSCKASGYTFTDYYLDVVVRQAPGQGLEWIGRVNPYNGGTIYNQKFKGRVTLTRDTSTSTAYLELSSLRSEDTAVYYCARDHYRYDPLLDYWGQGTLVTVSS

SEQ ID NO: 41408 - protein, 248 aa, synthetic construct
DIQMTQSPSSLSASVGDRVTITCRASQSVSTSSYNYMHWYQQKPGKPPKLLIKYASNLESGVPSRFSGSGSGTDFTLTISSLQPEDFATYYCQHSWEIPLTFGQGTKVEIKGGGGSGGGGSGGGGSEVQLVQSGAEVKKPGASVKVSCKASGYSFTDYYMHWVRQAPGQGLEWIGRINPYNGAAFYSQNFKDRVTLTVDTSTSTAYLELSSLRSEDTAVYYCAIERGADLEGYAMDYWGQGTLVTVSS

SEQ ID NO: 41409 - protein, 246 aa, synthetic construct
EIVLTQSPATLSASPGERVTLTCRASSNVISSYVHWYQQKPGSSPRLFLYSTSNLASGVPSRFSGSGSGTDFTFTISSLEAEDAATYYCQQYSGYPLTFGQGTRLEIKGGGGSGGGGSGGGGSQVQLQESGPGLVKPSETLSLTCAVSGYSITSAYYWNWIRQPPGKGLEWIGYISYDGRNNYNPSLKNRITINPDTSKNQFSLQLNSVTPEDTAVYYCAREGDYDVGNYYAMDYWGQGTLVTVSS

SEQ ID NO: 41410 - protein, 246 aa, synthetic construct
EIVLTQSPATLSLSPGERATLSCRASSNVISSYVHWYQQKPGQAPRLLIYSTSNLASGIPARFSGSGSGTDFTLTISSLEPEDFAVYYCQQYSGYPLTFGQGTRLEIKGGGGSGGGGSGGGGSEVQLVESGGGLVQPGRSLRLSCAASGYSITSAYYWNWVRQAPGKGLEWVSYISYDGRNNYNPSLKNRFTISRDNAKKSLYLQMNSLRAEDTALYYCAKEGDYDVGNYYAMDYWGQGTTVTVSS

SEQ ID NO: 41411 - protein, 255 aa, synthetic construct
DVVMTQTPLSLPVSLGDQASISCRSSQSLVHSNGNTYLRWYLQKPGQSPKVLIYKVSNRVSGVPDRFSGSGSGTDFTLKINRVEAEDLGVYFCSQSTHVPWTFGGGTKLEIKSSADDAKKDAAKKDDAKKDDAKKDGGVKLDETGGGLVQPGGAMKLSCVTSGFTFGHYWMNWVRQSPEKGLEWVAQFRNKPYNYETYYSDSVKGRFTISRDDSKSSVYLQMNNLRVEDTGIYYCTGASYGMEYLGQGTSVTVST

SEQ ID NO: 41412 - protein, 251 aa, synthetic construct
QVQLVESGGNLVQPGGSLRLSCAASGFTFGSFSMSWVRQAPGGGLEWVAGLSARSSLTHYADSVKGRFTISRDNAKNSVYLQMNSLRVEDTAVYYCARRSYDSSGYWGHFYSYMDVWGQGTLVTVSGGGGSGGGGSGGGGSSVLTQPSSVSAAPGQKVTISCSGSTSNIGNNYVSWYQQHPGKAPKLMIYDVSKRPSGVPDRFSGSKSGNSASLDISGLQSEDEADYYCAAWDDSLSEFLFGTGTKLTVLG

SEQ ID NO: 41413 - protein, 242 aa, synthetic construct
QSVVTQPPSVSGAPGQRVTISCTGSSSNIGAGYDVHWYQQLPGTAPKLLIYGNSNRPSGVPDRFSGSKSGTSASLAITGLQAEDEADYYCQSYDSSLSGSYVFGTGTKLTVLGGGGGSGGGGSGGGGSEVQLVETGGNLVQPGASLRLSCAASGFSFSGTAMHWVRQAPGKGLEWVSTISSTGRSTYYRDSVKGRFTISRDNSKNTLYLQMNSLRGEDTAVYYCARVSFDYWGQGTLVTVSS

SEQ ID NO: 41414 - protein, 244 aa, synthetic construct
QSVVTQPASVSGSPGQSITISCTGTSSDVGGYNYVSWYQQHPGKAPKLMIYDVSKRPSGVSNRFSGSKSGNTASLTISGLQAEDEADYYCSSYTSSSTLVFGGGTKLTVLGGGGGSGGGGSGGGGSEVQLVESGGAFVQPGGSLRLSCAASGFTFSSYAMTWVRQAPGKGLEWVSTISGRGRSTFYADSVKGRFTISRDNSKNTLYLQMNSLRAEDTAVYYCARYYHAGAFDLWGQGTLVTVSS

SEQ ID NO: 41415 - protein, 246 aa, synthetic construct
DVVMTQSPSSLSASVGDRVTITCQSSLDISHYLNWYQQKPGKAPKLLIYDASNLETGVPSRFSGSGSGTHFTFTISSLQPEDFATYYCQQYDNLPLTFGGGTKLEIKRGGGGSGGGGSGGGGSQVQLVQSGGGVVQPGGSLRVSCAASGVTLSDYGMHWVRQAPGKGLEWVAFIRNDGSDKYYADSVKGRFTISRDNSEKTVSLQMSSLRAEDTAVYYCAKNGESGPLDYWYLDLWGRGTLVTVSS

SEQ ID NO: 41416 - protein, 253 aa, synthetic construct
DVMLTQTPLSLPVSLGDQASISCRSSQSILHSTGDTYLEWYLQKPGQSPKLLINKVSNRLSGVPDRFSGSGSGTDFTLKISRVEAEDLGVYYCFQGSHVPWTFGGGTKLEIKRADAAPTVSIFPGGGGSGGGGSGGGGSQVKLQQSGPSLVKPGASVKMSCKASGYTFTDFYMKWVKQSHGKSLEWIGDINPNIGDTFYNQKFKGKATLTVDKSSSTAYMQLNSLTSEDSAVYFCSVGYFDVWGAGTTVTVSS

SEQ ID NO: 41417 - protein, 253 aa, synthetic construct
LPVLTQPPSVSVAPGKTARITCGGNNIGSKSVHWYQQKPGQAPVLVVYDDSDRPSGIPERFSGSNSGNTATLTISRVEAGDEADYYCQVWDSSSDYVVFGGGTKLTVLGGGGSGGGGSGGGGSEVQLVQSGAEVKKPGESLKISCKGSGYSFTSYWIGWVRQMPGKGLEWMGIIYPGDSDTRYSPSFQGQVTISADKSISTAYLQWSSLKASDTAMYYCARQVWGWQGGMYPRSNWWYNLDSWGQGTLVTVSS

SEQ ID NO: 41418 - protein, 246 aa, synthetic construct
ELVMTQSPASLAVSLGQRATISCRASESVDSYGKSFMHWYQLKPGQPPKLLIYRASNLESGVPARFSGSGSRTDFTLTIDPVEADDAATYYCQQNNEDPWTFGGGTKLEIKGGGGSGGGGSGGGGSEVQLEQSGPELVKPGASVKMSCKASGYTFTNYYMKWVKQSHGKSLEWIGDLNPNNGDTFYNQKFKGKATLTVDKSSNTAYMQLNSLTSEDSAVYYCARTGRYEENAMDYWGQGTSVTVSS

SEQ ID NO: 41419 - protein, 240 aa, synthetic construct
DVVMTQSPSSLSASVGDRVTITCMASEDIYIRLAWYQQKPGNAPKLLIYAATSLETGVPSRFSGSGSGTDFTLTISSLQPEDFATYYCQQYWSSPWTFGGGTKVEIKGGGGSGGGGSGGGGSQVQLQESGPGLVKPSQTLSLTCTVSGYSITSDYTWNWIRQPPGNGLEWIGYITYSGSTSYNPSLKSRVLISVDTSKNQVSLKLSSVTAADTAVYYCARLGRRYTMDYWGQGTTVTVSS

SEQ ID NO: 41420 - protein, 244 aa, synthetic construct
EIVLTQSPATLSLSPGERATLSCSASSSVSYMYWYQQKPGQAPRLLIYRTSNLASGIPARFSGSGSGTDFTLTISSLEPEDFAVYYCQQYHSYPTTFGQGTKVEIKRTVGGGGSGGGGSGGGGSEVQLVESGGGLVQPGGSLRLSCAASGFSFNTYAMNWVRQAPGKGLEWVSHIRSKSNNFATYYADSVKDRFTISRDNAKNSLYLQMNSLRAEDTAVYYCARQGGDFPMDYWGQGTLVTVSS

SEQ ID NO: 41421 - protein, 240 aa, synthetic construct
DVVMTQSPSSLSASVGDRVTITCKASEDIYIRLAWYQQKPGKAPKLLIYAATSLETGVPSRFSGSGSGTDFTLTISSLQPEDFATYYCQQYWTTPWTFGGGTKVEIKGGGGSGGGGSGGGGSQVQLQESGPGLVKPSQTLSLTCTVSGYSITIDYTWNWIRQPPGKGLEWIGYITYSGSTDYNPSLKSRVLISVDTSKNQVSLKLSSVTAADTAVYYCARLGRRYALDYWGQGTTVTVSS

SEQ ID NO: 41422 - protein, 245 aa, synthetic construct
DIQLTQSPSFLSASVGDRVTITCRASQGISTDLNWYQQKPGKAPKLLIYAASNLESGVPSRFSGSGSGTEFTLTISSLQPEDFATYYCQQSYNWPYTFGGGTKVEIKRGGGGSGGGGSGGGGSEVQLVESGGGLVKPGGSLRLSCAASGFTFSNFEMNWVRQAPGKGLEWVSGISSNGRYINYADSVKGRFTISRDNAKNSLYLQMNSLRAEDTAVYYCARVVDFDQDYNGFDYWGQGTLVTVSS

SEQ ID NO: 41423 - protein, 243 aa, synthetic construct
DIQLTQSPSFLSASVGDRVTITCSLSLGISTWRDWFPPRLGRGLEPLTYAASTLQSGVPSRFSGSGSGTEFTLTISSLQPEDFATYYCQQLNSYPLTFGGGTKVEIKRGGGGSGGGGSGGGGSEVQLVESGGGLVKPGGSLRLSCAASGFTFSTYGMSWVRQAPGKGLEWVAYINNGSGYIYYADSVKGRFTISRDNAKNSLYLQMNSLRAEDTAVYYCARGQWWSGGDFDYWGQGTLVTVSS

SEQ ID NO: 41424 - protein, 245 aa, synthetic construct
DIQMTQTTSSLSASLGDRVTISCRASQDISNYLNWYQQKPDGTVKLLIYYTSILHSGVPSRFSGSGSGTDYSLTISNLEQEDFATYFCQQGNTLPWTFGGGTKLEIKAGGGGSGGGGSGGGGSEVQLVESGGGLVKPGGSLKLSCAASGFAFSIYDMSWVRQTPEKRLEWVAYISSGGGTYYPDTVKGRFTISRDNAKNTLYLQMSSLKSEDTAMYYCARHSGYGTHWGVLFAYWGQGTLVTVSA

SEQ ID NO: 41425 - protein, 255 aa, synthetic construct
DIVMTQSPDSLAVSLGERATINCKSSQSLLYRSNQKNYLAWYQQKPGQPPKLLIYWASTRESGVPDRFSGSGSGTDFTLTISSLQAEDVAVYYCQQYYNYPRTFGQGTKVEIKRTVGGGGSGGGGSGGGGSEVQLLESGGGLVQPGGSLRLSCAASGYSITSDYAWNWVRQAPGKGLEWVSYISNSGSTSYNPSLKSRFTISRDNSKNTLYLQMNSLRAEDTAVYYCAKERNYDYDDYYYAMDYWGQGTLVTVSS

SEQ ID NO: 41426 - protein, 248 aa, synthetic construct
DVVMTQSPLSLPVTLGQPASISCRSSQSLLHSSGNTYLEWYQQRPGQSPRPLIYKISTRFSGVPDRFSGSGSGTDFTLKISRVEAEDVGVYYCFQGSHVPYTFGGGTKVEIKRGGGGSGGGGSGGGGSQVQLVQSGAEVKKPGASVKVSCKASGLTIEDYYMHWVRQAPGQGLEWMGWIDPENGDTEYGPKFQGRVTMTRDTSINTAYMELSRLRSDDTAVYYCAVHNAHYGTWFAYWGQGTLVTVSS

SEQ ID NO: 41427 - protein, 240 aa, synthetic construct
DIQMTQSPSSLSASVGDRVTITCRASENIYSNLAWYQQKPGKAPKLLIYAATNLADGVPSRFSGSGSGTDFTLTISSLQPEDFATYYCQHFWGTPTFGQGTKVEIKRTVGGGGSGGGGSGGGGSEVQLVESGGGLVQPGGSLRLSCAASGFSLTNYGVHWVRQAPGKGLEWVSVIWSGGSTDYNAAFISRFTISADTSKNTAYLQMNSLRAEDTAVYYCARELIHAMDNWGQGTLVTVSS

SEQ ID NO: 41428 - protein, 247 aa, synthetic construct
DFVMTQSPLSLPVTPGEPASISCRSSQSIVHSNGNTYLEWYLQKPGQSPQLLIYKVSNRFSGVPDRFSGSGSGTDFTLKISRVEAEDVGVYYCFQGSHVPLTFGQGTKLEIKRGGGGSGGGGSGGGGSEVQLVESGAEVKKPGASVKVSCKASGYTFTSYWIHWVRQAPGQGLEWMGENDPSNGRTNYNEKFKNRVTLTVDTSISTAYMELSRLRSDDTAVYYCARGPNYFYSMDYWGQGTMVTVSS

SEQ ID NO: 41429 - protein, 240 aa, synthetic construct
DIQLTQSPSFLSASVGDRVTITCSARSSISFMYWYQQKPGKAPKLLIYDTSNLASGVPSRFSGSGSGTEFTLTISSLEAEDAATYYCQQWSSYPLTFGQGTKLEIKGGGGSGGGGSGGGGSQVQLVQSGAEVKKPGASVKVSCKASGYTFTGSWMNWVRQAPGQGLEWIGRIYPGDGETNYNGKFKDRVTITADKSTSTAYMELSSLRSEDTAVYYCARIYGNNVYFDVWGQGTTVTVSS

SEQ ID NO: 41430 - protein, 248 aa, synthetic construct
QLVLTQSPSASASLGSSVKLTCTLSSGHKTDTIDWYQQQPGKAPRYLMKLEGSGSYNKGSGVPDRFSGSSSGADWYLTISSLQSEDEADYYCGTDYPGNYLFGGGTQLTVLGGGGGSGGGGSGGGGSQEQLVESGGGLVQPGGSLRLSCAASGFTFSDYYMSWIRQAPGKGLEWVATIYPSSGKTYYADSAKGRLTISSDNAKDSLYLQMNSLRAEDTAVYYCTRDSYADDAALFDIWGQGTTVTVSS

SEQ ID NO: 41431 - protein, 247 aa, synthetic construct
QVQLQESGPGLVKPSQTLSLTCTVSGGSISSGGFYWSWIRQHPGKGLEWIGYIHHSGSTHYNPSLKSRVTISIDTSKNLFSLRLSSVTAADTAVYYCASLVYCGGDCYSGFDYWGQGTLVTVSSGGGGSGGGGSGGGGSDIQLTQSPSSLSASVGDRVSFTCQASQDINNFLNWYQQKPGKAPKLLIYDASNLETGVPSRFSGSGSGTDFTFTISSLQPEDIATYYCQQYGNLPFTFGGGTKVEIKR

SEQ ID NO: 41432 - protein, 245 aa, synthetic construct
QVQLQESGPGLVKPSETLSLTCTVSGGSISSYYWSWIRQPPGKGLEWIGYIYYSGSTNYNPSLKSRVTISVDTSKNQFSLKLSSVTAADTAVYYCVSLVYCGGDCYSGFDYWGQGTLVTVSSGGGGSGGGGSGGGGSDIQLTQSPSSLSASVGDRVSFTCQASQDINNFLNWYQQKPGKAPKLLIYDASNLETGVPSRFSGSGSGTDFTFTISSLQPEDIATYYCQQYGNLPFTFGGGTKVEIKR

SEQ ID NO: 41433 - protein, 250 aa, synthetic construct
QVTLKESGPVLVKPTETLTLTCTVSGFSLINARMGVSWIRQPPGKALEWLAHIFSNAEKSYRTSLKSRLTISKDTSKSQVVLTMTNMDPVDTATYYCARIPGYGGNGDYHYYGMDVWGQGTTVTVSSGGGGSGGGGSGGGGSDIQMTQSPSSLSASLGDRVTITCRASQGIRNDLGWYQQKPGKAPKRLIYASSTLQSGVPSRFSGSGSGTEFTLTISSLQPEDFATYYCLQHNNFPWTFGQGTKVEIKR

SEQ ID NO: 41434 - protein, 244 aa, synthetic construct
QIQLVESGGGVVQPGRSLRLSCVASGFTFKNYGMHWVRQAPGKGLEWVAVIWYDGSNEYYGDPVKGRFTISRDNSKNMLYLQMNSLRADDTAVYYCARSGIAVAGAFDYWGQGTLVTVSSGGGGSGGGGSGGGGSEIVLTQSPDTLSLSPGEKATLSCRASQSVSSSFLAWYQQKPGQAPSLLIYVASRRAAGIPDRFSGSGSGTDFTLTISRLEPEDFGMFYCQHYGRTPFTFGPGTKVDIKR

SEQ ID NO: 41435 - protein, 245 aa, synthetic construct
DIQLTQSPSFLSASVGDRVTITCRASQGISSYLAWYQQKPGKAPKLLIYAASTLQSGVPSRFSGSGSGTEFTLTISSLQPEDFATYYCQQVNSYPLTFGGGTKVEIKRGGGGSGGGGSGGGGSQLQLQESGPGLVKPSETLSLTCTVSGGSISSSTYYWGWIRQPPGKGLEWIGSIYFTGSTDYNPSLKSRVSISVDTSKNQFSLKLSSVTAADTAVYYCAKEDDSSGYYSFDYWGQGNLVTVSS

SEQ ID NO: 41436 - protein, 248 aa, synthetic construct
QSALTQPRSVSGSPGHSVTISCTGTSSDVGDYNYVSWYQQRPGKVPKLLIYDVSKRPSGVPDRFSGSKSGNTASLTISGLQAEDEAIYFCASYAGNYNVVFGGGTKLTVLGQGGGGSGGGGSGGGGSQVQLVQSGSELKKPGASVKVSCKASGYTFNTYAMNWVRQAPGQGLEWMGWINTNTGNPTYAQGFTGRFVFSLDTSVSTAYLQISSLKAEDTAVYYCARRYFDWLLGAFDIWGQGTMVTVSS

SEQ ID NO: 41437 - protein, 240 aa, synthetic construct
DIQMTQSPSSLSASVGDRVTITCSASQGINNYLNWYQQKPGKAPKLLIHYTSGLHAGVPSRFSGSGSGTDYTLTISSLQPEDVATYYCQQYSILPWTFGGGTKVEIKRGGGGSGGGGSGGGGSQVQLVQSGAEVKKPGSSVKVSCKASGYAFSSSWMNWVRQAPGQGLEWMGRIYPGDGNTHYAQKFQGRVTLTADKSTSTAYMELSSLRSEDTAVYYCGEGYLDPMDYWGQGTLVTVSS

SEQ ID NO: 41438 - protein, 243 aa, synthetic construct
EVQLVESGGGLVQPGGSLRLSCAASGYTFTTYWMHWVRQAPGKGLEWVGYIRPSTGYTEYNQKFKDRFTISADTSKNTAYLQMNSLRAEDTAVYYCARSRWLLDYWGQGTLVTVSGGGGSGGGGSGGGGSDIQMTQSPSSLSASVGDRVTITCKSSQSVLYSSNQKNYLAWFQQKPGKAPKLLIYWASTRESGVPSRFSGSGSGTDFTLTISSLQPEDFATYFCHQYLSSYTFGQGTKVEIKR

SEQ ID NO: 41439 - protein, 240 aa, synthetic construct
DIQMTQSPSSLSASVGDRVTITCRASQDISNYLNWYQQKPGKAPKLLIYYTSRLHSGVPSRFSGSGSGTDFTLTISSLQPEDFATYYCQQGNTLPYTFGQGTKVEIKRGGGGSGGGGSGGGGSEVQLVESGGGLVQPGGSLRLSCAASGFTFSDYFMSWVRQAPGKGLEWVATISNGGTYTYYPDSVKGRFTISRDNSKNTLYLQMNSLRAEDTAVYYCARFDGYIFDYWGQGTLVTVSS

SEQ ID NO: 41440 - protein, 247 aa, synthetic construct
DIQMTQSPSSLSASVGDRVTITCTASSRVSSSYLHWFQQKPGKAPKLLIYSTSNLASGVPSRFSGSGSGTDFTLTISSLQPEDFATYYCHQYHRSPYTFGQGTKVEIKRGGGGSGGGGSGGGGSEVQLVESGGGLVQPGGSLRLSCAASGYAFSNSWINWVRQAPGKGLEWVGQIYPGDYDTNYNGKFKGRFTISRDKSKNTAYLQMNSLRAEDTAVYYCARGGSIYYGNLGFFDVWGQGTLVTVSS

SEQ ID NO: 41441 - protein, 237 aa, synthetic construct
DIQMTQSPSSLSASVGDRVTITCSASSSVTYMYWYQQKPGKAPKLLIYDTSNLASGVPSRFSGSGSGTDYTLTISSLQPEDFATYYCQQWSNYPLTFGQGTKVEIKGGGGSGGGGSGGGGSQVQLVQSGAEVKKPGASVKVSCKASGYSFIEYTINWVRQAPGQGLEWIGNIDPYYGTTYYNQMFTGRATLTVDTSISTAYMELSRLRSDDTAVYYCARGSAWFPYWGQGTLVTVSS

SEQ ID NO: 41442 - protein, 237 aa, synthetic construct
EIVLTQSPSSLSASVGDRVTITCRASENIYSYLAWYQQKPGKAPKLLIYNTKTLGEGVPSRFSGSGSGTDFTLTISSLQPEDFATYYCQHHYGTPFTFGPGTKVDIKGGGGSGGGGSGGGGSQVQLVQSGAEVKKPGASVKVSCKASGYTFSDYWVHWVRQAPGQGLEWMGAIDGSDTFNDYSQKFKGRVTMTRDTSISTAYMELSRLRSDDTAVYYCARGGLLQYWGQGTLVTVSS

SEQ ID NO: 41443 - protein, 241 aa, synthetic construct
QVQLQQSGPELVKPGASVKISCKASGYAFSSSWMNWVKQRPGKGLEWIGRIYPGDEDTNYSGKFKDKATLTADKSSTTAYMQLSSLTSEDSAVYFCARSLLYGDYLDYWGQGTTLTVSSGGGGSGGGGSGGGGSQIVLTQSPAIMSASPGEKVTMTCSASSSVSYMHWYQQKSGTSPKRWIYDTSKLASGVPDRFSGSGSGTSYFLTINNMEAEDAATYYCQQWNINPLTFGAGTKLELKR

SEQ ID NO: 41444 - protein, 244 aa, synthetic construct
DIQMTQSSAYLSVSLGGRVTITCKASDHINNWLAWYQHKPGNAPRLLISGATTLETGVPSRFSGSGSGKDYTLSITSLQTEDVATYYCQQSWNTPWTFGGGTKLEIKRGGGGSGGGGSGGGGSQVQLQQSGAELVRPGSSVKISCKASGYAFSSYWVNWMKQRPGQGLEWIGQIYPGDGDTNYNGKFKGRATVTADKSSSTSYMQFSSLTSEDSAVYFCARSITTVVGCAMDYWGQGTSVTVSS

SEQ ID NO: 41445 - protein, 243 aa, synthetic construct; identical to SEQ ID NO: 20426

SEQ ID NO: 41446 - protein, 241 aa, synthetic construct
EIVLTQSPGTLSLSPGERATLSCRASQSVSSSYLAWYQQKPGQAPRLLIYGASSRATGIPDRFSGSGSGTDFTLTISRLEPEDFAVYYCQQYHHSPLTFGGGTKVEIKRGGGGSGGGGSGGGGSEVQLVESGGGLVQPGGSLRLSCAASGFTFSGRSMNWVRQAPGKGLEWVSYISSDSRTIYYADSVKGRFTISRDNAKNSLYLQMNSLRAEDTAVYYCARGGHGYFDLWGRGTLVTVSS

SEQ ID NO: 41447 - protein, 244 aa, synthetic construct
EIVLTQSPGTLSLSPGERATLSCRASQSVSSDYLAWYQQKPGQAPRLLIYGASRRATGIPDRFSGSGSGTDFTLTISRLEPEDFAVYYCQQYVSYWTFGGGTKVEIKRGGGGSGGGGSGGGGSQVQLVESGGGVVQPGRSLRLSCAASGFTFSSYGMHWVRQAPGKGLEWVAGIWWDGSNEKYADSVKGRFTISRDNSKNTLYLQMNSLRAEDTAVYYCAKEAPYYAKDYMDVWGKGTTVTVSS

SEQ ID NO: 41448 - protein, 244 aa, synthetic construct
DIQMTQSPSSLSASVGDRVTITCRASQDVNTAVAWYQQKPGKAPKLLIYSASFLYSGVPSRFSGSRSGTDFTLTISSLQPEDFATYYCQQHYTTPPTFGQGTKVEIKRTGGGGSGGGGSGGGGSEVQLVESGGGLVQPGGSLRLSCAASGFNIKDTYIHWVRQAPGKGLEWVARIYPTNGYTRYADSVKGRFTISADTSKNTAYLQMNSLRAEDTAVYYCSRWGGWGFYAMDYWGQGTLVTVSS

SEQ ID NO: 41449 - protein, 239 aa, synthetic construct
QVQLVESGGGLVKPGGSLRLSCAASGFTFSDYYMTWIRQAPGKGLEWISYISSSGSTIYYADSVKGRFTISRDNAKNSLYLQMNSLRAEDTAVYYCARDRNSHFDYWGQGTLVTVSSGGGGSGGGGSGGGGSDIQMTQSPSSVSASVGDRVTITCRASQGITRWLAWYQQKPGKAPKLLIYAASVLQSGVPSRFSGSGSGTDFTLTISSLQPEDFATYYCQQSNSFPRTFGQGTKVEIK

SEQ ID NO: 41450 - protein, 239 aa, synthetic construct
QVQLVESGGGLVKPGGSLRLSCAASGFTFSDHYMSWIRQAPGKGLEWFSYISSSGGIIYYADSVKGRFTISRDNAKNSLYLQMNSLRAEDTAVYYCARDVGSHFDYWGQGTLVTVSSGGGGSGGGGSGGGGSDIQMTQSPSSVSASVGDRVTITCRASQDISRWLAWYQQKPGKAPKLLISAASRLQSGVPSRFSGSGSGTDFTLTISSLQPEDFAIYYCQQAKSFPRTFGQGTKVEIK

SEQ ID NO: 41451 - protein, 251 aa, synthetic construct
QVQLVESGGGVVQSGRSLRLSCAASGFTFRNYGMHWVRQAPGKGLEWVAVIWYDGSDKYYADSVRGRFTISRDNSKNTLYLQMNSLRAEDTAVYYCARDGYDILTGNPRDFDYWGQGTLVTVSSGGGGSGGGGSGGGGSDTVMTQTPLSSHVTLGQPASISCRSSQSLVHSDGNTYLSWLQQRPGQPPRLLIYRISRRFSGVPDRFSGSGAGTDFTLEISRVEAEDVGVYYCMQSTHVPRTFGQGTKVEIK

SEQ ID NO: 41452 - protein, 244 aa, synthetic construct
EVQLVESGGGLVQPGGSLRLSCAASGFPFSSYDMHWVRQATGKGLEWVSAIGTAGATYYPGSVKGRFTISRENAKNSLYLQMNSLRAGDTAVYYCARGDYVWGTYRPLFDYWGQGTLVTVSSGGGGSGGGGSGGGGSDIQLTQSPSFLSASVGDRVTITCWASQGINNYLAWYQQKPGKAPKLLIYAASTLQTGVPSRFSGSGSGTEFTLTISSLQPEDFATYYCQQLNSYPLTFGGGTKVEIK

SEQ ID NO: 41453 - protein, 241 aa, synthetic construct
QVQLQESGPGLVKPSETLSLTCTVSGASISSFYWSWIRQPPGKGLEWIGYIYYSGTTNYNPSLKSRVTISVDTSKNQFSLKLSSVTAADTAVYYCARIAVAGFFFDYWGQGTLVTVSSGGGGSGGGGSGGGGSEIVLTQSPGTLSLSPGERATLSCRASQSVNKNYLAWYQQKPGQAPRLLIYGASSRATGIPDRFSGSGSGTDFTLTISRLEPEDFAVYYCQQYDRSPLTFGGGTKVEIK

SEQ ID NO: 41454 - protein, 250 aa, synthetic construct
QVQLVQSGAEVKKPGASVKVSCKASGYTFTNYYMHWVRQAPGLGLEWMGIINPSDGSTSYAQKFQGRVTMTRDTSTNTVYMDLSSLRSEDTAVYYCARGGNSAFYSYYDMDVWGQGTTVTVSSGGGGSGGGGSGGGGSDVVMTQTPLSLPVTLGQPASISCRSSQSLVYRDGNTYLSWFQQRPGQSPRRLIYKVSNWQSGVPDRFSGGGSGTDFTLKISRVEAEDVGVYYCMQGTHWPPTFGQGTKVEIK

SEQ ID NO: 41455 - protein, 237 aa, synthetic construct
QVQLQQSGPELVKPGASVRISCKASGYTFTTYYIHWVKQRPGQGLEWIGWIYPGNVNTNYNEKFKGKATLTADKSSSTAYMQLTSLTSEDSAVYFCARGVYYFDYWGQGTILTVSSGGGGSGGGGSGGGGSIVMTQTPKFLLVSAGDRVTITCKASQSVNNDVSWFQQKPGQSPTLLIYYASNRYTGVPDRFTGSGYGTDFTFTISTVQAEDLAVYFCQQDYSSPYTFGGGTKLEIK

SEQ ID NO: 41456 - protein, 240 aa, synthetic construct
QVQLQESGPGLVKPSQTLSLTCTVSGGSINNNNYYWTWIRQHPGKGLEWIGYIYYSGSTFYNPSLKSRVTISVDTSKTQFSLKLSSVTAADTAVYYCAREDTMTGLDVWGQGTTVTVSSGGGGSGGGGSGGGGSDIQMTQSPSSLSASVGDRVTITCRASQSINNYLNWYQQKPGKAPTLLIYAASSLQSGVPSRFSGSRSGTDFTLTISSLQPEDFAAYFCQQTYSNPTFGQGTKVEVK

SEQ ID NO: 41457 - protein, 245 aa, synthetic construct
SYELTQPPSVSVSPGQTASITCSGDKLGDKYASWYQQKPGQSPVLVIYQDNRRPSGIPERFSGSNSGNTATLTISGTQAMDEADYYCQAWDSDTYVFGTGTKVTVLGQGGGGSGGGGSGGGGSEVQLVQSGAEVKKPGASVKVSCKASGDTFKRYYVHWVRQAPGQGLEWMGIINPSGVSTTYAQKFQGRVTMTRDTSTSTVYMELSSLRSEDTAVYYCAEVRGSGFNYFGMDVWGQGTLVTVSS

SEQ ID NO: 41458 - protein, 244 aa, synthetic construct
EVQLLESGGGLVQPGGSLRLSCAASGFTFSSYAMSWVRQAPGKGLEVVVSAISGGGGRTYYADSVKGRFTISRDNSKNTLYLQMNSLRAEDTAVYYCAREEMAFRAYRFDIWGQGTLVTVSSGGGGSGGGGSGGGGSDIQMTQSPSSLSASVGDRVTITCRASQSISSYLNWYQQKPGKAPKLLIYAASSLQSGVPSRFSGSGSGTDFTLTISSLQPEDFATYYCQQSYITPLTFGGGTKVEIK

SEQ ID NO: 41459 - protein, 252 aa, synthetic construct
DIVLTQSPASLAVSLGQGATISCRASKSVSTSGYTYMHWYQQKPGQPPKLLIYLASNLESGVPARFSGSGSGTDFTLNIHPVEEEDAATYYCQHSGELPPSFGGGTKLEIKRAGGGGSGGGGSGGGGSEVQLVESGGDLVKPGGSLKLSCAVSGFTFSSYGMSWVRQTPDKRLEWVATVSSGGTYTYYPDSVKGRFTISRDNAKNTLYLQMSSLKSEDSAMYYCARHRGNYYATYYYAMDYWGQGTSVTVSS

SEQ ID NO: 41460 - protein, 246 aa, synthetic construct
DIQMTQSPSSLSASVGDRVTITCSASQGIRNYLNWYQQKPGKVPKLLIYYTSRLHSGVPSRFSGSGSGTDFTLTISSLQPEDVATYYCQQYGKLPYTFGQGTKLEIKRTVAAGGGGSGGGGSGGGGSEVQLVESGGGLVQPGGSLRLSCAASGFTFSDAWMDWVRQAPGKGLEWVGEIRSKVNNHETYYAESVKGRFTISRDDSKNSLYLQMNSLKTEDTAVYYCARNDYFDYWGQGTTVTVSSAS

SEQ ID NO: 41461 - protein, 254 aa, synthetic construct
EVQLQESGAEVKKPGSSVKVSCKASGFNIKDTYMHWVRQAPGQGLEWMGRIDPANGNSKYVPKFQGRVTITADESTSTAYMELSSLRSEDTAVYYCAPFGYYVSDYAMAYWGQGTTVTVSSASGGGGSGGGGSGGGGSDIVMTQSPDSLAVSLGERATINCRAGESVDIFGVGFLHWYQQKPGQPPKLLIYRASNLESGVPDRFSGSGSGTDFTLTIRPLQAEDVAVYYCQQTNEDPYTFGQGTKLEIKRTVAA

SEQ ID NO: 41462 - protein, 247 aa, synthetic construct
QVQLVQSGAEVKKPGSSVKVSCKASGGTFSSYAISWVRQAPGQGLEWMGLIIPRYGKARYAQKFQGRVTITADESTSTAYMELSSLRSEDTAVYYCARNWPYYYMDFWGQGTLVTVSSASGGGGSGGGGSGGGGSDIVLTQSPATLSLSPGERATLSCRASQNIVFNLAWYQQKPGQAPRLLIYDASNRATGVPARFSGSGSGTDFTLTISSLEPEDFAVYYCQQKKSMPLTFGQGTKVEIKRTVAA

SEQ ID NO: 41463 - protein, 250 aa, synthetic construct
EVQLVESGGGLVKPGGSLRLSCAASGFTFSNAWMSWVRQAPGKGLEWVGRIKSKTEGGTTDYAAPVKGRFTISRDDSKNTLYLQMNSLKTEDTAVYYCTTPYEWSWYDYWGQGTLVTVSSASGGGGSGGGGSGGGGSQTVVTQEPSLTVSPGGTVTLTCGSSTGAVTTSNYANWVQQKPGQAPRGLIGGTNKRAPGTPARFSGSLLGGKAALTLSGVQPEDEAEYYCALWYSNLWVFGGGTKLTVLTVAA

SEQ ID NO: 41464 - protein, 250 aa, synthetic construct
QVQLVQSGAEVKKPGASVKVSCKASGYTFTSYYMHWVRQAPGQGLEWMGIINPSGGSTSYAQKFQGRVTMTHDTSTSTVYMELSSLRSEDTAVYYCARSFFTGFHLDYWGQGTLVTVSSASGGGGSGGGGSGGGGSEIVLTQSPGTLSLSPGERATLSCRASQSVSSSYLAWYQQKPGQAPRLLIYGASSRATGIPDRFSGSGSGTDFTLTISRLEPEDFAVYYCQQYTNEHYYTFGQGTKVEIKRTVAA

SEQ ID NO: 41465 - protein, 256 aa, synthetic construct
EIVLTQSPATLSLSPGERATLSCSVSSSISSSNLHWYQQKPGQAPRLLIYGTSNLASGIPARFSGSGSGTDFTLTISSLEPEDFAVYYCQQWSSYPHTFGGGTKVEIKRTVAAGGGGSGGGGSGGGGSQVQLVQSGAEVKKPGASVKVSCKASGYTFTNYLIEWVRQAPGQGLEWMGLINPGSGGTNYNEKFKGRVTMTTDTSTSTAYMELRSLRSDDTAVYYCARRSPLGSWIYYAYDGVAYWGQGTLVTVSSAS

SEQ ID NO: 41466 - protein, 241 aa, synthetic construct
DIQMTQSPSSLSASVGDRVTITCKAGQNVGTSVAWYQQKPGKAPKLLIYSASYRYSGVPSRFSGSGSGTDFTLTISSLQPEDFATYYCQQYITYPYTFGQGTKVEIKRTVAAGGGGSGGGGSGGGGSEVQLVESGGGLVQPGGSLRLSCAASGFTFSRYWMSWVRQAPGKGLEWVAEINPDSSTIQYTPSLKARFTLSVDRSKNTLYLQMNSLRAEDTAVYYCARPAYWGQGTLVTVSSAS

SEQ ID NO: 41467 - protein, 248 aa, synthetic construct
DIQMTQSPSSLSASVGDRVTITCSASQDIGNFLNWYQQKPGKAPKLLIYYTSSLYSGVPSRFSGSGSGTDFTLTISSLQPEDFATYYCQQYSKLPLTFGQGTKLEIKRTVAAGGGGSGGGGSGGGGSQVQLVQSGAEVKKPGASVKVSCKASGYTFTGYNIHWVRQAPGQRLEWMGAIYPGNGDTSYKQKFRGRVTITRDTSASTAYMELSSLRSEDTAVYYCARGETARATFAYWGQGTLVTVSSAS

SEQ ID NO: 41468 - protein, 112 aa, synthetic construct; identical to SEQ ID NO: 40926

SEQ ID NO: 41469 - protein, 107 aa, synthetic construct; identical to SEQ ID NO: 40927

SEQ ID NO: 41470 - protein, 108 aa, synthetic construct; identical to SEQ ID NO: 40928

SEQ ID NO: 41471 - protein, 108 aa, synthetic construct; identical to SEQ ID NO: 40929

SEQ ID NO: 41472 - protein, 108 aa, synthetic construct; identical to SEQ ID NO: 40930

SEQ ID NO: 41473 - protein, 108 aa, synthetic construct; identical to SEQ ID NO: 40931

SEQ ID NO: 41474 - protein, 112 aa, synthetic construct; identical to SEQ ID NO: 40932

SEQ ID NO: 41475 - protein, 112 aa, synthetic construct; identical to SEQ ID NO: 40933

SEQ ID NO: 41476 - protein, 109 aa, synthetic construct; identical to SEQ ID NO: 40934

SEQ ID NO: 41477 - protein, 242 aa, synthetic construct
EIVLTQSPATLSLSPGERATLSCRASQSVSSYLAWYQQKPGQAPRLLIYDASNRATGIPARFSGSGSGTDFTLTISSLEPEDFAVYYCQQRSNWPLTFGQGTKVEIKGGGGSGGGGSGGGGSQVQLVQSGAEVKKPGSSVKVSCKASGGTFSTYAIHWVRQAPGQGLEWMGRIIPIEGRAYYAQKFQGRVTITADESTSTAYMELSSLRSEDTAVYYCARGRYSYRYWFDYWGQGTLVTVSS

SEQ ID NO: 41478 - protein, 250 aa, synthetic construct
DIVMTQSPDSLAVSLGERATINCKSSQSVLYSSNNKNYLAWYQQKPGQPPKLLIYWASTRESGVPDRFSGSGSGTDFTLTISSLQAEDVAVYYCQQYYSTPLTFGQGTKVEIKGGGGSGGGGSGGGGSEVQLVQSGAEVKKPGESLKISCKGSGYSFTSYWIGWVRQMPGKGLEWMGIIYPGDSDTRYSPSFQGQVTISADKSISTAYLQWSSLKASDTAMYYCARDVGRWAPGGFLDYWGQGTLVTVSS

SEQ ID NO: 41479 - protein, 241 aa, synthetic construct
DIQMTQSPSSLSASVGDRVTITCRASQSINKWLNWYQQKPGKAPKLLIYAASSLQSGVPSRFSGSGSGTDFTLTISSLQPEDFATYYCQQDYNFPYTFGQGTKVEIKRGGGGSGGGGSGGGGSQVQLVQSGAEVKKPGSSVKVSCKASGGTFSSYGISWVRQAPGQGLEWMGWISAIFGTANYAQKFQGRVTITADESTSTAYMELSSLRSEDTAVYYCARGVASWYLDYWGQGTLVTVSS

SEQ ID NO: 41480 - protein, 241 aa, synthetic construct
DIQLTQSHKFLSTSVGDRVSITCKASQDVYNAVAWYQQKPGQSPKLLIYSASSRYTGVPSRFTGSGSGPDFTFTISSVQAEDLAVYFCQQHFRTPFTFGSGTKLEIKGGGGSGGGGSGGGGSQVQLQQSGPELKKPGETVKISCKASGYPFTNYGMNWVKQAPGQGLKWMGWINTSTGESTFADDFKGRFDFSLETSANTAYLQINNLKSEDMATYFCARWEVYHGYVPYWGQGTTVTVSS

SEQ ID NO: 41481 - protein, 240 aa, synthetic construct
DIQLTQSPSSLSASVGDRVTITCKASQDVGTSVAWYQQKPGKAPKLLIYWTSTRHTGVPSRFSGSGSGTDFTFTISSLQPEDIATYYCQQYSLYRSFGQGTKVEIKGGGGSGGGGSGGGGSEVQLVESGGGVVQPGRSLRLSCSASGFDFTTYWMSWVRQAPGKGLEWIGEIHPDSSTINYAPSLKDRFTISRDNAKNTLFLQMDSLRPEDTGVYFCASLYFGFPWFAYWGQGTPVTVSS

SEQ ID NO: 41482 - protein, 244 aa, synthetic construct
DIQLTQSPSSLSASVGDRVTITCSTSSSVSYMHWYQQKPGKAPKLLIYSTSNLASGVPSRFSGSGSGTDFTFTISSLQPEDIATYYCHQWSSYPTFGQGTKVEIKGGGGSGGGGSGGGGSGVHSQVQLQESGPGLVRPSQTLSLTCTVSGFTISSGYSWHWVRQPPGRGLEWIGYIQYSGITNYNPSLKSRVTMLVDTSKNQFSLRLSSVTAADTAVYYCAREDYDYHWYFDVWGQGTTVTVSS

SEQ ID NO: 41483 - protein, 244 aa, synthetic construct; identical to SEQ ID NO: 8782

SEQ ID NO: 41484 - protein, 247 aa, synthetic construct
EIVLTQSPGTLSLSPGERATLSCRASQSVSSDYLAWYQQKPGQAPRLLIYGASSRATGIPDRFSGSGSGTDFTLTISRLPEDFAVYYCQQYVSYWTFGGGTKVEIKRTVAAGGGGSGGGGSGGGGSQVQLVESGGGVVQPGRSLRLSCAASGFTFSSYAMHWVRQAPGKGLEWVAVISYDGSNKYYADSVKGRFTISRDNSKNTLYLQMNSLRAEDTAVYYCAKEAPYYAKDYMDVWGKGTTVTVSS

SEQ ID NO: 41485 - protein, 246 aa, synthetic construct
SYELIQPPSAAVTLGNTVSLTCVGDELPKRYAYWYQQKPDQSIVRVIYEDSVRPPGISDRFSGSSSGTTATLTIRDAQNEDEADYYCQSTYGDDKLYIFGGGTKLTVLGGGGGSGGGGSGGGGSEVQLVETGGGLVQPGKSLELTCATSGFTFNTAWMHWVRQSPDKRLEWIARIKDTSNNYATDYVESMKGRFTISRDDSKGSVNLQMNSLKEEDTATYYCTTDFYDGTYYWNYWGQGVMVTVSS

SEQ ID NO: 41486 - protein, 250 aa, synthetic construct
SVIELTQSPKFMSTSVGDRVNVTYKASQNVGTNVAWFQQKPGQSPKVLIYSASYRYSGVPDRFTGSGSGTDFTLTISNVQSEDLAEYFCQQYHTYPLTFGGGTKLEIKRGGGGSGGGGSGGGGSRMAQVQLQQSGAELARPGASVKMSCKASGYTFTTYTIHWVRRRPGHDLEWIGYINPSSGCSDYNQNFKGKTTLTADKSSNTAYMQLNSLTSEDSAVYYCARRADYGNYEYTWFAYWGQGTTVTVSS

SEQ ID NO: 41487 - protein, 241 aa, synthetic construct
DIQMTQSPSSVSASVGDRVTITCRASQSVSSYLNWYQQKPGKAPKLLIYAASSLQSGVPSRFSGSGSGTDFTLTISSLQPEDFATYYCQQSYSTPWTFGQGTKLEIKRGGGGSGGGGSGGGGSEVQLVESGGGLVQPGRSLRLSCAASGFTFDDYGMHWVRQAPGKGLEWVSGISWNSGSIGYADSAKGRFTISRDNSKNTLYLQMNSLRAEDTAVYYCAKRGNSNSFDYWGQGTLVTVSS

SEQ ID NO: 41488 - protein, 248 aa, synthetic construct
QSALTQPRSVSGSPGQSVTISCTGTSSDVGSYNYVSWYQQSPGKAPKLMIYDVSNRPSGVSNRFSGSKSGNTASLTISGLQSEDEADYYCTSYGSYDIPVIFGGGTKVEIKGGGGSGGGGSGGGGSQMQLVQSGAEVKKPGSSVKVSCKASGGTFSSYAISWVRQAPGQGLEWMGGIIPIFGTANYAQKFQGRVTITADKSTSTAYMELSSLRSDDTAVYYCARDELWATNYYYMDVWGKGTLVTVSS

SEQ ID NO: 41489 - protein, 241 aa, synthetic construct
DVVMTQSPSSLSASVGDRVTITCKASQSVSSYLNWYQQKPGKAPKLLIYAASSLETGVPSRFSGSGSGTDFTLTISSLQPEDFATYYCQQSYSTPWTFGQGTKVEIKRGGGGSGGGGSGGGGSEVQLVESGGGLVRPGGSLRLSCAASGFTFDDYGMSWVRQAPGKGLEWVSGISWNSGSIGYADSVKGRFTISRDNAKNSLYLQMNSLRAEDTALYYCAKRGNSNSFDYWGQGTTVTVSS

SEQ ID NO: 41490 - protein, 241 aa, synthetic construct
DIQMTQSPSSVSASVGDRVTITCRASQSISSYLNWYQQKPGKAPKLLIYAASSLQSGVPSRFSGSGSGTDFTLTISSLQPEDFATYYCQQSYSTPWTFGQGTKVEIKRGGGGSGGGGSGGGGSEVQLVESGGGLVQPGRSLRLSCAASGFTFDDYAMHWVRQAPGKGLEWVSGISWNSGSIGYADSAKGRFTISRDNSKNTLYLQMNSLRAEDTAVYYCAKRGNSNSFDYWGQGTLVTVSS

SEQ ID NO: 41491 - protein, 241 aa, synthetic construct
DTVLTQSPALAVSPGERVTISCKASESVSTRMHWYRQKPGQQPKLLIYKTSNLASGVPARFSGSGSGTDFTLTIDPVEADDTATYFCQQSWNGPLTFGSGTKLEIKRGGGGSGGGGSGGGGSQVQLKESGPGLVQPSQTLSLTCTVSGLSLTSNGVSWIRQPPGKGLEWLGVIWSNGGTDYNSAIKSRLSFSRDTSKSQVFLKMNSLQTEDTAMYFCARPRYNSGYFFDYWGQGVMVTVSS

SEQ ID NO: 41492 - protein, 253 aa, synthetic construct
DLVMTQSPFSLAVSEGEMVTIKCKSSQSLLSSRHQKNFLAWYRQKPGQSPKLLIYHASTRQSGVPDRFIGSGSGTDFTLTISDVQAEDLADYYCLQHYTSPYTFGAGTKLELKRGGGGSGGGGSGGGGSQVQLKESGPGLVQPSQTLSLTCTVSGFSLTSYHVHWVRQPPGKGLEWMGVMWSDGDTLYNSALKSRLSISRDTSKSQVLLQMDSLQSEDTATYYCARLQVFGYPGIRDYVMDAWGQGASVTVSS

SEQ ID NO: 41493 - protein, 254 aa, synthetic construct
DIQLTQSPSFLSASVGDRVTITCRASQDISSYLAWYQQKPGNAPKLLIYAASLLQSGVPSRFSAFGSGTEFTLTISSLQPEDFATYYCQHLKSYPLFTFGPGTKVDIKRGGGGSGGGGSGGGGSEVQLVESGGRVVRPGGSLRLSCAASGFTFDDYGMSWVRQPPGKGLEFVSGLNWNGDITAFTDSVKGRFTISRDNVKSSLYLQMNSLRADDTAFYYCARVRTWGDYTTGEEIINSWYFDLWGRGTLVTVSS

SEQ ID NO: 41494 - protein, 242 aa, synthetic construct
ELQMTQSPSSLSASVGDRVAITCRASQSISSHLNWYQQKPGKAPKLLIYAASSLQSGVPSRFSGSGSGTDFTLTISSLQPEDFATYYCQQSYSTPYTFGQGTKLEIKGGGGSGGGGSGGGGSEVQLVESGGGLVQPGGSLRLSCAASGFTFSSYWMSWVRQAPGKGLEWVANIKQDGSEKYYVDSVKGRFTISRDNAKNSLYLRMNSLRAEDTAVYYCARAWGYSSYYFDYWGQGTLVTVSP

SEQ ID NO: 41495 - protein, 238 aa, synthetic construct
DIVMTQSHKFMSTSVGDRVSIICKASQDVGTAVDWYQQKPGQSPKLLIYWASTRHTGVPDRFTGSGSGTDFTLAITNVQSEDLADYFCQQYNSYPLTFGAGTKLEIKRGGGGSGGGGSGGGGSEVQLQQSGPELVKPGTSVRISCKTSGYTFTEYTIHWVKQSHGKSLEWIGNINPNNGGTTYNQKFEDKATLTVDKSSSTAYMELRSLTSEDSAVYYCAAGWNFDYWGQGTTLTVSS

SEQ ID NO: 41496 - protein, 238 aa, synthetic construct; identical to SEQ ID NO: 8781

SEQ ID NO: 41497 - protein, 238 aa, synthetic construct
DIQMTQSPSSLSASVGDRVTITCKASQDVGTAVDWYQQKPGKAPKLLIYWASTRHTGVPSRFSGSGSGTDFTLTISSLQPEDFATYYCQQYNSYPLTFGQGTKVEIKRGGGGSGGGGSGGGGSEVQLQQSGPELVKPGTSVRISCKTSGYTFTEYTIHWVKQSHGKSLEWIGNINPNNGGTTYNQKFEDKATLTVDKSSSTAYMELRSLTSEDSAVYYCAAGWNFDYWGQGTTLTVSS

SEQ ID NO: 41498 - protein, 238 aa, synthetic construct
DIVMTQSHKFMSTSVGDRVSIICKASQDVGTAVDWYQQKPGQSPKLLIYWASTRHTGVPDRFTGSGSGTDFTLAITNVQSEDLADYFCQQYNSYPLTFGAGTKLEIKRGGGGSGGGGSGGGGSEVQLVESGGGLVQPGGSLRLSCAASGYTFTEYTIHWVRQAPGKGLEWVANINPNNGGTTYNQKFEDRFTISRDNSKNTLYLQMNSLRAEDTAVYYCARGWNFDYWGQGTLVTVSS

SEQ ID NO: 41499 - protein, 244 aa, synthetic construct
EIVLTQSPATLSLSPGERATLSCSATSSVSYIHWYQQKPGQAPRLLIYSTSNLASGIPARFSGSGSGTDFTLTIGRLEPEDFAVYYCQQRSSSPFTFGQGTKVEIKRGGGGSGGGGSGGGGSEVQLVESGGGLVKPEGSLRLSCAASGFTFSRYGMSWVRQAPGKGLEWVSTISGGGTYIYYPDSVKGRFTISRDNAKNSLFLQMNSLRAEDTAVYYCARDNYGRNYDYGMDYWGQGTLVTVSS

SEQ ID NO: 41500 - protein, 243 aa, synthetic construct
QIVLTQSPAIMSASPGEEVTLTCSATSSVSYIHWFQQRPGTSPKLWIYSTSNLASGVPVRFSGSGYGTSYSLTISRMEAEDAATYYCQQRSSSPFTFGSGTKLEIKGGGGSGGGGSGGGGSEVKVVESGGDLVKPGGSLKLSCVVSGFTFSRYGMSWVRQTPGKRLEWVATISGGGTYIYYPDSVKGRFTISRDNAKNTLYLQMSSLKSEDTAMYHCTRDNYGRNYDYGMDYWGQGTSVTVSS

SEQ ID NO: 41501 - protein, 249 aa, synthetic construct
DIVLTQSPASLAVSPGQRATITCRASKSVSTSGYSYMHWYQQKPGQPPKLLIYLASNLESGVPARFSGSGSGTDFTLTINPVEANDTANYYCQHSRELPFTFGGGTKVEIKRTGGGGSGGGGSGGGGSEVQLVESGGGLVKPGGSLRLSCAASGFTFSGYAMSWVRQAPGKGLEWVSTISSGGTYIYYPDSVKGRFTISRDNAKNSLYLQMNSLRAEDTAVYYCARLGGDNYYEYFDVWGKGTTVTVSS

SEQ ID NO: 41502 - protein, 240 aa, synthetic construct
DIQMTQSPSSLSVSVGDRVTITCKASQNVRTVVAWYQQKPGLAPKTLIYLASNRHTGVPSRFSGSGSGTDFTFTISSLQPEDIATYFCQQHWSYPLTFGQGTKVEVKRGGGGSGGGGSGGGGSEVQLLESGGGLVQPGGSLRLSCAASGFAFSTYDMSWVRQAPGKGLEWVATISSGGSYTYYLDSVKGRFTISRDSSKNTLYLQMNSLQAEDSAIYYCAPTTVVPFAYWGQGTLVTVSS

SEQ ID NO: 41503 - protein, 244 aa, synthetic construct
DIQMTQSPSSLSASVGDRVTITCKSSQSLLYSSNQKNYLAWFQQKPGKAPKLLIYWASTRESGVPSRFSGSGSGTDFTLTISSLQPEDFATYFCHQYLSSYTFGQGTKVEIKRGGGGSGGGGSGGGGSEVQLVESGGGLVQPGGSLRLSCAASGYTFTSYWLHWVRQAPGKGLEWVGYIRPSTGYTEYNQKFKDRFTISADTSKNTAYLQMNSLRAEDTAVYYCARSRWLLDYWGQGTLVTVSS

SEQ ID NO: 41504 - protein, 243 aa, synthetic construct
DIQMTQSPSSLSASVGDRVTITCKSSQSVLYSSNQKNYLAWFQQKPGKAPKLLIYWASTRESGVPSRFSGSGSGTDFTLTISSLQPEDFATYFCHQYLSSYTFGQGTKVEIKRGGGGSGGGGSGGGGSEVQLVESGGGLVQPGGSLRLSCAASGFTFTTYWMHWVRQAPGKGLEWVGYIRPSTGYTEYNQKFKDRFTISADTSKNTAYLQMNSLRAEDTAVYYCARSRWLLDYWGQGTLVTVS

SEQ ID NO: 41505 - protein, 243 aa, synthetic construct
EVQLVESGGGLVQPGGSLRLSCAASGYTFTTYWMHWVRQAPGKGLEWVGYIRPSTGYTEYNQKFKDRFTISADTSKNTAYLQMNSLRAEDTAVYYCARSRWLLDYWGQGTLVTVSGGGGSGGGGSGGGGSDIQMTQSPSSLSASVGDRVTITCKSSQSLLYSSNQKNYLAWFQQKPGKAPKLLIYWASTRESGVPSRFSGSGSGTDFTLTISSLQPEDFATYFCHQYLSSYTFGQGTKVEIKR

SEQ ID NO: 41506 - protein, 240 aa, synthetic construct; identical to SEQ ID NO: 8780

SEQ ID NO: 41507 - protein, 240 aa, synthetic construct
DIQMTQSPSSLSASVGDRVTITCRASQDISSYLNWYQQKPGKAPKLLIYYTSRLHSGVPSRFSGSGSGTDFTLTISSLQPEDFATYYCQQGNTLPYTFGQGTKVEIKRGGGGSGGGGSGGGGSEVQLVESGGGLVQPGGSLRLSCAASGFTFSDYFMSWVRQAPGKGLEWVATISNGGTYTYYPDSVKGRFTISRDNSKNTLYLQMNSLRAEDTAVYYCARFDGYIFDYWGQGTLVTVSS

SEQ ID NO: 41508 - protein, 245 aa, synthetic construct; identical to SEQ ID NO: 8783

SEQ ID NO: 41509 - protein, 246 aa, synthetic construct
QSVLTQPPSVSVSPGQTASITCSGDKLGDKFACWYQQKPGQSPVLVIYQDSKRPSGIPERFSGSNSGNTATLTISGTQAMDEADYYCQAWDSDGKATVVFGTGTKVEIKGGGGSGGGGSGGGGSEVQLLESGGGLVQPGGSLRLSCAASGFTFSSYAMSWVRQAPGKGLEWVSAISGSGGSTYYADSVKGRFTISRDNSKNTLYLQMNSLRAEDTAVYYCAKEQWEGDYFSAFDIWGQGTMVTVSS

SEQ ID NO: 41510 - protein, 246 aa, synthetic construct
QSVLTQPPSVSVSPGQTASITCSGDKLGDKYACWYQQKPGQSPVLVIYQDSKRPSGIPERFSGSNSGNTATLTISGTQAMDEADYYCQAWDSDGKATVVFGTGTKVEIKGGGGSGGGGSGGGGSEVQLLESGGGLVQPGGSLRLSCAASGFTFSSYAMSWVRQAPGKGLEWVSAISGSGGSTYYADSVKGRFTISRDNSKNTLYLQMNSLRAEDTAVYYCAKEQWEGDYFSAFDIWGQGTMVTVSS

SEQ ID NO: 41511 - protein, 246 aa, synthetic construct
QSVLTQPPSVSVSPGQTASITCSGDKLGDKYACWYQQKPGQSPVLVIYQDTKRPSGIPERFSGSNSGNTATLTISGTQAMDEADYYCQAWDSDGKATVVFGTGTKVEIKGGGGSGGGGSGGGGSEVQLLESGGGLVQPGGSLRLSCAASGFTFSSYAMSWVRQAPGKGLEWVSAISGSGGSTYYADSVKGRFTISRDNSKNTLYLQMNSLRAEDTAVYYCAKEQWEGDYFSAFDIWGQGTMVTVSS

SEQ ID NO: 41512 - protein, 248 aa, synthetic construct
QSVLTQPPSVSVSPGQTASITCSGDKLGNKYACWYQQKPGQSPVLVIYQDSKRPSGIPERFSGSNSGNTATLTISGTQAMDEADYYCQAWDSDGKATVVFGTGTKVEIKGGGGSGGGGSGGGGSEVQLLESGGGLVQPGGSLRLSCAASGFTFSSYAMSWVRQAPGKGLEWVSAISGSGGSTYYADSVKGRFTISRDNSKNTLYLQMNSLRAEDTAVYYCAKEQWEGDYFSAFDIWGQGTMVTVSSTR

SEQ ID NO: 41513 - protein, 253 aa, synthetic construct
NFMLTQPHSVSESPGKTVTISCTRSSGSIASNYVQWYQQRPGSAPTTVIYEDNQRPSGVPDRFSGSIDSSSNSASLTISGLKTEDEADYYCQSYDLAADVRVVFGTGTKVTVSSGGGGSGGGGSGGGGSEVQLLESGGGLVQPGGSLRLSCAASGFTFSSYAMSWVRQAPGKGLEWVSAISGSGGSTYYADSVKGRFTISRDNSKNTLYLQMNSLRAEDTAVYYCAKGGENTFESHPVAFDIWGQGTMVTVSS

SEQ ID NO: 41514 - protein, 253 aa, synthetic construct
NFMLTQPHSVSESPGKTVTISCTRRSGSIASNYVQWYQQRPGSAPTTVIYEDNQRPSGVPDRFSGSIDSSSNSASLTISGLKTEDEADYYCQSYDLAADVRVVFGTGTKVTVSSGGGGSGGGGSGGGGSEVQLLESGGGLVQPGGSLRLSCAASGFTFSSYAMSWVRQAPGKGLEWVSAISGSGGSTYYADSVKGRFTISRDNSKNTLYLQMNSLRAEDTAVYYCAKGGENTFESHPVAFDIWGQGTMVTVSS

SEQ ID NO: 41515 - protein, 253 aa, synthetic construct
NFMLTQPHSVSESPGKTVTISCTRNSGSIASNYVQWYQQRPGSAPTTVIYEDNQRPSGVPDRFSGSIDSSSNSASLTISGLKTEDEADYYCQSYDLAADVRVVFGTGTKVTVSSGGGGSGGGGSGGGGSEVQLLESGGGLVQPGGSLRLSCAASGFTFSSYAMSWVRQAPGKGLEWVSAISGSGGSTYYADSVKGRFTISRDNSKNTLYLQMNSLRAEDTAVYYCAKGGENTFESHPVAFDIWGQGTMVTVSS

SEQ ID NO: 41516 - protein, 253 aa, synthetic construct
NFMLTQPHSVSESPGKTVTISCTRSSGSIANNYVQWYQQRPGSAPTTVIYEDNQRPSGVPDRFSGSIDSSSNSASLTISGLKTEDEADYYCQSYDLAADVRVVFGTGTKVTVSSGGGGSGGGGSGGGGSEVQLLESGGGLVQPGGSLRLSCAASGFTFSSYAMSWVRQAPGKGLEWVSAISGSGGSTYYADSVKGRFTISRDNSKNTLYLQMNSLRAEDTAVYYCAKGGENTFESHPVAFDIWGQGTMVTVSS

SEQ ID NO: 41517 - protein, 239 aa, synthetic construct
DIVMTQTPATLSVSAGERVTITCKASQSVSNDVTWYQQKPGQAPRLLIYSASNRYSGVPARFSGSGYGTEFTFTISSVQSEDFAVYFCQQDYSSFGQGTKLEIKRGGGGSGGGGSGGGGSQVQLVESGPGVVQPGRSLRISCAVSGFSVTNYGVHWVRQPPGKGLEWLGVIWAGGITNYNSAFMSRLTISKDNSKNTVYLQMNSLRAEDTAMYYCASRGGHYGYALDYWGQGTLVTVSS

SEQ ID NO: 41518 - protein, 239 aa, synthetic construct
DIQMTQSPSSLSASVGDRVTITCKASQSVSNDVTWYQQKPGQAPKLLIYSASNRYSGVPARFSGSGYGTEFTFTISSVQSEDFAVYFCQQDYSSFGQGTKLEIKRGGGGSGGGGSGGGGSQVQLVESGPGVVQPGRSLRISCAVSGFSVTNYGVHWVRQPPGKGLEWLGVIWAGGITNYNSAFMSRLTISKDNSKNTVYLQMNSLRAEDTAMYYCASRGGHYGYALDYWGQGTLVTVSS

SEQ ID NO: 41519 - protein, 242 aa, synthetic construct
DIQMTQSPSSLSASVGDRVTITCRASSSVSSSYLHWYQQKPGKAPKVWIYSTSNLASGVPSRFSGSGSGTDFTLTISSLQPEDFATYYCQQYSGYPITFGQGTKVEIKRGGGGSGGGGSGGGGSQVQLQESGPGLVKPSQTLSITCTVSGFSLASYNIHWVRQPPGKGLEWLGVIWAGGSTNYNSALMSRLTISKDNSKNQVFLKMSSLTAADTAVYYCAKRSDDYSWFAYWGQGTLVTVSS

SEQ ID NO: 41520 - protein, 243 aa, synthetic construct
ENVLTQSPAIMSASPGEKVTMTCRASSSVSSSYLHWYQQKSGASPKVWIYSTSNLASGVPGRFSGSGSGTSYSLTISSVEAEDAATYYCQQYSGYPITFGAGTKVEVKRGGGGSGGGGSGGGGSQVQLKESGPVLVAPSQTLSITCTVSGFSLASYNIHWVRQPPGKGLEWLGVIWAGGSTNYNSALMSRLSISKDNSKSQVFLQMNSLQTDDTAMYYCAKRSDDYSWFAYWGQGTLVTVSAS

SEQ ID NO: 41521 - protein, 246 aa, synthetic construct
DIVMTQSPDSLAVSLGERATINCKSSQSLLNSGNQKNYLAWYQQKPGQPPKLLIYWGSTRSTGVPDRFSGSGSGTDFTLTISSLQAEDVAVYYCQNDYTYPFTFGQGTKLEIKGGGGSGGGGSGGGGSQVQLVQSGAEVKKPGASVKVSCKASGYTFTSFWLNWVRQAPGQGLEWMGNIYPSTSYTVYNQKFKDRVTMTRDTSTSTVYMELSSLRSEDTAVYYCARTWRGNSFDYWGQGTTVTVSS

SEQ ID NO: 41522 - protein, 246 aa, synthetic construct
DIVMTQSPDSLAVSLGERATINCKSSQSLLNSGNNKNYVTWYQQKPGQPPKLLIYWGSTRSTGVPDRFSGSGSGTDFTLTISSLQAEDVAVYYCQNDYTYPFTFGQGTKLEIKGGGGSGGGGSGGGGSQVQLVQSGAEVKKPGASVKVSCKASGYTFTSFWLNWVRQAPGQGLEWMGNIYPSDSYTVYNQKFKDRVTMTRDTSTSTVYMELSSLRSEDTAVYYCARTWRGNSFDYWGQGTTVTVSS

SEQ ID NO: 41523 - protein, 239 aa, synthetic construct
QIVLTQSPAIMSVSPGEKVTMTCSASSSVNYMHWFQQKPGTSPKLWVYSTSNLASGVPARFSGSGSGTSYSLTISSMEAEDAATYYCQQRSIYPPWTFGGGTKLEIKGGGGSGGGGSGGGGSEVQLQQSGPELVKPGASVKISCKASGYSFTGYTMNWVKQSHGKNLEWIGLINPYNGGTSYNQKFKAKATLTVDKSSSTAYMQLKSLTSEDSAVYYCARDYGYVLDYWGQGTSVTVSS

SEQ ID NO: 41524 - protein, 239 aa, synthetic construct
QIVLTQSPAIMSASPGEKVTITCSASSSVSYLHWFQQKPGTSPKLWVYSTSNLPSGVPARFGGSGSGTSYSLTISRMEAEDAATYYCQQRSIYPPWTFGGGTKLEIKGGGGSGGGGSGGGGSEVQLQQSGPELVKPGASMKISCKASGYSFTGYTMNWVKQSHGKNLEWIGLINPYNGGTSYNQKFKGKATLTIDKSSSTAYMELLSLTSEDSAVYYCARDYGYVLDYWGQGTTLTVSS

SEQ ID NO: 41525 - protein, 239 aa, synthetic construct
QIVLTQSPAIMSASPGEKVTITCSASSSVNYLHWFQQKPGTSPKLWVYSTSNLPSGVPARFGGSGSGTSYSLTISRMEAEDAATYYCQQRSIYPPWTFGGGTKLEIKGGGGSGGGGSGGGGSEVQLQQSGPELVKPGASMKISCKASGYSFTGYTMNWVKQSHGKNLEWIGLINPYNGGTSYNQKFKGKATLTIDKSSSTAYMELLSLTSEDSAVYYCARDYGYVLDYWGQGTTLTVSS

SEQ ID NO: 41526 - protein, 250 aa, synthetic construct
EIVLTQSPATLSLSPGERATLSCSVSSSISSSNLHWYQQKPGQAPRLLIYATSNLASGIPARFSGSGSGTDFTLTISSLEPEDFAVYYCQQWSSYPHTFGGGTKVEIKRGGGGSGGGGSGGGGSQVQLVQSGAEVKKPGASVKVSCKASGYTFTNYLIEWVRQAPGQGLEWMGLINPGSGGTNYNEKFKGRVTMTTDTSTSTAYMELRSLRSDDTAVYYCARRSPLGSWIYYAYDGVAYWGQGTLVTVSS

SEQ ID NO: 41527 - protein, 244 aa, synthetic construct
DIQMTQSPSSLSASVGDRVTITCKASDHINNWLAWYQQKPGQAPKLLIYGATTLETGVPSRFSGSGSGTDYTLTISSLQPEDFATYYCQQSWNTPWTFGQGTKLEIKRGGGGSGGGGSGGGGSQVQLQQPGAELVKPGASVKMSCKASGYTFSSYWINWMKQKPGQGLEWIGQIYPGDGDTNYNGKFKGRATLTADTSSSTAYMQLSSLTSEDSAVYFCARSITTVVGCAMDYWGQGTSVTVSS

SEQ ID NO: 41528 - protein, 244 aa, synthetic construct
DIQMTQSPSSLSASVGDRVTITCKASDHINNWLAWYQQKPGQAPKLLIYGATTLETGVPSRFSGSGSGTDYTLTISSLQPEDFATYYCQQSWNTPWTFGQGTKLEIKRGGGGSGGGGSGGGGSQVQLQQPGAELVKPGASVKMSCKASGYAFSSSWINWMKQKPGQGLEWIGQIYPGDGDTNYNGKFKGRATLTADTSSSTAYMQLSSLTSEDSAVYFCARSITTVVGCAMDYWGQGTSVTVSS

SEQ ID NO: 41529 - protein, 244 aa, synthetic construct
DIQMTQSPSSLSASVGDRVTITCKASDHINNWLAWYQQKPGKAPKLLIYGATTLETGVPSRFSGSGSGTDFTLTISSLQPEDFATYYCQQSWNTPWTFGQGTKVEIKRGGGGSGGGGSGGGGSEVQLVESGGGLVQPGGSLRLSCAASGYTFSSYWVNWVRQAPGKGLEWVAQIYPGDGDTNYNGKFKGRFTISRDNSKNTLYLQMNSLRAEDTAVYYCARSITTVVGCAMDYWGQGTLVTVSS

SEQ ID NO: 41530 - protein, 244 aa, synthetic construct; identical to SEQ ID NO: 41529

SEQ ID NO: 41531 - protein, 244 aa, synthetic construct
DIQLTQSPSSLSASVGDRVTITCKASQSVDYDGDSFLNWYQQKPGKAPKLLIYAASNLESGVPSRFSGSGSGTDFTLTISSLQPEDFATYYCQQSNEDPLTFGQGTKVEIKRGGGGSGGGGSGGGGSEVQLVESGGGLVQPGGSLRLSCAASGYTFSSYWIEWVRQAPGKGLEWIGEILPGGGDTNYNEIFKGRATFSADTSKNTAYLQMNSLRAEDTAVYYCTRRVPIRLDYWGQGTLVTVSS

SEQ ID NO: 41532 - protein, 244 aa, synthetic construct
DIQLTQSPSSLSASVGDRVTITCKASQSVDYDGDSFLNWYQQKPGKAPKLLIYAASNLESGVPSRFSGSGSGTDFTLTISSLQPEDFATYYCQQSNEDPLTFGQGTKVEIKRGGGGSGGGGSGGGGSEVQLVESGGGLVQPGGSLRLSCAASGYTFTSYWIEWVRQAPGKGLEWIGEILPGGGDTNYNEIFKGRATFSADTSKNTAYLQMNSLRAEDTAVYYCTRRVPIRLDYWGQGTLVTVSS

SEQ ID NO: 41533 - protein, 244 aa, synthetic construct
DIQLTQSPSSLSASVGDRVTITCKASQSVDYEGDSFLNWYQQKPGKAPKLLIYAASNLESGVPSRFSGSGSGTDFTLTISSLQPEDFATYYCQQSNEDPLTFGQGTKVEIKRGGGGSGGGGSGGGGSEVQLVESGGGLVQPGGSLRLSCAASGYTFTSYWIEWVRQAPGKGLEWIGEILPGGGDTNYNEIFKGRATFSADTSKNTAYLQMNSLRAEDTAVYYCTRRVPIRLDYWGQGTLVTVSS

SEQ ID NO: 41534 - protein, 244 aa, synthetic construct
DIQLTQSPSSLSASVGDRVTITCKASQSVDYEGDSFLNWYQQKPGKAPKLLIYAASNLESGVPSRFSGSGSGTDFTLTISSLQPEDFATYYCQQSNEDPLTFGQGTKVEIKRGGGGSGGGGSGGGGSQVQLQQPGAELVKPGASVKMSCKASGYTFTSYWINWMKQKPGQGLEWIGQILPGGGDTNYNGKFKGRATLTADTSSSTAYMQLSSLTSEDSAVYFCTRRVPIRLDYWGQGTSVTVSS

SEQ ID NO: 41535 - protein, 243 aa, synthetic construct
DIVMTQSPDSLAVSLGERATINCKASQSVDYEGDSFLNWYQQKPGQPPKLLIYAASNLESGVPSRFSGSGSGTDFTLTISSLQPEDVAVYYCQQSNEDPLTFGQGTKVEIKGGGGSGGGGSGGGGSEVQLVESGGGLVQPGGSLRLSCAASGYTFTSYWIEWVRQAPGKGLEWIGEILPGGGDTNYNEIFKGRATFSADTSKNTAYLQMNSLRAEDTAVYYCTRRVPIRLDYWGQGTLVTVSS

SEQ ID NO: 41536 - protein, 243 aa, synthetic construct
DIVMTQSPDSLAVSLGERATINCKASQSVDYEGDSFLNWYQQKPGQPPKLLIYAARKLGRGVPSRFSGSGSGTDFTLTISSLQPEDVAVYYCQQSNEDPLTFGQGTKVEIKGGGGSGGGGSGGGGSEVQLVESGGGLVQPGGSLRLSCAASGYTFTSYWIEWVRQAPGKGLEWIGEILPGGGDTNYNEIFKGRATFSADTSKNTAYLQMNSLRAEDTAVYYCTRRVPIRLDYWGQGTLVTVSS

SEQ ID NO: 41537 - protein, 247 aa, synthetic construct
DIVMTQSPDSLAVSLGERATINCKASQSVDYDGDSFLNWYQQKPGQPPKLLIYAASNLESGVPSRFSGSGSGTDFTLTISSLQPEDVAVYYCQQSNDDPLTFGQGTKVEIKLEGGGGSGGGGSGGGGSFEQVQLVQSGAEVKKPGASVKVSCKASGYTFTSYWINWVRQAPGQGLEWMGQILPGGGDTNYNGKFKGRVTITADTSTSTAYMELSSLRSEDTAVYYCTRRVPIRLDYWGQGTLVTVSS

SEQ ID NO: 41538 - protein, 240 aa, synthetic construct
DIQMTQSPSSLSASVGDRVTITCKSSQSLLDSDGKTYLNWYQQKPGKAPKLLIYLVSKLDSGVPSRFSGSGSGTDFTLTISSLQPEDFATYYCFQGTHFPFTFGQGTKVEIKRGGGGSGGGSGGGGSEVQLVESGGGLVQPGGSLRLSCAASGYTFTSYWMNWVRQAPGKGLEWVGMIDPSDSETHYNHIFKDRFTISADTSKNTAYLQMNSLRAEDTAVYYCARNLYLFGQGTLVTVSS

SEQ ID NO: 41539 - protein, 248 aa, synthetic construct
DIQMTQSPSSLSASVGDRVTITCKSSQSLLDSDGKTYLNWYQQKPGKAPKLLIYLVSKLDSGVPSRFSGSGSGTDFTLTISSLQPEDFATYYCFQGTHFPFTFGQGTKVEIKRGGGGSGGGSGGGGSEVQLVESGGGLVQPGGSLRLSCAASGYTFSSYWMNWVRQAPGKGLEWVGMIDPSDSETHYNHIFKDRFTISADTSKNTAYLQMNSLRAEDTAVYYCARNLYLWGQGTLVTVSSTRPRLCLL

SEQ ID NO: 41540 - protein, 240 aa, synthetic construct
DIQMTQSPSSLSASVGDRVTITCKSSQSLLDSDGKTYLNWYQQKPGKAPKLLIYLVSKLDSGVPSRFSGSGSGTDFTLTISSLQPEDFATYYCWQGTHFPFTFGQGTKVEIKRGGGGSGGGSGGGGSEVQLVESGGGLVQPGGSLRLSCAASGYTFTSYWMNWVRQAPGKGLEWVGMIDPSDSETHYNHIFKDRFTISADTSKNTAYLQMNSLRAEDTAVYYCARNLYLFGQGTLVTVSS

SEQ ID NO: 41541 - protein, 240 aa, synthetic construct
DIQMTQSPSSLSASVGDRVTITCKSSQSLLDSDGKTYLNWYQQKPGKAPKLLIYLVSKLDSGVPSRFSGSGSGTDFTLTISSLQPEDFATYYCWQGTHFPFTFGQGTKVEIKRGGGGSGGGSGGGGSEVQLVESGGGLVQPGGSLRLSCAASGYTFSSYWMNWVRQAPGKGLEWVGMIDPSDSETHYNHIFKDRFTISADTSKNTAYLQMNSLRAEDTAVYYCARNLYLWGQGTLVTVSS

SEQ ID NO: 41542 - protein, 240 aa, synthetic construct
DIQMTQSPSSLSASVGDRVTITCKSSQSLLDSDGKTYLNWYQQKPGKAPKLLIYLVSKLDSGVPSRFSGSGSGTDFTLTISSLQPEDFATYYCFQGTHFPYTFGQGTKVEIKRGGGGSGGGSGGGGSEVQLVESGGGLVQPGGSLRLSCAASGYTFTSYWMNWVRQAPGKGLEWVGMIDPSDSETHYNHIFKDRFTISADTSKNTAYLQMNSLRAEDTAVYYCARNLYLFGQGTLVTVSS

SEQ ID NO: 41543 - protein, 248 aa, synthetic construct
DIQMTQSPSSLSASVGDRVTITCKSSQSLLDSDGKTYLNWYQQKPGKAPKLLIYLVSKLDSGVPSRFSGSGSGTDFTLTISSLQPEDFATYYCFQGTHFPYTFGQGTKVEIKRGGGGSGGGSGGGGSEVQLVESGGGLVQPGGSLRLSCAASGYTFTNYWMNWVRQAPGKGLEWVGMIDPSDSETHYNHIFKDRFTISADTSKNTAYLQMNSLRAEDTAVYYCARNLYLWGQGTLVTVSSTRPRLCLL

SEQ ID NO: 41544 - protein, 240 aa, synthetic construct
DIQMTQSPSSLSASVGDRVTITCKSSQSLLDSDGKTYLNWYQQKPGKAPKLLIYLVSKLDSGVPSRFSGSGSGTDFTLTISSLQPEDFATYYCFQGTHFPFTFGQGTKVEIKRGGGGSGGGSGGGGSEVQLVESGGGLVQPGGSLRLSCAASGYTFTNYWMNWVRQAPGKGLEWVGMIDPSDSETHYNHIFKDRFTISADTSKNTAYLQMNSLRAEDTAVYYCARNLYLWGQGTLVTVSS

SEQ ID NO: 41545 - protein, 250 aa, synthetic construct
DIVLTQSPASLAVSLGQRATISCKASQSVDYDGDSFLNWYQKPGQPPKLFIYAASNLESGIPARFSGSGSGTDFTLNIHPVEEEDAATYYCQQSNEDPLTFGAGTELELKRGGGGSGGGSGGGGSEVQLQQSGAELMKPGASVKISCKATGYTFSSYWIEWVKQRPGHGLEWIGEILPGGGDTNYNEIFKGKATFTADTSSNTAYMQLSSLTSEDSAVYYCTRRVPVYFDYWGQGTSVTVSSTRPRLCLL

SEQ ID NO: 41546 - protein, 238 aa, synthetic construct
QIVLTQSPAIMSASPGEKVTMTCSASSSVSFMHWYQQKSGTSPKRWIYDTSTLASGVPARFGGSGSGTSYSLTISSMEAEDAATYYCQQWSSNPLTFGAGTKLELKRGGGGSGGGGSGGGGSQVQLQQSGPELVKPGASVRISCKASGYTFTSYYIHWVKQRPGQGLEWIGWIYPGNLNTKYNEKFKGKATLTADKSSSTAYMQLSSLTSEDSAVYFCARYDWYFDVWGAGTTVTVSS

SEQ ID NO: 41547 - protein, 243 aa, synthetic construct
DIVMTQSPLSLPVTPGEPASISCRSSKSLLHSNGITYLYWYLQKPGQSPQLLIYRMSNRASGVPDRFSGSGSGTDFTLKISRVEAEDVGVYHCGQLLENPYTFGQGTKLEIKGGGGSGGGGSGGGGSQVQLVESGGGVVQPGRSLRLSCAASGFSFSNYGMAWVRQAPGKGLEWVASISTGGGNTYYADSVKDRFTISRDNSKNTLYLQMNSLRAEDTAVYYCTRHDRGGLYWGQGTMVTVSS

SEQ ID NO: 41548 - protein, 243 aa, synthetic construct
EIVLTQSPGTLSLSPGERATLSCKASQSVSISGINLMNWYQQKPGQQPRLLIYHASILASGIPDRFSGSGSGTDFTLTISRLEPEDFAVYYCQQTRESPLTFGQGTRLEIKGGGGSGGGGSGGGGSELQLLESGGGLVQPGGSLRLSCAASGFTFSKYAMAWVRQAPGKGLEWVASISTGGVNTYYADSVKDRFTISRDNAKNTLYLQMNSLRAEDTAVYYCATHTGDYFDYWGQGTMVTVSS

SEQ ID NO: 41549 - protein, 244 aa, synthetic construct
DIVMTQSPLSLPVTPGEPASISCRSSKSLLHSNGITYLYWYLQKPGQSPQLLIYRMSNRASGVPDRFSGSGSGTDFTLKISRVEAEDVGVYHCGQLLENPYTFGQGTKLEIKGGGGSGGGGSGGGGSELQLLESGGGLVQPGGSLRLSCAASGFTFSKYAMAWVRQAPGKGLEWVASISTGGVNTYYADSVKDRFTISRDNAKNTLYLQMNSLRAEDTAVYYCATHTGDYFDYWGQGTMVTVSS

SEQ ID NO: 41550 - protein, 116 aa, synthetic construct; identical to SEQ ID NO: 41276

SEQ ID NO: 41551 - protein, 247 aa, synthetic construct
EIVLTQSPATLSLSPGERATLSCRASQSVSSYLAWYQQKPGQAPRLLIYDASNRATGIPARFSGSGSGTDFTLTISSLEPEDFAVYYCQQRSNWPPTFGQGTKVEIKGGGGSGGGGSGGGGSQLQLQESGPGLVKPSETLSLTCTVSGGSISSSSYWWGWTRQPPGRGLEWIGTMYYSGNIYYNPSLQSRATISVDTSKNQFSLKLSSVTAADTAVYYCARHVGYSYGRRFWYFDLWGRGTLVTVSS

SEQ ID NO: 41552 - protein, 243 aa, synthetic construct
DIQMTQSPSSLSASVGDRVTITCRASQDVRNIVVWFQQKPGKAPKLLIYSGSYRYSGVPSRFSGSGSGTDFTLTISSLQPEDFATYYCQQHYSPPYTFGQGTKVEIKRGGGGSGGGGSGGGGSEVQLVESGPGLVKPSETLSLTCTVSGFSLTRFGVHWVRQPPGKGLEWLGVIWRGGSTDYNAAFMSRLTISKDNSKNQVSLKLSSVTAADTAVYYCSNHYYGSSDYALDNWGQGTLVTVSS

SEQ ID NO: 41553 - protein, 245 aa, synthetic construct
DIVLTQSPLSLAVSLGQPAIISCRASQSVSFAGTSLMHWYHQKPGQQPRLLIYRASNLEAGVPDRFSGSGSKTDFTLTISPVEAEDAATYYCQQSREYPYTFGGGTKLEIKRGGGGSGGGGSGGGGSQVQLVQSGAEVVKPGASVKISCKASGYTFTGYFMHWVKQSPGQSLEWIGRIHPYDGDTFYNQKFQGKATLTVDKSSNTAHMELLSLTSEDFAVYYCTRYDGSRAMDYWGQGTTVTVSS

SEQ ID NO: 41554 - protein, 245 aa, synthetic construct
DIQMTQSPSSLSASVGDRVTITCRASQDVNTAVAWYQQKPGKAPKLLIYSAYFLYSGVPSRFSGSRSGTDFTLTISSLQPEDFATYYCQQYSRYSPVTFGQGTKVEIKRSGGGGSGGGGSGGGGEVQLVESGGGLVQPGGSLRLSCAASGFNVYASGMHWVRQAPGKGLEWVAKIYPDSDYTYYADSVKGRFTISADTSKNTAYLQMNSLRAEDTAVYYCSRDSSFYYVYAMDYWGQGTLVTVSS

SEQ ID NO: 41555 - protein, 245 aa, synthetic construct
DIQMTQSPSSLSASVGDRVTITCRASQDINTAVAWYQQKPGKAPKLLIYSAYFLYSGVPSRFSGSRSGTDFTLTISSLQPEDFATYYCQQYSRYSPVTFGQGTKVEIKRSGGGGSGGGGSGGGGEVQLVESGGGLVQPGGSLRLSCAASGFNVYASGMHWVRQAPGKGLEWVAKIYPDSDYTYYADSVKGRFTISADTSKNTAYLQMNSLRAEDTAVYYCSRDSSFYYVYAMDYWGQGTLVTVSS

SEQ ID NO: 41556 - protein, 240 aa, synthetic construct; identical to SEQ ID NO: 8777

SEQ ID NO: 41557 - protein, 239 aa, synthetic construct
DIQMTQSPSSLSASVGDRVTITCKASDLIHNWLAWYQQKPGKAPKLLIYGATSLETGVPSRFSGSGSGTDFTLTISSLQPEDFATYYCQQYWTTPFTFGQGTKVEIKRGGGGSGGGGSGGGGSEVQLVESGGGLVQPGGSLRLSCAASGYSITNDYAWNWVRQAPGKGLEWVGYISYSGYTTYNPSIKSRFTISRDTSKNTLYLQMNSLRAEDTAVYYCARWTSGLDYWGQGTLVTVSS

SEQ ID NO: 41558 - protein, 242 aa, synthetic construct; identical to SEQ ID NO: 41477

SEQ ID NO: 41559 - protein, 242 aa, synthetic construct
EIVLTQSPATLSLSPGERATLSCRASQSVSSYLAWYQQKPGQAPRLLIYDASNRATGIPARFSGSGSGTDFTLTISSLEPEDFAVYYCQQRSDWPLTFGGGTKVEIKGGGGSGGGGSGGGGSQVQLVQSGAEVKKPGSSVKVSCKASGGTFSSYAIHWVRQAPGQGLEWMGRIIPIEGRAYYAQKFQGRVTITADESTSTAYMELSSLRSEDTAVYYCARGRYSYRYWFDYWGQGTLVTVSS

SEQ ID NO: 41560 - protein, 241 aa, synthetic construct; identical to SEQ ID NO: 8776

SEQ ID NO: 41561 - protein, 244 aa, synthetic construct
DIQMTQSPSSLSASVGDRVTITCRASQSISSYLNWYQQKPGKAPKLLIYAASSLQSGVPSRFSGSGSGTDFTLTISSLQPEDFATYYCQQSYSTPLTFGQGTKVEIKGGGGSGGGGSGGGGSEVQLVESGGGLVQPGGSLRLSCAASGFTFSSYAMSWVRQAPGKGLEWVSAISGSGGSTYYADSVKGRFTISRDNSKNTLYLQMNSLRAEDTAVYYCARLGYPTTTLLPFDYWGQGTLVTVSS

SEQ ID NO: 41562 - protein, 249 aa, synthetic construct
DIQMTQSPSSLSASVGDRVTITCQASENIYSFLAWYQQKPGKAPKLLIYSASKLAAGVPSRFSGSGSGTDFTLTISSLQPEDFATYYCQQTNRYSNPDIYNVFGQGTKLTVLGGGGGSGGGGSGGGGSEVQLVESGGGLVQPGGSLRLSCAASGIDFNSNYYMCWVRQAPGKGLEWIGCIYVGSHVNTYYANWAKGRFTISRDNSKNTVYLQMNSLRAEDTAVYYCATSGSSVLYFKFWGQGTLVTVSS

SEQ ID NO: 41563 - protein, 247 aa, synthetic construct
QVQLVQSGPEVKKPGASVKVSCKASGYTFTSYHIQWVRQAPGQGLEWIGWIYPGDGSTQYNEKFKGRVTITADKSTSTAYMELSSLTSEDTAVYYCAREGTYYAMDYWGQGTSVTVSSGGGGGSGGGGSGGGGSDIVMTQSPATLSVSPGERATISCRSSQSIVHSNGNTYLEWYQQKPGQAPRLLIYKVSNRFSGIPDRFSGSGSGTDFTLTISRLEPEDFAVYYCFQGSHVPRTFGGGTKLEIKR

SEQ ID NO: 41564 - protein, 254 aa, synthetic construct
QSALTQPASVSGSPGQSITISCTGTSSDVGGYNYVSWYQQHPGKAPKLMIYDVSNRPSGVSNRFSGSKSGNTASLTISGLQAEDEADYFCSSYTSSSTPVVFGGGTKLTVLGGGGGSGGGGSGGGGSQVQLQQSGAGLLKPSETLSLTCAVSGGSFSGYYWTWIRQRPGKGLEWIGEINHRGSTDYNPSLKSRVTMSIDTSKSQFSLNLKSVTAADTAVYYCARAAWGSCYDGTCYPAEYFQYWGQGTLVTVSS

SEQ ID NO: 41565 - protein, 247 aa, synthetic construct
EIVMTQSPGTLSLSPGERATLSCRASQSVSSSYLAWYQQKPGQAPRLLIYGASSRATGIPDRFSGSGSGTDFTLTISRLEPEDFAVYYCQQYGSSPLTFGGGTKVEIKGGGGGSGGGGSGGGGSQVQLVQSGAEVKKPGASVKVSCKASGYSFTSYGINWVRQAPGQGLEWMGWISAYNGNTNYAQKLQGRVTMTRDTSTRTAYMELRSLRSDDTAVYYCAREYDILTGYSDAFDIWGQGTLVTVSS

SEQ ID NO: 41566 - protein, 243 aa, synthetic construct
EIVLTQSPATLSLSPGERATLSCRASQSVSSYLAWYQQKPGQAPRLLIYGASSRATGIPARFSGSGSGTDFTLTISSLEPEDFAVYYCQQRSNWPPYTFGQGTKLEIKGGGGGSGGGGSGGGGSQVQLVESGGGLVKPGGSLRLSCAASGFTFSSYSMHWVRQAPGKGLEWVSDISTNSRTRNYADSVKGRFTISRDNAKNSVYLQMHSLRDEDTAVYYCARDYGGIYYFDYWGQGTLVTVSS

SEQ ID NO: 41567 - protein, 250 aa, synthetic construct
EIVLTQSPATLSLSPGERATLSCRASQSVSSYLAWYQQKPGQAPRLLIYGASSRATGIPARFSGSGSGTDFTLTISSLEPEDFAVYYCQQRSNWPPYTFGQGTKLEIKGGGGSGGGGSGGGGSQVQLQQSGAGLLKPSETLSLTCAVSGGSFSGYYWTWIRQRPGKGLEWIGEINHRGSTDYNPSLKSRVTMSIDTSKSQFSLNLKSVTAADTAVYYCARAAWGSCYDGTCYPAEYFQYWGQGTLVTVSS

SEQ ID NO: 41568 - protein, 246 aa, synthetic construct
EIVMTQSPGTLSLSPGERATLSCRASQSVSSSYLAWYQQKPGQAPRLLIYGASSRATGIPDRFSGSGSGTDFTLTISRLEPEDFAVYYCQQYGSSPLTFGGGTKVEIKGGGGSGGGGSGGGGSQVQLVQSGAEVKKPGASVKVSCKASGYSFTSYGINWVRQAPGQGLEWMGWISAYNGYTNYAQKLQGRVTMTRDTSTRTAYMELRSLRSDDTAVYYCAREYDILTGYSDAFDIWGQGTLVTVSS

SEQ ID NO: 41569 - protein, 238 aa, synthetic construct
DIQMTQSPSSLSASVGDRVTITCRASQSISSYLNWYQQKPGKAPKLLIYDASTLQSGVPSRFSGSGSGTDFTLTISSLQPEDFATYYCQQSDGNPTTFGQGTKVEIKGGGGSGGGGSGGGGSEVQLLESGGGLVQPGGSLRLSCAASGFTFSSYAMSWVRQAPGKGLEWVSSISTSGSYTAYADSVKGRFTISRDNSKNTLYLQMNSLRAEDTAVYYCAKGGYTFDYWGQGTLVTVSS

SEQ ID NO: 41570 - protein, 239 aa, synthetic construct; identical to SEQ ID NO: 20431

SEQ ID NO: 41571 - protein, 239 aa, synthetic construct; identical to SEQ ID NO: 20432

SEQ ID NO: 41572 - protein, 118 aa, synthetic construct
EVQLLESGGGLVQPGGSLRLSCAASGRTFSMGWYRQAPGKGLEFVSAITYSGGSPYYADSVKGRFTISRDNSKNTVYLQMNSLRAEDTAVYYCAANPTYGSDWNAENWGQGTLVTVSS

SEQ ID NO: 41573 - protein, 118 aa, synthetic construct
QVQLLESGGGLVQPGGSLRLSCAASGRTFSMGWYRQAPGKEREFVAAITYSGGSPYYADSVKGRFTISRDNSKNTVYLQMNSLRAEDTAVYYCAANPTYGSDWNAENWGQGTLVTVSS

SEQ ID NO: 41574 - protein, 118 aa, synthetic construct
QVQLVESGGGLVQPGGSLRLSCAASGRTFTMGWYRQAPGKGLEFVSAISLSPTLAYYADSVKGRFTISRDNSKNTVVLQMNSLRAEDTALYYCAADRKSVMSIRPDYWGQGTLVTVSS

SEQ ID NO: 41575 - protein, 118 aa, synthetic construct
EVQLVESGGGLVQPGGSLRLSCAASGRTFTMGWYRQAPGKEREFVAAISLSPTLAYYADSVKGRFTISRDNSKNTVVLQMNSLRAEDTALYYCAADRKSVMSIRPDYWGQGTLVTVSS

SEQ ID NO: 41576 - protein, 125 aa, synthetic construct
QVQLVESGGGLVQPGGSLRLSCAASGNINSRNCMGWFRQAPGKGREGVAAIGQVTGRTYYVDSVKGRFTISLDNSKNTLYLQMNSLRAEDTAVYYCAAAPGCLLSALRSADYRNWGQGTLVTVSS

SEQ ID NO: 41577 - protein, 125 aa, synthetic construct
QVQLVESGGGSVQAGGSLRLSCGASGNINSRNCMGWFRQAPGKEREGVAGIGQVTGRTYYADSVKGRFTISLDNAKNMLYLQMNTLKPEDTAMYYCAAAPGCLLSALRSADYRNWGQGTQVTVSS

SEQ ID NO: 41578 - protein, 125 aa, synthetic construct
QVQLVESGGGSVQAGGSLRLSCGASGNINSRNCMGWFRQAPGKEREGVAAIGQVTGRSYYVDSVKGRFTISLDNAKNTLYLQMNTLKPEDTAMYYCAAAPGCLLSALRSADYRNWGQGTQVTVSS

SEQ ID NO: 41579 - protein, 125 aa, synthetic construct
QVQLVESGGGSVQAGGSLRLSCGASGNISSRNCMGWFRQAPGKEREGVAAIGQVTGRSYYVDSVKGRFTISLDNAKNTLYLQMNTLKPEDTAMYYCAAAPGCLLSALRSADYRNWGQGTQVTVSS

SEQ ID NO: 41580 - protein, 125 aa, synthetic construct; identical to SEQ ID NO: 41578

SEQ ID NO: 41581 - protein, 118 aa, synthetic construct
EVQLVESGGGLVQPGGSLRLSCAASGRTFTMGWFRQAPGKGREFVAAISLSPTLAYYADSVKGRFTISRDNSKNTVVLQMNSLRAEDTAVYYCAADRKSVMSIRPDYWGQGTQVTVSS

SEQ ID NO: 41582 - protein, 128 aa, synthetic construct
QVQLVESGGGVVQPGRSLRLSCVASGYTYSINCMGWFRQAPGKGREGIAAISTGGGTTGVADSVKGRFTISQDNAKNTVYLQMNSLRAEDTAMYYCAARSTYSGYACVYSEVNGYNYRGQGTQVTVSS

SEQ ID NO: 41583 - protein, 127 aa, synthetic construct
EVQLVESGGGSVQAGGSLRLSCAASGYTYGINCMGWFRQAPGKEREGVAVISTGGGRTDYRDSVKGRFTISQDNAKNTVYLQMNSLKPEDTAMYYCAGKTTYPGYGCGLGRSAYNYWGQGTQVTVSS

SEQ ID NO: 41584 - protein, 127 aa, synthetic construct
EVQLVESGGGSVQAGGSLRLSCAASGYTYSINCMGWFRQAPGKEREGVAAISTGGGRTDYRDSVKGRFTISQDNAKNTVYLQMNSLKPEDTAMYYCAGKTTYPGYGCGLGRSAYNYWGQGTQVTVSS

SEQ ID NO: 41585 - protein, 125 aa, synthetic construct
QVQLVESGGGVVQPGGSLRLSCAASGLSFSTYTVAWFRQAPGKGLEGVAAIPYTSQHMVYTDSVRGRFTISRDNSKNTLYLQMNSLRAEDTAVYYCATDRRPGTSMLAINGYNRWGQGTTVTVSS

SEQ ID NO: 41586 - protein, 121 aa, synthetic construct
EVQLVESGGGLVQPGGSLRLSCAASGRTFSNYNMGWFRQAPGKGLEWVAAVDWSGGSPYYADSVKGRFTISRDNSKNTVYLQMNSLRAEDTAVYYCAGRVQYGSSWSGDYWGQGTLVTVSS

SEQ ID NO: 41587 - protein, 242 aa, synthetic construct
QVKLEESGGGLVQAGRSLRLSCAASEHTFSSHVMGWFRQAPGKERESVAVIGWRDISTYYADSVKGRFTISRDNAKKTLYLQMNSLKPEDTAVYYCAARRIDAADFDSWGQGTQVTVSSGGGGSEVQLVESGGGLVQAGGSLRLSCAASGRTFTMGWFRQAPGKEREFVAAISLSPTLAYYADSVKGRFTISRDNAKNTVVLQMNSLKPEDTALYYCAADRKSVMSIRPDYWGQGTQVTVSS

SEQ ID NO: 41588 - protein, 242 aa, synthetic construct
EVQLVESGGGLVQAGGSLRLSCAASGRTFTMGWFRQAPGKEREFVAAISLSPTLAYYADSVKGRFTISRDNAKNTVVLQMNSLKPEDTALYYCAADRKSVMSIRPDYWGQGTQVTVSSGGGGSQVKLEESGGGLVQAGRSLRLSCAASEHTFSSHVMGWFRQAPGKERESVAVIGWRDISTYYADSVKGRFTISRDNAKKTLYLQMNSLKPEDTAVYYCAARRIDAADFDSWGQGTQVTVSS

SEQ ID NO: 41589 - protein, 119 aa, synthetic construct
QVKLEESGGGLVQAGRSLRLSCAASEHTFSSHVMGWFRQAPGKERESVAVIGWRDISTYYADSVKGRFTISRDNAKKTLYLQMNSLKPEDTAVYYCAARRIDAADFDSWGQGTQVTVSS

SEQ ID NO: 41590 - protein, 118 aa, synthetic construct
EVQLVESGGGLVQAGGSLRLSCAASGRTFTMGWFRQAPGKEREFVAAISLSPTLAYYADSVKGRFTISRDNAKNTVVLQMNSLKPEDTALYYCAADRKSVMSIRPDYWGQGTQVTVSS

SEQ ID NO: 41591 - protein, 10 aa, synthetic construct
ESVDNYGISF

SEQ ID NO: 41592 - protein, 6 aa, synthetic construct
QDIGNY

SEQ ID NO: 41593 - protein, 10 aa, synthetic construct
ESVTILGSHL

SEQ ID NO: 41594 - protein, 6 aa, synthetic construct
QDISNY

SEQ ID NO: 41595 - protein, 12 aa, synthetic construct
QSLLNSGNQKNY

SEQ ID NO: 41596 - protein, 6 aa, synthetic construct
QGINNY

SEQ ID NO: 41597 - protein, 6 aa, synthetic construct
ENIYSN

SEQ ID NO: 41598 - protein, 5 aa, synthetic construct
SSVSY

SEQ ID NO: 41599 - protein, 6 aa, synthetic construct
QDISKY

SEQ ID NO: 41600 - protein, 6 aa, synthetic construct
QDISKY

SEQ ID NO: 41601 - protein, 6 aa, synthetic construct
QSVSSY

SEQ ID NO: 41602 - protein, 11 aa, synthetic construct
KSLLHSNGITY

SEQ ID NO: 41603 - protein, 11 aa, synthetic construct
QSIVHSVGNTF

SEQ ID NO: 41604 - protein, 6 aa, synthetic construct
QSVGGY

SEQ ID NO: 41605 - protein, 6 aa, synthetic construct
QGISSW

SEQ ID NO: 41606 - protein, 10 aa, synthetic construct
QSVDFDGDSY

SEQ ID NO: 41607 - protein, 6 aa, synthetic construct
QGISSW

SEQ ID NO: 41608 - protein, 11 aa, synthetic construct
QSIVHSDGNTY

SEQ ID NO: 41609 - protein, 5 aa, synthetic construct
SSVRY

SEQ ID NO: 41610 - protein, 12 aa, synthetic construct
QSVFFSSSQKNY

SEQ ID NO: 41611 - protein, 12 aa, synthetic construct
QSVLDSSKNKNS

SEQ ID NO: 41612 - protein, 11 aa, synthetic construct
QTIVHSNGNTY

SEQ ID NO: 41613 - protein, 6 aa, synthetic construct
QDISTY

SEQ ID NO: 41614 - protein, 6 aa, synthetic construct
QDISTY

SEQ ID NO: 41615 - protein, 10 aa, synthetic construct
KSVSTSGYSF

SEQ ID NO: 41616 - protein, 11 aa, synthetic construct
QSLLDSDGKTY

SEQ ID NO: 41617 - protein, 10 aa, synthetic construct
QSVDYEGDSF

SEQ ID NO: 41618 - protein, 12 aa, synthetic construct
QSLLHSSNQKNY

SEQ ID NO: 41619 - protein, 7 aa, synthetic construct
QSVSSSY

SEQ ID NO: 41620 - protein, 6 aa, synthetic construct
QSISLW

SEQ ID NO: 41621 - protein, 6 aa, synthetic construct
QSISSY

SEQ ID NO: 41622 - protein, 12 aa, synthetic construct
QSLLNSRTRKNY

SEQ ID NO: 41623 - protein, 8 aa, synthetic construct
QSVNNDVY

SEQ ID NO: 41624 - protein, 6 aa, synthetic construct
QELSGY

SEQ ID NO: 41625 - protein, 10 aa, synthetic construct
ESVDSYGNSF

SEQ ID NO: 41626 - protein, 6 aa, synthetic construct
QDVGIA

SEQ ID NO: 41627 - protein, 6 aa, synthetic construct
QDVITG

SEQ ID NO: 41628 - protein, 9 aa, synthetic construct
GSNIGAPYD

SEQ ID NO: 41629 - protein, 11 aa, synthetic construct
GSGSNIGAPYD

SEQ ID NO: 41630 - protein, 5 aa, synthetic construct
SSVSY

SEQ ID NO: 41631 - protein, 6 aa, synthetic construct
QSVSND

SEQ ID NO: 41632 - protein, 6 aa, synthetic construct
QSIGTN

SEQ ID NO: 41633 - protein, 11 aa, synthetic construct
QSLLDSDGKTY

SEQ ID NO: 41634 - protein, 6 aa, synthetic construct
QSISSY

SEQ ID NO: 41635 - protein, 12 aa, synthetic construct
QSLLNSGNQKNY

SEQ ID NO: 41636 - protein, 6 aa, synthetic construct
QSISSY

SEQ ID NO: 41637 - protein, 6 aa, synthetic construct
QGVGSD

SEQ ID NO: 41638 - protein, 10 aa, synthetic construct
QSVSFAGTSL

SEQ ID NO: 41639 - protein, 11 aa, synthetic construct
QSLVHRNGNTY

SEQ ID NO: 41640 - protein, 6 aa, synthetic construct
QSVSND

SEQ ID NO: 41641 - protein, 6 aa, synthetic construct
QDISNY

SEQ ID NO: 41642 - protein, 7 aa, synthetic construct
SAHKTYT

SEQ ID NO: 41643 - protein, 6 aa, synthetic construct
QGISSW

SEQ ID NO: 41644 - protein, 8 aa, synthetic construct
NSNIERNY

SEQ ID NO: 41645 - protein, 8 aa, synthetic construct
RSNVGGNY

SEQ ID NO: 41646 - protein, 6 aa, synthetic construct
QDVNTA

SEQ ID NO: 41647 - protein, 4 aa, synthetic construct
SNNF

SEQ ID NO: 41648 - protein, 7 aa, synthetic construct
QSVSSGS

SEQ ID NO: 41649 - protein, 6 aa, synthetic construct
QDINNY

SEQ ID NO: 41650 - protein, 7 aa, synthetic construct
LSVSSTY

SEQ ID NO: 41651 - protein, 6 aa, synthetic construct
QDVGTA

SEQ ID NO: 41652 - protein, 6 aa, synthetic construct
QDISNY

SEQ ID NO: 41653 - protein, 6 aa, synthetic construct
QDIDRY

SEQ ID NO: 41654 - protein, 7 aa, synthetic construct
SGNIHNY

SEQ ID NO: 41655 - protein, 6 aa, synthetic construct
VNIYSY

SEQ ID NO: 41656 - protein, 6 aa, synthetic construct
QNVGNN

SEQ ID NO: 41657 - protein, 6 aa, synthetic construct
EDIYIR

SEQ ID NO: 41658 - protein, 6 aa, synthetic construct
EDIYIR

SEQ ID NO: 41659 - protein, 6 aa, synthetic construct
EDIYIR

SEQ ID NO: 41660 - protein, 5 aa, synthetic construct
SSVSY

SEQ ID NO: 41661 - protein, 6 aa, synthetic construct
QSISSY

SEQ ID NO: 41662 - protein, 11 aa, synthetic construct
QRLVHSNGNTY

SEQ ID NO: 41663 - protein, 6 aa, synthetic construct
QLGGKY

SEQ ID NO: 41664 - protein, 8 aa, synthetic construct
SGSIASKY

SEQ ID NO: 41665 - protein, 6 aa, synthetic construct
QNINVW

SEQ ID NO: 41666 - protein, 6 aa, synthetic construct
QNIGTS

SEQ ID NO: 41667 - protein, 12 aa, synthetic construct
QSLLNSGDQKNY

SEQ ID NO: 41668 - protein, 6 aa, synthetic construct
QDVSIA

SEQ ID NO: 41669 - protein, 8 aa, synthetic construct
SSNIGSNT

SEQ ID NO: 41670 - protein, 6 aa, synthetic construct
QNINKW

SEQ ID NO: 41671 - protein, 6 aa, synthetic construct
NIGSKS

SEQ ID NO: 41672 - protein, 11 aa, synthetic construct
SESVDNYGNTF

SEQ ID NO: 41673 - protein, 7 aa, synthetic construct
QSVSNTY

SEQ ID NO: 41674 - protein, 6 aa, synthetic construct
SLRSNY

SEQ ID NO: 41675 - protein, 5 aa, synthetic construct
SSISY

SEQ ID NO: 41676 - protein, 6 aa, synthetic construct
QGFNKY

SEQ ID NO: 41677 - protein, 6 aa, synthetic construct
QDIRYY

SEQ ID NO: 41678 - protein, 6 aa, synthetic construct
QSVSRN

SEQ ID NO: 41679 - protein, 6 aa, synthetic construct
KNIRSY

SEQ ID NO: 41680 - protein, 9 aa, synthetic construct
SSSNIGNNY

SEQ ID NO: 41681 - protein, 9 aa, synthetic construct
SSNIGAGYD

SEQ ID NO: 41682 - protein, 8 aa, synthetic construct
SSNIGSNS

SEQ ID NO: 41683 - protein, 11 aa, synthetic construct
SESVSVIGAHL

SEQ ID NO: 41684 - protein, 10 aa, synthetic construct
ESVTILGSHL

SEQ ID NO: 41685 - protein, 12 aa, synthetic construct
QSLLNSGNQKNY

SEQ ID NO: 41686 - protein, 12 aa, synthetic construct
QSLLNSGNQKNY

SEQ ID NO: 41687 - protein, 7 aa, synthetic construct
SKSISKD

SEQ ID NO: 41688 - protein, 5 aa, synthetic construct
SSINY

SEQ ID NO: 41689 - protein, 12 aa, synthetic construct
QSFLSSGDGKNY

SEQ ID NO: 41690 - protein, 11 aa, synthetic construct
QSLVHSDGDTY

SEQ ID NO: 41691 - protein, 11 aa, synthetic construct
KSLQNVNGNTY

SEQ ID NO: 41692 - protein, 6 aa, synthetic construct
DHINNW

SEQ ID NO: 41693 - protein, 5 aa, synthetic construct
SSVSY

SEQ ID NO: 41694 - protein, 6 aa, synthetic construct
QSVSSY

SEQ ID NO: 41695 - protein, 6 aa, synthetic construct
QDINSY

SEQ ID NO: 41696 - protein, 11 aa, synthetic construct
QSLLDGDGKTY

SEQ ID NO: 41697 - protein, 6 aa, synthetic construct
QDVSTA

SEQ ID NO: 41698 - protein, 10 aa, synthetic construct
QSVSTSSYNY

SEQ ID NO: 41699 - protein, 7 aa, synthetic construct
SNVISSY

SEQ ID NO: 41700 - protein, 7 aa, synthetic construct
SNVISSY

SEQ ID NO: 41701 - protein, 11 aa, synthetic construct
QSLVHSNGNTY

SEQ ID NO: 41702 - protein, 8 aa, synthetic construct
TSNIGNNY

SEQ ID NO: 41703 - protein, 9 aa, synthetic construct
SSNIGAGYD

SEQ ID NO: 41704 - protein, 9 aa, synthetic construct
SSDVGGYNY

SEQ ID NO: 41705 - protein, 6 aa, synthetic construct
LDISHY

SEQ ID NO: 41706 - protein, 11 aa, synthetic construct
QSILHSTGDTY

SEQ ID NO: 41707 - protein, 6 aa, synthetic construct
NIGSKS

SEQ ID NO: 41708 - protein, 10 aa, synthetic construct
ESVDSYGKSF

SEQ ID NO: 41709 - protein, 6 aa, synthetic construct
EDIYIR

SEQ ID NO: 41710 - protein, 5 aa, synthetic construct
SSVSY

SEQ ID NO: 41711 - protein, 6 aa, synthetic construct
EDIYIR

SEQ ID NO: 41712 - protein, 6 aa, synthetic construct
QGISTD

SEQ ID NO: 41713 - protein, 6 aa, synthetic construct
LGISTW

SEQ ID NO: 41714 - protein, 6 aa, synthetic construct
QDISNY

SEQ ID NO: 41715 - protein, 12 aa, synthetic construct
QSLLYRSNQKNY

SEQ ID NO: 41716 - protein, 11 aa, synthetic construct
QSLLHSSGNTY

SEQ ID NO: 41717 - protein, 6 aa, synthetic construct
ENIYSN

SEQ ID NO: 41718 - protein, 11 aa, synthetic construct
QSIVHSNGNTY

SEQ ID NO: 41719 - protein, 5 aa, synthetic construct
SSISF

SEQ ID NO: 41720 - protein, 7 aa, synthetic construct
SGHKTDT

SEQ ID NO: 41721 - protein, 6 aa, synthetic construct
QDINNF

SEQ ID NO: 41722 - protein, 6 aa, synthetic construct
QDINNF

SEQ ID NO: 41723 - protein, 6 aa, synthetic construct
QGIRND

SEQ ID NO: 41724 - protein, 7 aa, synthetic construct
QSVSSSF

SEQ ID NO: 41725 - protein, 6 aa, synthetic construct
QGISSY

SEQ ID NO: 41726 - protein, 9 aa, synthetic construct
SSDVGDYNY

SEQ ID NO: 41727 - protein, 6 aa, synthetic construct
QGINNY

SEQ ID NO: 41728 - protein, 12 aa, synthetic construct
QSVLYSSNQKNY

SEQ ID NO: 41729 - protein, 6 aa, synthetic construct
QDISNY

SEQ ID NO: 41730 - protein, 7 aa, synthetic construct
SRVSSSY

SEQ ID NO: 41731 - protein, 5 aa, synthetic construct
SSVTY

SEQ ID NO: 41732 - protein, 6 aa, synthetic construct
ENIYSY

SEQ ID NO: 41733 - protein, 5 aa, synthetic construct
SSVSY

SEQ ID NO: 41734 - protein, 6 aa, synthetic construct
DHINNW

SEQ ID NO: 41735 - protein, 7 aa, synthetic construct
QSVRSSY

SEQ ID NO: 41736 - protein, 7 aa, synthetic construct
QSVSSSY

SEQ ID NO: 41737 - protein, 7 aa, synthetic construct
QSVSSDY

SEQ ID NO: 41738 - protein, 6 aa, synthetic construct
QDVNTA

SEQ ID NO: 41739 - protein, 6 aa, synthetic construct
QGITRW

SEQ ID NO: 41740 - protein, 6 aa, synthetic construct
QDISRW

SEQ ID NO: 41741 - protein, 11 aa, synthetic construct
QSLVHSDGNTY

SEQ ID NO: 41742 - protein, 6 aa, synthetic construct
QGINNY

SEQ ID NO: 41743 - protein, 7 aa, synthetic construct
QSVNKNY

SEQ ID NO: 41744 - protein, 11 aa, synthetic construct
QSLVYRDGNTY

SEQ ID NO: 41745 - protein, 6 aa, synthetic construct
QSVNND

SEQ ID NO: 41746 - protein, 6 aa, synthetic construct
QSINNY

SEQ ID NO: 41747 - protein, 6 aa, synthetic construct
KLGDKY

SEQ ID NO: 41748 - protein, 6 aa, synthetic construct
QSISSY

SEQ ID NO: 41749 - protein, 10 aa, synthetic construct
KSVSTSGYTY

SEQ ID NO: 41750 - protein, 6 aa, synthetic construct
QGIRNY

SEQ ID NO: 41751 - protein, 10 aa, synthetic construct
ESVDIFGVGF

SEQ ID NO: 41752 - protein, 6 aa, synthetic construct
QNIVFN

SEQ ID NO: 41753 - protein, 9 aa, synthetic construct
TGAVTTSNY

SEQ ID NO: 41754 - protein, 8 aa, synthetic construct
QSVSSSYL

SEQ ID NO: 41755 - protein, 7 aa, synthetic construct
SSISSSN

SEQ ID NO: 41756 - protein, 6 aa, synthetic construct
QNVGTS

SEQ ID NO: 41757 - protein, 6 aa, synthetic construct
QDIGNF

SEQ ID NO: 41758 - protein, 11 aa, synthetic construct
QSLANSYGNTF

SEQ ID NO: 41759 - protein, 6 aa, synthetic construct
QDISNY

SEQ ID NO: 41760 - protein, 6 aa, synthetic construct
QDISNY

SEQ ID NO: 41761 - protein, 6 aa, synthetic construct
DHINNW

SEQ ID NO: 41762 - protein, 6 aa, synthetic construct
NIGSKS

SEQ ID NO: 41763 - protein, 6 aa, synthetic construct
EDIYIR

SEQ ID NO: 41764 - protein, 6 aa, synthetic construct
ESVDNY

SEQ ID NO: 41765 - protein, 10 aa, synthetic construct
KSVSTSGYSY

SEQ ID NO: 41766 - protein, 7 aa, synthetic construct
QFISSSY

SEQ ID NO: 41767 - protein, 6 aa, synthetic construct
QSVSSY

SEQ ID NO: 41768 - protein, 12 aa, synthetic construct
QSVLYSSNNKNY

SEQ ID NO: 41769 - protein, 6 aa, synthetic construct
QSINKW

SEQ ID NO: 41770 - protein, 6 aa, synthetic construct
QDVYNA

SEQ ID NO: 41771 - protein, 6 aa, synthetic construct
QDVGTS

SEQ ID NO: 41772 - protein, 5 aa, synthetic construct
SSVSY

SEQ ID NO: 41773 - protein, 6 aa, synthetic construct
QDVNTA

SEQ ID NO: 41774 - protein, 7 aa, synthetic construct
QSVSSDY

SEQ ID NO: 41775 - protein, 6 aa, synthetic construct
ELPKRY

SEQ ID NO: 41776 - protein, 6 aa, synthetic construct
QNVGTN

SEQ ID NO: 41777 - protein, 6 aa, synthetic construct
QSVSSY

SEQ ID NO: 41778 - protein, 9 aa, synthetic construct
SSDVGSYNY

SEQ ID NO: 41779 - protein, 6 aa, synthetic construct
QSVSSY

SEQ ID NO: 41780 - protein, 6 aa, synthetic construct
QSISSY

SEQ ID NO: 41781 - protein, 6 aa, synthetic construct
ESVSTR

SEQ ID NO: 41782 - protein, 12 aa, synthetic construct
QSLLSSRHQKNF

SEQ ID NO: 41783 - protein, 6 aa, synthetic construct
QDISSY

SEQ ID NO: 41784 - protein, 6 aa, synthetic construct
QSISSH

SEQ ID NO: 41785 - protein, 6 aa, synthetic construct
QDVGTA

SEQ ID NO: 41786 - protein, 6 aa, synthetic construct
QDVGTA

SEQ ID NO: 41787 - protein, 6 aa, synthetic construct
QDVGTA

SEQ ID NO: 41788 - protein, 6 aa, synthetic construct
QDVGTA

SEQ ID NO: 41789 - protein, 5 aa, synthetic construct
SSVSY

SEQ ID NO: 41790 - protein, 5 aa, synthetic construct
SSVSY

SEQ ID NO: 41791 - protein, 10 aa, synthetic construct
KSVSTSGYSY

SEQ ID NO: 41792 - protein, 6 aa, synthetic construct
QNVRTV

SEQ ID NO: 41793 - protein, 12 aa, synthetic construct
QSLLYSSNQKNY

SEQ ID NO: 41794 - protein, 12 aa, synthetic construct
QSVLYSSNQKNY

SEQ ID NO: 41795 - protein, 12 aa, synthetic construct
QSLLYSSNQKNY

SEQ ID NO: 41796 - protein, 6 aa, synthetic construct
QDISNY

SEQ ID NO: 41797 - protein, 6 aa, synthetic construct
QDISSY

SEQ ID NO: 41798 - protein, 6 aa, synthetic construct
NIGGKS

SEQ ID NO: 41799 - protein, 6 aa, synthetic construct
KLGDKF

SEQ ID NO: 41800 - protein, 6 aa, synthetic construct
KLGDKY

SEQ ID NO: 41801 - protein, 6 aa, synthetic construct
KLGDKY

SEQ ID NO: 41802 - protein, 6 aa, synthetic construct
KLGDKY

SEQ ID NO: 41803 - protein, 9 aa, synthetic construct
SSGSIASNY

SEQ ID NO: 41804 - protein, 9 aa, synthetic construct
RSGSIASNY

SEQ ID NO: 41805 - protein, 9 aa, synthetic construct
NSGSIASNY

SEQ ID NO: 41806 - protein, 8 aa, synthetic construct
SGSIANNY

SEQ ID NO: 41807 - protein, 6 aa, synthetic construct
QSVSND

SEQ ID NO: 41808 - protein, 6 aa, synthetic construct
QSVSND

SEQ ID NO: 41809 - protein, 7 aa, synthetic construct
SSVSSSY

SEQ ID NO: 41810 - protein, 7 aa, synthetic construct
SSVSSSY

SEQ ID NO: 41811 - protein, 12 aa, synthetic construct
QSLLNSGNQKNY

SEQ ID NO: 41812 - protein, 12 aa, synthetic construct
QSLLNSGNNKNY

SEQ ID NO: 41813 - protein, 5 aa, synthetic construct
SSVNY

SEQ ID NO: 41814 - protein, 5 aa, synthetic construct
SSVSY

SEQ ID NO: 41815 - protein, 5 aa, synthetic construct
SSVNY

SEQ ID NO: 41816 - protein, 6 aa, synthetic construct
SSISSS

SEQ ID NO: 41817 - protein, 6 aa, synthetic construct
DHINNW

SEQ ID NO: 41818 - protein, 6 aa, synthetic construct
DHINNW

SEQ ID NO: 41819 - protein, 6 aa, synthetic construct
DHINNW

SEQ ID NO: 41820 - protein, 6 aa, synthetic construct
DHINNW

SEQ ID NO: 41821 - protein, 10 aa, synthetic construct
QSVDYDGDSF

SEQ ID NO: 41822 - protein, 10 aa, synthetic construct
QSVDYDGDSF

SEQ ID NO: 41823 - protein, 10 aa, synthetic construct
QSVDYEGDSF

SEQ ID NO: 41824 - protein, 10 aa, synthetic construct
QSVDYEGDSF

SEQ ID NO: 41825 - protein, 10 aa, synthetic construct
QSVDYEGDSF

SEQ ID NO: 41826 - protein, 10 aa, synthetic construct
QSVDYEGDSF

SEQ ID NO: 41827 - protein, 10 aa, synthetic construct
QSVDYDGDSF

SEQ ID NO: 41828 - protein, 11 aa, synthetic construct
QSLLDSDGKTY

SEQ ID NO: 41829 - protein, 11 aa, synthetic construct
QSLLDSDGKTY

SEQ ID NO: 41830 - protein, 11 aa, synthetic construct
QSLLDSDGKTY

SEQ ID NO: 41831 - protein, 11 aa, synthetic construct
QSLLDSDGKTY

SEQ ID NO: 41832 - protein, 11 aa, synthetic construct
QSLLDSDGKTY

SEQ ID NO: 41833 - protein, 11 aa, synthetic construct
QSLLDSDGKTY

SEQ ID NO: 41834 - protein, 11 aa, synthetic construct
QSLLDSDGKTY

SEQ ID NO: 41835 - protein, 10 aa, synthetic construct
QSVDYDGDSF

SEQ ID NO: 41836 - protein, 5 aa, synthetic construct
SSVSF

SEQ ID NO: 41837 - protein, 11 aa, synthetic construct
KSLLHSNGITY

SEQ ID NO: 41838 - protein, 10 aa, synthetic construct
QSVSISGINL

SEQ ID NO: 41839 - protein, 11 aa, synthetic construct
KSLLHSNGITY

SEQ ID NO: 41840 - protein, 10 aa, synthetic construct
QSVSISGINL

SEQ ID NO: 41841 - protein, 6 aa, synthetic construct
QSVSSY

SEQ ID NO: 41842 - protein, 6 aa, synthetic construct
QDVRNI

SEQ ID NO: 41843 - protein, 10 aa, synthetic construct
QSVSFAGTSL

SEQ ID NO: 41844 - protein, 6 aa, synthetic construct
QDVNTA

SEQ ID NO: 41845 - protein, 6 aa, synthetic construct
QDINTA

SEQ ID NO: 41846 - protein, 6 aa, synthetic construct
QDVSTA

SEQ ID NO: 41847 - protein, 6 aa, synthetic construct
DLIHNW

SEQ ID NO: 41848 - protein, 6 aa, synthetic construct
QSVSSY

SEQ ID NO: 41849 - protein, 6 aa, synthetic construct
QSVSSY

SEQ ID NO: 41850 - protein, 6 aa, synthetic construct
QSVSND

SEQ ID NO: 41851 - protein, 6 aa, synthetic construct
QSISSY

SEQ ID NO: 41852 - protein, 6 aa, synthetic construct
ENIYSF

SEQ ID NO: 41853 - protein, 11 aa, synthetic construct
QSIVHSNGNTY

SEQ ID NO: 41854 - protein, 9 aa, synthetic construct
SSDVGGYNY

SEQ ID NO: 41855 - protein, 7 aa, synthetic construct
QSVSSSY

SEQ ID NO: 41856 - protein, 6 aa, synthetic construct
QSVSSY

SEQ ID NO: 41857 - protein, 6 aa, synthetic construct
QSVSSY

SEQ ID NO: 41858 - protein, 7 aa, synthetic construct
QSVSSSY

SEQ ID NO: 41859 - protein, 6 aa, synthetic construct
QSISSY

SEQ ID NO: 41860 - protein, 6 aa, synthetic construct
EDIYDN

SEQ ID NO: 41861 - protein, 6 aa, synthetic construct
EDIYNN

SEQ ID NO: 41862 - protein, 4 aa, synthetic construct
RASN

SEQ ID NO: 41863 - protein, 4 aa, synthetic construct
YTSR

SEQ ID NO: 41864 - protein, 4 aa, synthetic construct
LASN

SEQ ID NO: 41865 - protein, 4 aa, synthetic construct
YTSN

SEQ ID NO: 41866 - protein, 4 aa, synthetic construct
WAST

SEQ ID NO: 41867 - protein, 4 aa, synthetic construct
YTST

SEQ ID NO: 41868 - protein, 4 aa, synthetic construct
AATN

SEQ ID NO: 41869 - protein, 4 aa, synthetic construct
DTSK

SEQ ID NO: 41870 - protein, 4 aa, synthetic construct
HTSR

SEQ ID NO: 41871 - protein, 4 aa, synthetic construct
HTSR

SEQ ID NO: 41872 - protein, 4 aa, synthetic construct
DASN

SEQ ID NO: 41873 - protein, 4 aa, synthetic construct
QMSN

SEQ ID NO: 41874 - protein, 4 aa, synthetic construct
KVSN

SEQ ID NO: 41875 - protein, 4 aa, synthetic construct
DASN

SEQ ID NO: 41876 - protein, 4 aa, synthetic construct
AASS

SEQ ID NO: 41877 - protein, 4 aa, synthetic construct
AAST

SEQ ID NO: 41878 - protein, 4 aa, synthetic construct
AASS

SEQ ID NO: 41879 - protein, 4 aa, synthetic construct
KVSN

SEQ ID NO: 41880 - protein, 4 aa, synthetic construct
LTSN

SEQ ID NO: 41881 - protein, 4 aa, synthetic construct
WAST

SEQ ID NO: 41882 - protein, 4 aa, synthetic construct
WAST

SEQ ID NO: 41883 - protein, 4 aa, synthetic construct
QVSN

SEQ ID NO: 41884 - protein, 4 aa, synthetic construct
YTSR

SEQ ID NO: 41885 - protein, 4 aa, synthetic construct
YTSR

SEQ ID NO: 41886 - protein, 4 aa, synthetic construct
LASN

SEQ ID NO: 41887 - protein, 4 aa, synthetic construct
LVSK

SEQ ID NO: 41888 - protein, 4 aa, synthetic construct
AASN

SEQ ID NO: 41889 - protein, 4 aa, synthetic construct
WAST

SEQ ID NO: 41890 - protein, 4 aa, synthetic construct
GTSS

SEQ ID NO: 41891 - protein, 4 aa, synthetic construct
AAST

SEQ ID NO: 41892 - protein, 4 aa, synthetic construct
AVST

SEQ ID NO: 41893 - protein, 4 aa, synthetic construct
WAST

SEQ ID NO: 41894 - protein, 4 aa, synthetic construct
WAST

SEQ ID NO: 41895 - protein, 4 aa, synthetic construct
AAST

SEQ ID NO: 41896 - protein, 4 aa, synthetic construct
LASN

SEQ ID NO: 41897 - protein, 4 aa, synthetic construct
WAST

SEQ ID NO: 41898 - protein, 4 aa, synthetic construct
SAST

SEQ ID NO: 41899 - protein, 4 aa, synthetic construct
HNNK

SEQ ID NO: 41900 - protein, 4 aa, synthetic construct
HNNK

SEQ ID NO: 41901 - protein, 4 aa, synthetic construct
LTSN

SEQ ID NO: 41902 - protein, 4 aa, synthetic construct
YASN

SEQ ID NO: 41903 - protein, 4 aa, synthetic construct
YASE

SEQ ID NO: 41904 - protein, 4 aa, synthetic construct
LVSK

SEQ ID NO: 41905 - protein, 4 aa, synthetic construct
WAST

SEQ ID NO: 41906 - protein, 4 aa, synthetic construct
WAST

SEQ ID NO: 41907 - protein, 4 aa, synthetic construct
AASS

SEQ ID NO: 41908 - protein, 4 aa, synthetic construct
HASS

SEQ ID NO: 41909 - protein, 4 aa, synthetic construct
RASN

SEQ ID NO: 41910 - protein, 4 aa, synthetic construct
KVSN

SEQ ID NO: 41911 - protein, 4 aa, synthetic construct
SASN

SEQ ID NO: 41912 - protein, 4 aa, synthetic construct
YSSN

SEQ ID NO: 41913 - protein, 7 aa, synthetic construct
VKSDGSY

SEQ ID NO: 41914 - protein, 4 aa, synthetic construct
AASS

SEQ ID NO: 41915 - protein, 4 aa, synthetic construct
DNDR

SEQ ID NO: 41916 - protein, 4 aa, synthetic construct
RSNQ

SEQ ID NO: 41917 - protein, 4 aa, synthetic construct
SASF

SEQ ID NO: 41918 - protein, 4 aa, synthetic construct
DVNK

SEQ ID NO: 41919 - protein, 4 aa, synthetic construct
GAST

SEQ ID NO: 41920 - protein, 4 aa, synthetic construct
DASN

SEQ ID NO: 41921 - protein, 4 aa, synthetic construct
STSN

SEQ ID NO: 41922 - protein, 4 aa, synthetic construct
SASY

SEQ ID NO: 41923 - protein, 4 aa, synthetic construct
YTSR

SEQ ID NO: 41924 - protein, 4 aa, synthetic construct
DTST

SEQ ID NO: 41925 - protein, 4 aa, synthetic construct
NAKT

SEQ ID NO: 41926 - protein, 4 aa, synthetic construct
NAKI

SEQ ID NO: 41927 - protein, 4 aa, synthetic construct
SASY

SEQ ID NO: 41928 - protein, 4 aa, synthetic construct
AATS

SEQ ID NO: 41929 - protein, 4 aa, synthetic construct
AATS

SEQ ID NO: 41930 - protein, 4 aa, synthetic construct
AATS

SEQ ID NO: 41931 - protein, 4 aa, synthetic construct
RTSN

SEQ ID NO: 41932 - protein, 4 aa, synthetic construct
DASN

SEQ ID NO: 41933 - protein, 4 aa, synthetic construct
RVSN

SEQ ID NO: 41934 - protein, 4 aa, synthetic construct
QDRK

SEQ ID NO: 41935 - protein, 4 aa, synthetic construct
EDNQ

SEQ ID NO: 41936 - protein, 4 aa, synthetic construct
KASN

SEQ ID NO: 41937 - protein, 4 aa, synthetic construct
YASE

SEQ ID NO: 41938 - protein, 4 aa, synthetic construct
WAST

SEQ ID NO: 41939 - protein, 4 aa, synthetic construct
SASY

SEQ ID NO: 41940 - protein, 4 aa, synthetic construct
SNNQ

SEQ ID NO: 41941 - protein, 4 aa, synthetic construct
KASS

SEQ ID NO: 41942 - protein, 4 aa, synthetic construct
DDSD

SEQ ID NO: 41943 - protein, 4 aa, synthetic construct
RASN

SEQ ID NO: 41944 - protein, 4 aa, synthetic construct
GASS

SEQ ID NO: 41945 - protein, 4 aa, synthetic construct
GQNN

SEQ ID NO: 41946 - protein, 4 aa, synthetic construct
DTSK

SEQ ID NO: 41947 - protein, 4 aa, synthetic construct
YTST

SEQ ID NO: 41948 - protein, 4 aa, synthetic construct
VASS

SEQ ID NO: 41949 - protein, 4 aa, synthetic construct
GAST

SEQ ID NO: 41950 - protein, 4 aa, synthetic construct
SGST

SEQ ID NO: 41951 - protein, 4 aa, synthetic construct
DNNK

SEQ ID NO: 41952 - protein, 4 aa, synthetic construct
GNSN

SEQ ID NO: 41953 - protein, 4 aa, synthetic construct
SNNQ

SEQ ID NO: 41954 - protein, 4 aa, synthetic construct
LASN

SEQ ID NO: 41955 - protein, 4 aa, synthetic construct
LASN

SEQ ID NO: 41956 - protein, 4 aa, synthetic construct
WAST

SEQ ID NO: 41957 - protein, 4 aa, synthetic construct
WAST

SEQ ID NO: 41958 - protein, 4 aa, synthetic construct
SGSG

SEQ ID NO: 41959 - protein, 4 aa, synthetic construct
ETSK

SEQ ID NO: 41960 - protein, 4 aa, synthetic construct
WAST

SEQ ID NO: 41961 - protein, 4 aa, synthetic construct
RVSN

SEQ ID NO: 41962 - protein, 4 aa, synthetic construct
RMSN

SEQ ID NO: 41963 - protein, 4 aa, synthetic construct
GATT

SEQ ID NO: 41964 - protein, 4 aa, synthetic construct
ATSN

SEQ ID NO: 41965 - protein, 4 aa, synthetic construct
DASN

SEQ ID NO: 41966 - protein, 4 aa, synthetic construct
RANR

SEQ ID NO: 41967 - protein, 4 aa, synthetic construct
LVSK

SEQ ID NO: 41968 - protein, 4 aa, synthetic construct
SPSY

SEQ ID NO: 41969 - protein, 4 aa, synthetic construct
YASN

SEQ ID NO: 41970 - protein, 4 aa, synthetic construct
STSN

SEQ ID NO: 41971 - protein, 4 aa, synthetic construct
STSN

SEQ ID NO: 41972 - protein, 4 aa, synthetic construct
KVSN

SEQ ID NO: 41973 - protein, 4 aa, synthetic construct
DVSK

SEQ ID NO: 41974 - protein, 4 aa, synthetic construct
GNSN

SEQ ID NO: 41975 - protein, 4 aa, synthetic construct
DVSK

SEQ ID NO: 41976 - protein, 4 aa, synthetic construct
DASN

SEQ ID NO: 41977 - protein, 4 aa, synthetic construct
KVSN

SEQ ID NO: 41978 - protein, 4 aa, synthetic construct
DDSD

SEQ ID NO: 41979 - protein, 4 aa, synthetic construct
RASN

SEQ ID NO: 41980 - protein, 4 aa, synthetic construct
AATD

SEQ ID NO: 41981 - protein, 4 aa, synthetic construct
RTSN

SEQ ID NO: 41982 - protein, 4 aa, synthetic construct
AATS

SEQ ID NO: 41983 - protein, 4 aa, synthetic construct
YAAS

SEQ ID NO: 41984 - protein, 4 aa, synthetic construct
YAAS

SEQ ID NO: 41985 - protein, 4 aa, synthetic construct
YYTS

SEQ ID NO: 41986 - protein, 4 aa, synthetic construct
YWAS

SEQ ID NO: 41987 - protein, 4 aa, synthetic construct
YKIS

SEQ ID NO: 41988 - protein, 4 aa, synthetic construct
YAAT

SEQ ID NO: 41989 - protein, 4 aa, synthetic construct
YKVS

SEQ ID NO: 41990 - protein, 4 aa, synthetic construct
YDTS

SEQ ID NO: 41991 - protein, 7 aa, synthetic construct
LEGSGSY

SEQ ID NO: 41992 - protein, 4 aa, synthetic construct
YDAS

SEQ ID NO: 41993 - protein, 4 aa, synthetic construct
YDAS

SEQ ID NO: 41994 - protein, 4 aa, synthetic construct
YASS

SEQ ID NO: 41995 - protein, 4 aa, synthetic construct
YVAS

SEQ ID NO: 41996 - protein, 4 aa, synthetic construct
YAAS

SEQ ID NO: 41997 - protein, 4 aa, synthetic construct
YDVS

SEQ ID NO: 41998 - protein, 4 aa, synthetic construct
HYTS

SEQ ID NO: 41999 - protein, 4 aa, synthetic construct
YWAS

SEQ ID NO: 42000 - protein, 4 aa, synthetic construct
YYTS

SEQ ID NO: 42001 - protein, 4 aa, synthetic construct
YSTS

SEQ ID NO: 42002 - protein, 4 aa, synthetic construct
YDTS

SEQ ID NO: 42003 - protein, 4 aa, synthetic construct
YNTK

SEQ ID NO: 42004 - protein, 4 aa, synthetic construct
YDTS

SEQ ID NO: 42005 - protein, 4 aa, synthetic construct
SGAT

SEQ ID NO: 42006 - protein, 4 aa, synthetic construct
YGAS

SEQ ID NO: 42007 - protein, 4 aa, synthetic construct
YGAS

SEQ ID NO: 42008 - protein, 4 aa, synthetic construct
YGAS

SEQ ID NO: 42009 - protein, 4 aa, synthetic construct
YSAS

SEQ ID NO: 42010 - protein, 4 aa, synthetic construct
YAAS

SEQ ID NO: 42011 - protein, 4 aa, synthetic construct
SAAS

SEQ ID NO: 42012 - protein, 4 aa, synthetic construct
YRIS

SEQ ID NO: 42013 - protein, 4 aa, synthetic construct
YAAS

SEQ ID NO: 42014 - protein, 4 aa, synthetic construct
YGAS

SEQ ID NO: 42015 - protein, 4 aa, synthetic construct
YKVS

SEQ ID NO: 42016 - protein, 4 aa, synthetic construct
YYAS

SEQ ID NO: 42017 - protein, 4 aa, synthetic construct
YAAS

SEQ ID NO: 42018 - protein, 4 aa, synthetic construct
YQDN

SEQ ID NO: 42019 - protein, 4 aa, synthetic construct
YAAS

SEQ ID NO: 42020 - protein, 4 aa, synthetic construct
YLAS

SEQ ID NO: 42021 - protein, 4 aa, synthetic construct
YYTS

SEQ ID NO: 42022 - protein, 4 aa, synthetic construct
YRAS

SEQ ID NO: 42023 - protein, 4 aa, synthetic construct
YDAS

SEQ ID NO: 42024 - protein, 4 aa, synthetic construct
GGTN

SEQ ID NO: 42025 - protein, 4 aa, synthetic construct
YGAS

SEQ ID NO: 42026 - protein, 4 aa, synthetic construct
YGTS

SEQ ID NO: 42027 - protein, 4 aa, synthetic construct
YSAS

SEQ ID NO: 42028 - protein, 4 aa, synthetic construct
YYTS

SEQ ID NO: 42029 - protein, 4 aa, synthetic construct
YGIS

SEQ ID NO: 42030 - protein, 4 aa, synthetic construct
YYTS

SEQ ID NO: 42031 - protein, 4 aa, synthetic construct
YYTS

SEQ ID NO: 42032 - protein, 4 aa, synthetic construct
YGAT

SEQ ID NO: 42033 - protein, 4 aa, synthetic construct
YDDS

SEQ ID NO: 42034 - protein, 4 aa, synthetic construct
YAAT

SEQ ID NO: 42035 - protein, 4 aa, synthetic construct
SAAS

SEQ ID NO: 42036 - protein, 4 aa, synthetic construct
YLVS

SEQ ID NO: 42037 - protein, 4 aa, synthetic construct
SGSS

SEQ ID NO: 42038 - protein, 4 aa, synthetic construct
YDAS

SEQ ID NO: 42039 - protein, 4 aa, synthetic construct
YWAS

SEQ ID NO: 42040 - protein, 4 aa, synthetic construct
YAAS

SEQ ID NO: 42041 - protein, 4 aa, synthetic construct
YSAS

SEQ ID NO: 42042 - protein, 4 aa, synthetic construct
YWTS

SEQ ID NO: 42043 - protein, 4 aa, synthetic construct
YSTS

SEQ ID NO: 42044 - protein, 4 aa, synthetic construct
YSAS

SEQ ID NO: 42045 - protein, 4 aa, synthetic construct
YGAS

SEQ ID NO: 42046 - protein, 4 aa, synthetic construct
YEDS

SEQ ID NO: 42047 - protein, 4 aa, synthetic construct
YSAS

SEQ ID NO: 42048 - protein, 4 aa, synthetic construct
YAAS

SEQ ID NO: 42049 - protein, 4 aa, synthetic construct
YDVS

SEQ ID NO: 42050 - protein, 4 aa, synthetic construct
YAAS

SEQ ID NO: 42051 - protein, 4 aa, synthetic construct
YAAS

SEQ ID NO: 42052 - protein, 4 aa, synthetic construct
YKTS

SEQ ID NO: 42053 - protein, 4 aa, synthetic construct
YHAS

SEQ ID NO: 42054 - protein, 4 aa, synthetic construct
YAAS

SEQ ID NO: 42055 - protein, 4 aa, synthetic construct
YAAS

SEQ ID NO: 42056 - protein, 4 aa, synthetic construct
YWAS

SEQ ID NO: 42057 - protein, 4 aa, synthetic construct
YWAS

SEQ ID NO: 42058 - protein, 4 aa, synthetic construct
YWAS

SEQ ID NO: 42059 - protein, 4 aa, synthetic construct
YWAS

SEQ ID NO: 42060 - protein, 4 aa, synthetic construct
YSTS

SEQ ID NO: 42061 - protein, 4 aa, synthetic construct
YSTS

SEQ ID NO: 42062 - protein, 4 aa, synthetic construct
YLAS

SEQ ID NO: 42063 - protein, 4 aa, synthetic construct
YLAS

SEQ ID NO: 42064 - protein, 4 aa, synthetic construct
YWAS

SEQ ID NO: 42065 - protein, 4 aa, synthetic construct
YWAS

SEQ ID NO: 42066 - protein, 4 aa, synthetic construct
YWAS

SEQ ID NO: 42067 - protein, 4 aa, synthetic construct
YYTS

SEQ ID NO: 42068 - protein, 4 aa, synthetic construct
YYTS

SEQ ID NO: 42069 - protein, 4 aa, synthetic construct
YDDS

SEQ ID NO: 42070 - protein, 4 aa, synthetic construct
YQDS

SEQ ID NO: 42071 - protein, 4 aa, synthetic construct
YQDS

SEQ ID NO: 42072 - protein, 4 aa, synthetic construct
YQDS

SEQ ID NO: 42073 - protein, 4 aa, synthetic construct
YQDS

SEQ ID NO: 42074 - protein, 4 aa, synthetic construct
YEDN

SEQ ID NO: 42075 - protein, 4 aa, synthetic construct
YEDN

SEQ ID NO: 42076 - protein, 4 aa, synthetic construct
YEDN

SEQ ID NO: 42077 - protein, 4 aa, synthetic construct
YEDN

SEQ ID NO: 42078 - protein, 4 aa, synthetic construct
YSAS

SEQ ID NO: 42079 - protein, 4 aa, synthetic construct
YSAS

SEQ ID NO: 42080 - protein, 4 aa, synthetic construct
YSTS

SEQ ID NO: 42081 - protein, 4 aa, synthetic construct
YSTS

SEQ ID NO: 42082 - protein, 4 aa, synthetic construct
YWGS

SEQ ID NO: 42083 - protein, 4 aa, synthetic construct
YWGS

SEQ ID NO: 42084 - protein, 4 aa, synthetic construct
YSTS

SEQ ID NO: 42085 - protein, 4 aa, synthetic construct
YSTS

SEQ ID NO: 42086 - protein, 4 aa, synthetic construct
YSTS

SEQ ID NO: 42087 - protein, 4 aa, synthetic construct
YATS

SEQ ID NO: 42088 - protein, 4 aa, synthetic construct
YGAT

SEQ ID NO: 42089 - protein, 4 aa, synthetic construct
YGAT

SEQ ID NO: 42090 - protein, 4 aa, synthetic construct
YGAT

SEQ ID NO: 42091 - protein, 4 aa, synthetic construct
YGAT

SEQ ID NO: 42092 - protein, 4 aa, synthetic construct
YAAS

SEQ ID NO: 42093 - protein, 4 aa, synthetic construct
YAAS

SEQ ID NO: 42094 - protein, 4 aa, synthetic construct
YAAS

SEQ ID NO: 42095 - protein, 4 aa, synthetic construct
YAAS

SEQ ID NO: 42096 - protein, 4 aa, synthetic construct
YAAS

SEQ ID NO: 42097 - protein, 4 aa, synthetic construct
YAAR

SEQ ID NO: 42098 - protein, 4 aa, synthetic construct
YAAS

SEQ ID NO: 42099 - protein, 4 aa, synthetic construct
YLVS

SEQ ID NO: 42100 - protein, 4 aa, synthetic construct
YLVS

SEQ ID NO: 42101 - protein, 4 aa, synthetic construct
YLVS

SEQ ID NO: 42102 - protein, 4 aa, synthetic construct
YLVS

SEQ ID NO: 42103 - protein, 4 aa, synthetic construct
YLVS

SEQ ID NO: 42104 - protein, 4 aa, synthetic construct
YLVS

SEQ ID NO: 42105 - protein, 4 aa, synthetic construct
LVSK

SEQ ID NO: 42106 - protein, 4 aa, synthetic construct
YAAS

SEQ ID NO: 42107 - protein, 4 aa, synthetic construct
YDTS

SEQ ID NO: 42108 - protein, 4 aa, synthetic construct
YRMS

SEQ ID NO: 42109 - protein, 4 aa, synthetic construct
YHAS

SEQ ID NO: 42110 - protein, 4 aa, synthetic construct
YRMS

SEQ ID NO: 42111 - protein, 4 aa, synthetic construct
YHAS

SEQ ID NO: 42112 - protein, 4 aa, synthetic construct
YDAS

SEQ ID NO: 42113 - protein, 4 aa, synthetic construct
YSGS

SEQ ID NO: 42114 - protein, 4 aa, synthetic construct
YRAS

SEQ ID NO: 42115 - protein, 4 aa, synthetic construct
YSAY

SEQ ID NO: 42116 - protein, 4 aa, synthetic construct
YSAY

SEQ ID NO: 42117 - protein, 4 aa, synthetic construct
YSAS

SEQ ID NO: 42118 - protein, 4 aa, synthetic construct
YGAT

SEQ ID NO: 42119 - protein, 4 aa, synthetic construct
YDAS

SEQ ID NO: 42120 - protein, 4 aa, synthetic construct
YDAS

SEQ ID NO: 42121 - protein, 4 aa, synthetic construct
YYAS

SEQ ID NO: 42122 - protein, 4 aa, synthetic construct
YAAS

SEQ ID NO: 42123 - protein, 4 aa, synthetic construct
YSAS

SEQ ID NO: 42124 - protein, 4 aa, synthetic construct
YKVS

SEQ ID NO: 42125 - protein, 4 aa, synthetic construct
YDVS

SEQ ID NO: 42126 - protein, 4 aa, synthetic construct
YGAS

SEQ ID NO: 42127 - protein, 4 aa, synthetic construct
YGAS

SEQ ID NO: 42128 - protein, 4 aa, synthetic construct
YGAS

SEQ ID NO: 42129 - protein, 4 aa, synthetic construct
YGAS

SEQ ID NO: 42130 - protein, 4 aa, synthetic construct
YDAS

SEQ ID NO: 42131 - protein, 4 aa, synthetic construct
YYAS

SEQ ID NO: 42132 - protein, 4 aa, synthetic construct
YYAS

SEQ ID NO: 42133 - protein, 9 aa, synthetic construct
QQNNKDPPT

SEQ ID NO: 42134 - protein, 9 aa, synthetic construct
QQGSALPPT

SEQ ID NO: 42135 - protein, 9 aa, synthetic construct
LQSRTIPRT

SEQ ID NO: 42136 - protein, 9 aa, synthetic construct
QQYRKLPWT

SEQ ID NO: 42137 - protein, 9 aa, synthetic construct
QNDYSYPYT

SEQ ID NO: 42138 - protein, 9 aa, synthetic construct
QQYSKLPRT

SEQ ID NO: 42139 - protein, 8 aa, synthetic construct
QHFWGTWT

SEQ ID NO: 42140 - protein, 9 aa, synthetic construct
FQGSVYPFT

SEQ ID NO: 42141 - protein, 9 aa, synthetic construct
QQGNTLPYT

SEQ ID NO: 42142 - protein, 9 aa, synthetic construct
QQGNTLPYT

SEQ ID NO: 42143 - protein, 9 aa, synthetic construct
QQRSNWPIT

SEQ ID NO: 42144 - protein, 9 aa, synthetic construct
AQNLELPYT

SEQ ID NO: 42145 - protein, 9 aa, synthetic construct
FQGSQFPYT

SEQ ID NO: 42146 - protein, 11 aa, synthetic construct
QQRNNWPPMYT

SEQ ID NO: 42147 - protein, 9 aa, synthetic construct
QQYDSYPIT

SEQ ID NO: 42148 - protein, 9 aa, synthetic construct
QQSNEDPWT

SEQ ID NO: 42149 - protein, 9 aa, synthetic construct
QQYNSYPPT

SEQ ID NO: 42150 - protein, 9 aa, synthetic construct
FQGSHAPWT

SEQ ID NO: 42151 - protein, 9 aa, synthetic construct
QQWSSHPFT

SEQ ID NO: 42152 - protein, 8 aa, synthetic construct
HQYLSSRT

SEQ ID NO: 42153 - protein, 9 aa, synthetic construct
QQSAHFPIT

SEQ ID NO: 42154 - protein, 9 aa, synthetic construct
FQGSHVPRT

SEQ ID NO: 42155 - protein, 9 aa, synthetic construct
QQGNSLPFT

SEQ ID NO: 42156 - protein, 9 aa, synthetic construct
QQGNSLPFT

SEQ ID NO: 42157 - protein, 9 aa, synthetic construct
WQGTHFPYT

SEQ ID NO: 42158 - protein, 9 aa, synthetic construct
QQSNEDPLT

SEQ ID NO: 42159 - protein, 9 aa, synthetic construct
QQYYSYPWT

SEQ ID NO: 42160 - protein, 9 aa, synthetic construct
QQYYSYPWT

SEQ ID NO: 42161 - protein, 9 aa, synthetic construct
QQYGSSPFT

SEQ ID NO: 42162 - protein, 9 aa, synthetic construct
QQYYTSPYT

SEQ ID NO: 42163 - protein, 10 aa, synthetic construct
QQSGTFPPTT

SEQ ID NO: 42164 - protein, 7 aa, synthetic construct
KQSNLYT

SEQ ID NO: 42165 - protein, 8 aa, synthetic construct
KQSYNLYT

SEQ ID NO: 42166 - protein, 9 aa, synthetic construct
LQYAIYPYT

SEQ ID NO: 42167 - protein, 9 aa, synthetic construct
QQNNYDPWT

SEQ ID NO: 42168 - protein, 9 aa, synthetic construct
QQYSSYPYT

SEQ ID NO: 42169 - protein, 9 aa, synthetic construct
QQHYSTPLT

SEQ ID NO: 42170 - protein, 10 aa, synthetic construct
QSYDSSSIST

SEQ ID NO: 42171 - protein, 11 aa, synthetic construct
ATVEAGLSGSV

SEQ ID NO: 42172 - protein, 9 aa, synthetic construct
QQWRSNPFT

SEQ ID NO: 42173 - protein, 9 aa, synthetic construct
QQDYTSPWT

SEQ ID NO: 42174 - protein, 9 aa, synthetic construct
QQNNNWPTT

SEQ ID NO: 42175 - protein, 9 aa, synthetic construct
WQGTHFPGT

SEQ ID NO: 42176 - protein, 9 aa, synthetic construct
QQSDSLPIT

SEQ ID NO: 42177 - protein, 9 aa, synthetic construct
QNDYSYPLT

SEQ ID NO: 42178 - protein, 9 aa, synthetic construct
QQSYSTPFT

SEQ ID NO: 42179 - protein, 5 aa, synthetic construct
QVLQS

SEQ ID NO: 42180 - protein, 9 aa, synthetic construct
QQSREYPYT

SEQ ID NO: 42181 - protein, 10 aa, synthetic construct
SQSTHVPPLT

SEQ ID NO: 42182 - protein, 6 aa, synthetic construct
QQDYSS

SEQ ID NO: 42183 - protein, 9 aa, synthetic construct
HQYSKLPWT

SEQ ID NO: 42184 - protein, 9 aa, synthetic construct
GTDYTGGYV

SEQ ID NO: 42185 - protein, 9 aa, synthetic construct
QQYNSYPPT

SEQ ID NO: 42186 - protein, 11 aa, synthetic construct
GTWDSSLRGWV

SEQ ID NO: 42187 - protein, 9 aa, synthetic construct
ATWDDSLSG

SEQ ID NO: 42188 - protein, 9 aa, synthetic construct
QQHYTTPPT

SEQ ID NO: 42189 - protein, 10 aa, synthetic construct
GSLVGNWDVI

SEQ ID NO: 42190 - protein, 9 aa, synthetic construct
QQYGTSPYT

SEQ ID NO: 42191 - protein, 9 aa, synthetic construct
QQYTFGPGT

SEQ ID NO: 42192 - protein, 9 aa, synthetic construct
HQYHRSPLT

SEQ ID NO: 42193 - protein, 9 aa, synthetic construct
QHHYSAPWT

SEQ ID NO: 42194 - protein, 9 aa, synthetic construct
QQGNTLPWT

SEQ ID NO: 42195 - protein, 8 aa, synthetic construct
LQYDNLWT

SEQ ID NO: 42196 - protein, 9 aa, synthetic construct
QHFWSNPYT

SEQ ID NO: 42197 - protein, 8 aa, synthetic construct
QHHYGTFT

SEQ ID NO: 42198 - protein, 9 aa, synthetic construct
QQYNTYPFT

SEQ ID NO: 42199 - protein, 9 aa, synthetic construct
QQYWTTPWT

SEQ ID NO: 42200 - protein, 9 aa, synthetic construct
QQYWSSPWT

SEQ ID NO: 42201 - protein, 9 aa, synthetic construct
QQYWSSPWT

SEQ ID NO: 42202 - protein, 9 aa, synthetic construct
QQYHSYPTT

SEQ ID NO: 42203 - protein, 9 aa, synthetic construct
QQYDNLPLT

SEQ ID NO: 42204 - protein, 9 aa, synthetic construct
SQSTHVPYT

SEQ ID NO: 42205 - protein, 10 aa, synthetic construct
QAWDTNLGGV

SEQ ID NO: 42206 - protein, 10 aa, synthetic construct
HSYDSNNHSV

SEQ ID NO: 42207 - protein, 9 aa, synthetic construct
QQGQSYPWT

SEQ ID NO: 42208 - protein, 9 aa, synthetic construct
QHTNSWPTT

SEQ ID NO: 42209 - protein, 9 aa, synthetic construct
QNDYSYPLT

SEQ ID NO: 42210 - protein, 9 aa, synthetic construct
QQHYITPLT

SEQ ID NO: 42211 - protein, 11 aa, synthetic construct
AAWDDSLNGWV

SEQ ID NO: 42212 - protein, 8 aa, synthetic construct
QQYNSYAT

SEQ ID NO: 42213 - protein, 11 aa, synthetic construct
QVWDSSSDHVV

SEQ ID NO: 42214 - protein, 9 aa, synthetic construct
QQSNEDPPT

SEQ ID NO: 42215 - protein, 8 aa, synthetic construct
QQYSNSWT

SEQ ID NO: 42216 - protein, 11 aa, synthetic construct
DSRVSTGNHVV

SEQ ID NO: 42217 - protein, 9 aa, synthetic construct
HQRRSYPFT

SEQ ID NO: 42218 - protein, 9 aa, synthetic construct
LQYGNLLYA

SEQ ID NO: 42219 - protein, 9 aa, synthetic construct
LQVYSTPRT

SEQ ID NO: 42220 - protein, 9 aa, synthetic construct
HQYSNWMCS

SEQ ID NO: 42221 - protein, 8 aa, synthetic construct
QQHHEYPL

SEQ ID NO: 42222 - protein, 11 aa, synthetic construct
GTWDGSLYTML

SEQ ID NO: 42223 - protein, 12 aa, synthetic construct
QSYDSSLSGSGV

SEQ ID NO: 42224 - protein, 13 aa, synthetic construct
CATWDDNLNVHYV

SEQ ID NO: 42225 - protein, 9 aa, synthetic construct
LQSRIFPRT

SEQ ID NO: 42226 - protein, 9 aa, synthetic construct
LQSRTIPRT

SEQ ID NO: 42227 - protein, 9 aa, synthetic construct
QNDYSYPYT

SEQ ID NO: 42228 - protein, 9 aa, synthetic construct
QNDYSYPYT

SEQ ID NO: 42229 - protein, 9 aa, synthetic construct
QQHNKYPYT

SEQ ID NO: 42230 - protein, 9 aa, synthetic construct
QQWNYPSWT

SEQ ID NO: 42231 - protein, 9 aa, synthetic construct
QQYYDTPLT

SEQ ID NO: 42232 - protein, 10 aa, synthetic construct
LQTTHFPPWT

SEQ ID NO: 42233 - protein, 9 aa, synthetic construct
MQHLEYPIT

SEQ ID NO: 42234 - protein, 9 aa, synthetic construct
QQSWNTPWT

SEQ ID NO: 42235 - protein, 9 aa, synthetic construct
QQWTFNPPT

SEQ ID NO: 42236 - protein, 9 aa, synthetic construct
QQRSNWPIT

SEQ ID NO: 42237 - protein, 9 aa, synthetic construct
LQYDEFPLT

SEQ ID NO: 42238 - protein, 9 aa, synthetic construct
WQGTHFPRT

SEQ ID NO: 42239 - protein, 9 aa, synthetic construct
QQLYSTPYT

SEQ ID NO: 42240 - protein, 9 aa, synthetic construct
QHSWEIPLT

SEQ ID NO: 42241 - protein, 9 aa, synthetic construct
QQYSGYPLT

SEQ ID NO: 42242 - protein, 9 aa, synthetic construct
QQYSGYPLT

SEQ ID NO: 42243 - protein, 9 aa, synthetic construct
SQSTHVPWT

SEQ ID NO: 42244 - protein, 10 aa, synthetic construct
AAWDDSLSEF

SEQ ID NO: 42245 - protein, 12 aa, synthetic construct
QSYDSSLSGSYV

SEQ ID NO: 42246 - protein, 10 aa, synthetic construct
SSYTSSSTLV

SEQ ID NO: 42247 - protein, 8 aa, synthetic construct
QQYDNLPL

SEQ ID NO: 42248 - protein, 9 aa, synthetic construct
FQGSHVPWT

SEQ ID NO: 42249 - protein, 11 aa, synthetic construct
QSYDSSLSGSV

SEQ ID NO: 42250 - protein, 9 aa, synthetic construct
QQNNEDPWT

SEQ ID NO: 42251 - protein, 9 aa, synthetic construct
QQYWSSPWT

SEQ ID NO: 42252 - protein, 9 aa, synthetic construct
QQYHSYPTT

SEQ ID NO: 42253 - protein, 9 aa, synthetic construct
QQYWTTPWT

SEQ ID NO: 42254 - protein, 7 aa, synthetic construct
QQSYNWP

SEQ ID NO: 42255 - protein, 7 aa, synthetic construct
QQLNSYP

SEQ ID NO: 42256 - protein, 7 aa, synthetic construct
QQGNTLP

SEQ ID NO: 42257 - protein, 7 aa, synthetic construct
QQYYNYP

SEQ ID NO: 42258 - protein, 7 aa, synthetic construct
FQGSHVP

SEQ ID NO: 42259 - protein, 7 aa, synthetic construct
QHFWGTP

SEQ ID NO: 42260 - protein, 7 aa, synthetic construct
FQGSHVP

SEQ ID NO: 42261 - protein, 7 aa, synthetic construct
QQWSSYP

SEQ ID NO: 42262 - protein, 8 aa, synthetic construct
GTDYPGNY

SEQ ID NO: 42263 - protein, 7 aa, synthetic construct
QQYGNLP

SEQ ID NO: 42264 - protein, 7 aa, synthetic construct
QQYGNLP

SEQ ID NO: 42265 - protein, 7 aa, synthetic construct
LQHNNFP

SEQ ID NO: 42266 - protein, 7 aa, synthetic construct
QHYGRTP

SEQ ID NO: 42267 - protein, 7 aa, synthetic construct
QQVNSYP

SEQ ID NO: 42268 - protein, 8 aa, synthetic construct
ASYAGNYN

SEQ ID NO: 42269 - protein, 7 aa, synthetic construct
QQYSILP

SEQ ID NO: 42270 - protein, 6 aa, synthetic construct
HQYLSS

SEQ ID NO: 42271 - protein, 7 aa, synthetic construct
QQGNTLP

SEQ ID NO: 42272 - protein, 7 aa, synthetic construct
HQYHRSP

SEQ ID NO: 42273 - protein, 7 aa, synthetic construct
QQWSNYP

SEQ ID NO: 42274 - protein, 7 aa, synthetic construct
QHHYGTP

SEQ ID NO: 42275 - protein, 7 aa, synthetic construct
QQWNINP

SEQ ID NO: 42276 - protein, 7 aa, synthetic construct
QQSWNTP

SEQ ID NO: 42277 - protein, 7 aa, synthetic construct
QQYGYSP

SEQ ID NO: 42278 - protein, 7 aa, synthetic construct
QQYHHSP

SEQ ID NO: 42279 - protein, 5 aa, synthetic construct
QQYVS

SEQ ID NO: 42280 - protein, 7 aa, synthetic construct
QQHYTTP

SEQ ID NO: 42281 - protein, 7 aa, synthetic construct
QQSNSFP

SEQ ID NO: 42282 - protein, 7 aa, synthetic construct
QQAKSFP

SEQ ID NO: 42283 - protein, 7 aa, synthetic construct
MQSTHVP

SEQ ID NO: 42284 - protein, 7 aa, synthetic construct
QQLNSYP

SEQ ID NO: 42285 - protein, 7 aa, synthetic construct
QQYDRSP

SEQ ID NO: 42286 - protein, 7 aa, synthetic construct
MQGTHWP

SEQ ID NO: 42287 - protein, 7 aa, synthetic construct
QQDYSSP

SEQ ID NO: 42288 - protein, 7 aa, synthetic construct
QQTYSNP

SEQ ID NO: 42289 - protein, 7 aa, synthetic construct
QAWDSDT

SEQ ID NO: 42290 - protein, 7 aa, synthetic construct
QQSYITP

SEQ ID NO: 42291 - protein, 7 aa, synthetic construct
QHSGELP

SEQ ID NO: 42292 - protein, 7 aa, synthetic construct
QQYGKLP

SEQ ID NO: 42293 - protein, 7 aa, synthetic construct
QQTNEDP

SEQ ID NO: 42294 - protein, 7 aa, synthetic construct
QQKKSMP

SEQ ID NO: 42295 - protein, 5 aa, synthetic construct
ALWYS

SEQ ID NO: 42296 - protein, 7 aa, synthetic construct
QQYTNEH

SEQ ID NO: 42297 - protein, 7 aa, synthetic construct
QQWSSYP

SEQ ID NO: 42298 - protein, 7 aa, synthetic construct
QQYITYP

SEQ ID NO: 42299 - protein, 7 aa, synthetic construct
QQYSKLP

SEQ ID NO: 42300 - protein, 7 aa, synthetic construct
LQGTHQP

SEQ ID NO: 42301 - protein, 7 aa, synthetic construct
QQGNTLP

SEQ ID NO: 42302 - protein, 7 aa, synthetic construct
QQGNTLP

SEQ ID NO: 42303 - protein, 7 aa, synthetic construct
QQSWNTP

SEQ ID NO: 42304 - protein, 9 aa, synthetic construct
QVWDSSSDH

SEQ ID NO: 42305 - protein, 7 aa, synthetic construct
QQYWSSP

SEQ ID NO: 42306 - protein, 7 aa, synthetic construct
QQSKEVP

SEQ ID NO: 42307 - protein, 7 aa, synthetic construct
QQFSELP

SEQ ID NO: 42308 - protein, 7 aa, synthetic construct
QQLYSSP

SEQ ID NO: 42309 - protein, 7 aa, synthetic construct
QQRSNWP

SEQ ID NO: 42310 - protein, 7 aa, synthetic construct
QQYYSTP

SEQ ID NO: 42311 - protein, 7 aa, synthetic construct
QQDYNFP

SEQ ID NO: 42312 - protein, 7 aa, synthetic construct
QQHFRTP

SEQ ID NO: 42313 - protein, 6 aa, synthetic construct
QQYSLY

SEQ ID NO: 42314 - protein, 7 aa, synthetic construct
HQWSSYP

SEQ ID NO: 42315 - protein, 7 aa, synthetic construct
QQAYTTP

SEQ ID NO: 42316 - protein, 5 aa, synthetic construct
QQYVS

SEQ ID NO: 42317 - protein, 7 aa, synthetic construct
QSTYGDD

SEQ ID NO: 42318 - protein, 7 aa, synthetic construct
QQYHTYP

SEQ ID NO: 42319 - protein, 7 aa, synthetic construct
QQSYSTP

SEQ ID NO: 42320 - protein, 6 aa, synthetic construct
TSYGSY

SEQ ID NO: 42321 - protein, 7 aa, synthetic construct
QQSYSTP

SEQ ID NO: 42322 - protein, 7 aa, synthetic construct
QQSYSTP

SEQ ID NO: 42323 - protein, 7 aa, synthetic construct
QQSWNGP

SEQ ID NO: 42324 - protein, 7 aa, synthetic construct
LQHYTSP

SEQ ID NO: 42325 - protein, 7 aa, synthetic construct
QHLKSYP

SEQ ID NO: 42326 - protein, 7 aa, synthetic construct
QQSYSTP

SEQ ID NO: 42327 - protein, 7 aa, synthetic construct
QQYNSYP

SEQ ID NO: 42328 - protein, 7 aa, synthetic construct
QQYNSYP

SEQ ID NO: 42329 - protein, 7 aa, synthetic construct
QQYNSYP

SEQ ID NO: 42330 - protein, 7 aa, synthetic construct
QQYNSYP

SEQ ID NO: 42331 - protein, 7 aa, synthetic construct
QQRSSSP

SEQ ID NO: 42332 - protein, 7 aa, synthetic construct
QQRSSSP

SEQ ID NO: 42333 - protein, 7 aa, synthetic construct
QHSRELP

SEQ ID NO: 42334 - protein, 7 aa, synthetic construct
QQHWSYP

SEQ ID NO: 42335 - protein, 6 aa, synthetic construct
HQYLSS

SEQ ID NO: 42336 - protein, 6 aa, synthetic construct
HQYLSS

SEQ ID NO: 42337 - protein, 6 aa, synthetic construct
HQYLSS

SEQ ID NO: 42338 - protein, 7 aa, synthetic construct
QQGNTLP

SEQ ID NO: 42339 - protein, 7 aa, synthetic construct
QQGNTLP

SEQ ID NO: 42340 - protein, 9 aa, synthetic construct
QVWDSSSDH

SEQ ID NO: 42341 - protein, 6 aa, synthetic construct
QAWDSD

SEQ ID NO: 42342 - protein, 6 aa, synthetic construct
QAWDSD

SEQ ID NO: 42343 - protein, 6 aa, synthetic construct
QAWDSD

SEQ ID NO: 42344 - protein, 6 aa, synthetic construct
QAWDSD

SEQ ID NO: 42345 - protein, 4 aa, synthetic construct
QSYD

SEQ ID NO: 42346 - protein, 4 aa, synthetic construct
QSYD

SEQ ID NO: 42347 - protein, 4 aa, synthetic construct
QSYD

SEQ ID NO: 42348 - protein, 4 aa, synthetic construct
QSYD

SEQ ID NO: 42349 - protein, 6 aa, synthetic construct
QQDYSS

SEQ ID NO: 42350 - protein, 6 aa, synthetic construct
QQDYSS

SEQ ID NO: 42351 - protein, 7 aa, synthetic construct
QQYSGYP

SEQ ID NO: 42352 - protein, 7 aa, synthetic construct
QQYSGYP

SEQ ID NO: 42353 - protein, 7 aa, synthetic construct
QNDYTYP

SEQ ID NO: 42354 - protein, 7 aa, synthetic construct
QNDYTYP

SEQ ID NO: 42355 - protein, 7 aa, synthetic construct
QQRSIYP

SEQ ID NO: 42356 - protein, 7 aa, synthetic construct
QQRSIYP

SEQ ID NO: 42357 - protein, 7 aa, synthetic construct
QQRSIYP

SEQ ID NO: 42358 - protein, 7 aa, synthetic construct
QQWSSYP

SEQ ID NO: 42359 - protein, 7 aa, synthetic construct
QQSWNTP

SEQ ID NO: 42360 - protein, 7 aa, synthetic construct
QQSWNTP

SEQ ID NO: 42361 - protein, 7 aa, synthetic construct
QQSWNTP

SEQ ID NO: 42362 - protein, 7 aa, synthetic construct
QQSWNTP

SEQ ID NO: 42363 - protein, 7 aa, synthetic construct
QQSNEDP

SEQ ID NO: 42364 - protein, 7 aa, synthetic construct
QQSNEDP

SEQ ID NO: 42365 - protein, 7 aa, synthetic construct
QQSNEDP

SEQ ID NO: 42366 - protein, 7 aa, synthetic construct
QQSNEDP

SEQ ID NO: 42367 - protein, 7 aa, synthetic construct
QQSNEDP

SEQ ID NO: 42368 - protein, 7 aa, synthetic construct
QQSNEDP

SEQ ID NO: 42369 - protein, 7 aa, synthetic construct
QQSNDDP

SEQ ID NO: 42370 - protein, 7 aa, synthetic construct
FQGTHFP

SEQ ID NO: 42371 - protein, 7 aa, synthetic construct
FQGTHFP

SEQ ID NO: 42372 - protein, 7 aa, synthetic construct
WQGTHFP

SEQ ID NO: 42373 - protein, 7 aa, synthetic construct
WQGTHFP

SEQ ID NO: 42374 - protein, 7 aa, synthetic construct
FQGTHFP

SEQ ID NO: 42375 - protein, 7 aa, synthetic construct
FQGTHFP

SEQ ID NO: 42376 - protein, 7 aa, synthetic construct
FQGTHFP

SEQ ID NO: 42377 - protein, 7 aa, synthetic construct
QQSNEDP

SEQ ID NO: 42378 - protein, 7 aa, synthetic construct
QQWSSNP

SEQ ID NO: 42379 - protein, 7 aa, synthetic construct
GQLLENP

SEQ ID NO: 42380 - protein, 7 aa, synthetic construct
QQTRESP

SEQ ID NO: 42381 - protein, 7 aa, synthetic construct
GQLLENP

SEQ ID NO: 42382 - protein, 7 aa, synthetic construct
QQTRESP

SEQ ID NO: 42383 - protein, 7 aa, synthetic construct
QQRSNWP

SEQ ID NO: 42384 - protein, 7 aa, synthetic construct
QQHYSPP

SEQ ID NO: 42385 - protein, 7 aa, synthetic construct
QQSREYP

SEQ ID NO: 42386 - protein, 7 aa, synthetic construct
QQYSRYS

SEQ ID NO: 42387 - protein, 7 aa, synthetic construct
QQYSRYS

SEQ ID NO: 42388 - protein, 7 aa, synthetic construct
QQYLYQP

SEQ ID NO: 42389 - protein, 7 aa, synthetic construct
QQYWTTP

SEQ ID NO: 42390 - protein, 7 aa, synthetic construct
QQRSNWP

SEQ ID NO: 42391 - protein, 7 aa, synthetic construct
QQRSDWP

SEQ ID NO: 42392 - protein, 7 aa, synthetic construct
QQDYTSP

SEQ ID NO: 42393 - protein, 7 aa, synthetic construct
QQSYSTP

SEQ ID NO: 42394 - protein, 6 aa, synthetic construct
QQTNRY

SEQ ID NO: 42395 - protein, 7 aa, synthetic construct
FQGSHVP

SEQ ID NO: 42396 - protein, 8 aa, synthetic construct
SSYTSSST

SEQ ID NO: 42397 - protein, 7 aa, synthetic construct
QQYGSSP

SEQ ID NO: 42398 - protein, 7 aa, synthetic construct
QQRSNWP

SEQ ID NO: 42399 - protein, 7 aa, synthetic construct
QQRSNWP

SEQ ID NO: 42400 - protein, 7 aa, synthetic construct
QQYGSSP

SEQ ID NO: 42401 - protein, 7 aa, synthetic construct
QQSDGNP

SEQ ID NO: 42402 - protein, 7 aa, synthetic construct
LQDSEYP

SEQ ID NO: 42403 - protein, 7 aa, synthetic construct
LQDSEYP

SEQ ID NO: 42404 - protein, 7 aa, synthetic construct
GYAFSSY

SEQ ID NO: 42405 - protein, 6 aa, synthetic construct
GYTFTD

SEQ ID NO: 42406 - protein, 8 aa, synthetic construct
GYTFRHYS

SEQ ID NO: 42407 - protein, 8 aa, synthetic construct
GGTFSNYW

SEQ ID NO: 42408 - protein, 8 aa, synthetic construct
GYSFTDYY

SEQ ID NO: 42409 - protein, 8 aa, synthetic construct
GYTFSNYW

SEQ ID NO: 42410 - protein, 8 aa, synthetic construct
GYTFTDYY

SEQ ID NO: 42411 - protein, 10 aa, synthetic construct
GGSISTSGMG

SEQ ID NO: 42412 - protein, 8 aa, synthetic construct
GVSLPDYG

SEQ ID NO: 42413 - protein, 8 aa, synthetic construct
GVSLPDYG

SEQ ID NO: 42414 - protein, 8 aa, synthetic construct
GFTFNDYA

SEQ ID NO: 42415 - protein, 8 aa, synthetic construct
GYAFSYSW

SEQ ID NO: 42416 - protein, 8 aa, synthetic construct
GYEFSRSW

SEQ ID NO: 42417 - protein, 8 aa, synthetic construct
GGTFSSYA

SEQ ID NO: 42418 - protein, 8 aa, synthetic construct
GGSFSAYY

SEQ ID NO: 42419 - protein, 8 aa, synthetic construct
GYTFTDYY

SEQ ID NO: 42420 - protein, 8 aa, synthetic construct
GFAFSSST

SEQ ID NO: 42421 - protein, 8 aa, synthetic construct
GFTFSSYG

SEQ ID NO: 42422 - protein, 9 aa, synthetic construct
GFSITSDYS

SEQ ID NO: 42423 - protein, 8 aa, synthetic construct
GYTFTSYY

SEQ ID NO: 42424 - protein, 7 aa, synthetic construct
GYTFTNY

SEQ ID NO: 42425 - protein, 8 aa, synthetic construct
GYTFTNYG

SEQ ID NO: 42426 - protein, 8 aa, synthetic construct
GYSFTAYS

SEQ ID NO: 42427 - protein, 8 aa, synthetic construct
GYSFTAYS

SEQ ID NO: 42428 - protein, 8 aa, synthetic construct
GYTFTNYG

SEQ ID NO: 42429 - protein, 7 aa, synthetic construct
GYTFTSY

SEQ ID NO: 42430 - protein, 8 aa, synthetic construct
GYTFSSYW

SEQ ID NO: 42431 - protein, 8 aa, synthetic construct
GYTLTDHT

SEQ ID NO: 42432 - protein, 8 aa, synthetic construct
GDSITSYY

SEQ ID NO: 42433 - protein, 8 aa, synthetic construct
GFTFSSYA

SEQ ID NO: 42434 - protein, 8 aa, synthetic construct
GFTFSSHG

SEQ ID NO: 42435 - protein, 8 aa, synthetic construct
GYTFTEYI

SEQ ID NO: 42436 - protein, 8 aa, synthetic construct
GFTFSTSG

SEQ ID NO: 42437 - protein, 8 aa, synthetic construct
GYTFTSYF

SEQ ID NO: 42438 - protein, 8 aa, synthetic construct
GYTFTSYV

SEQ ID NO: 42439 - protein, 9 aa, synthetic construct
SGFDFSRYW

SEQ ID NO: 42440 - protein, 8 aa, synthetic construct
GYSFTTYW

SEQ ID NO: 42441 - protein, 8 aa, synthetic construct
GYTLTELS

SEQ ID NO: 42442 - protein, 8 aa, synthetic construct
GYTLTELS

SEQ ID NO: 42443 - protein, 10 aa, synthetic construct
GFSLSTSGMG

SEQ ID NO: 42444 - protein, 8 aa, synthetic construct
GYTFTNYG

SEQ ID NO: 42445 - protein, 8 aa, synthetic construct
GFSLTNYG

SEQ ID NO: 42446 - protein, 8 aa, synthetic construct
GFNIEDYY

SEQ ID NO: 42447 - protein, 8 aa, synthetic construct
GFTFSSYG

SEQ ID NO: 42448 - protein, 8 aa, synthetic construct
GYAFTNYW

SEQ ID NO: 42449 - protein, 8 aa, synthetic construct
GGTFSSYA

SEQ ID NO: 42450 - protein, 8 aa, synthetic construct
GYTFTAHI

SEQ ID NO: 42451 - protein, 8 aa, synthetic construct
GYTFTGYF

SEQ ID NO: 42452 - protein, 8 aa, synthetic construct
GSSFTGYN

SEQ ID NO: 42453 - protein, 8 aa, synthetic construct
GFSVTNYG

SEQ ID NO: 42454 - protein, 8 aa, synthetic construct
GFAFSHYA

SEQ ID NO: 42455 - protein, 6 aa, synthetic construct
GFSLSY

SEQ ID NO: 42456 - protein, 8 aa, synthetic construct
GFTFSRYK

SEQ ID NO: 42457 - protein, 8 aa, synthetic construct
GFTFSNYA

SEQ ID NO: 42458 - protein, 8 aa, synthetic construct
GFTFSDYY

SEQ ID NO: 42459 - protein, 8 aa, synthetic construct
GFNIKDTY

SEQ ID NO: 42460 - protein, 10 aa, synthetic construct
GDSTAACNSF

SEQ ID NO: 42461 - protein, 8 aa, synthetic construct
GGTFSMYG

SEQ ID NO: 42462 - protein, 8 aa, synthetic construct
GFTFSWYS

SEQ ID NO: 42463 - protein, 8 aa, synthetic construct
GFSLTKYG

SEQ ID NO: 42464 - protein, 8 aa, synthetic construct
GFTFSRNG

SEQ ID NO: 42465 - protein, 8 aa, synthetic construct
GYTFTRYW

SEQ ID NO: 42466 - protein, 8 aa, synthetic construct
GYIFTNYN

SEQ ID NO: 42467 - protein, 15 aa, synthetic construct
ELVRPGTGYAFTNYL

SEQ ID NO: 42468 - protein, 8 aa, synthetic construct
GFSLTSYG

SEQ ID NO: 42469 - protein, 8 aa, synthetic construct
GFTFSNYW

SEQ ID NO: 42470 - protein, 10 aa, synthetic construct
GYSITIDYTW

SEQ ID NO: 42471 - protein, 10 aa, synthetic construct
GYSITSDYTW

SEQ ID NO: 42472 - protein, 10 aa, synthetic construct
GYSITSDYTW

SEQ ID NO: 42473 - protein, 9 aa, synthetic construct
GFSFNTYAM

SEQ ID NO: 42474 - protein, 8 aa, synthetic construct
GFTFSSYA

SEQ ID NO: 42475 - protein, 8 aa, synthetic construct
GYTFTGYV

SEQ ID NO: 42476 - protein, 8 aa, synthetic construct
GYTFTGYY

SEQ ID NO: 42477 - protein, 8 aa, synthetic construct
GFTFSSYA

SEQ ID NO: 42478 - protein, 8 aa, synthetic construct
GYSFTGYF

SEQ ID NO: 42479 - protein, 8 aa, synthetic construct
GYTFTDHA

SEQ ID NO: 42480 - protein, 8 aa, synthetic construct
GYTFTDHA

SEQ ID NO: 42481 - protein, 8 aa, synthetic construct
GYTFTNYG

SEQ ID NO: 42482 - protein, 8 aa, synthetic construct
GYSFTNFW

SEQ ID NO: 42483 - protein, 8 aa, synthetic construct
GYNFSNKW

SEQ ID NO: 42484 - protein, 8 aa, synthetic construct
GFTFDDYG

SEQ ID NO: 42485 - protein, 8 aa, synthetic construct
GYIFTNYG

SEQ ID NO: 42486 - protein, 8 aa, synthetic construct
GFTFSSYD

SEQ ID NO: 42487 - protein, 8 aa, synthetic construct
GYTFTSYA

SEQ ID NO: 42488 - protein, 8 aa, synthetic construct
GYTFTNFW

SEQ ID NO: 42489 - protein, 8 aa, synthetic construct
GYTFTSYW

SEQ ID NO: 42490 - protein, 10 aa, synthetic construct
GFRFTFNNYY

SEQ ID NO: 42491 - protein, 8 aa, synthetic construct
GFTFSRYA

SEQ ID NO: 42492 - protein, 8 aa, synthetic construct
GYTITSGY

SEQ ID NO: 42493 - protein, 8 aa, synthetic construct
GFTFSNAW

SEQ ID NO: 42494 - protein, 8 aa, synthetic construct
GFTFDDYA

SEQ ID NO: 42495 - protein, 8 aa, synthetic construct
GGTFSSYA

SEQ ID NO: 42496 - protein, 8 aa, synthetic construct
GYTFTDYS

SEQ ID NO: 42497 - protein, 8 aa, synthetic construct
GYTFTHYS

SEQ ID NO: 42498 - protein, 8 aa, synthetic construct
GYTFTDYY

SEQ ID NO: 42499 - protein, 8 aa, synthetic construct
GYTFTDYY

SEQ ID NO: 42500 - protein, 8 aa, synthetic construct
GYTFTSYW

SEQ ID NO: 42501 - protein, 8 aa, synthetic construct
GFTFSDYN

SEQ ID NO: 42502 - protein, 8 aa, synthetic construct
GFSLTSYH

SEQ ID NO: 42503 - protein, 8 aa, synthetic construct
GYRIKDFL

SEQ ID NO: 42504 - protein, 8 aa, synthetic construct
GYTFTSYV

SEQ ID NO: 42505 - protein, 8 aa, synthetic construct
GYAFSSYW

SEQ ID NO: 42506 - protein, 8 aa, synthetic construct
GYTFTSYN

SEQ ID NO: 42507 - protein, 8 aa, synthetic construct
GFTFHDYA

SEQ ID NO: 42508 - protein, 8 aa, synthetic construct
GYTFTNYD

SEQ ID NO: 42509 - protein, 8 aa, synthetic construct
GYTFKDTY

SEQ ID NO: 42510 - protein, 8 aa, synthetic construct
GYTFTDYY

SEQ ID NO: 42511 - protein, 8 aa, synthetic construct
GYSFTDYY

SEQ ID NO: 42512 - protein, 9 aa, synthetic construct
GYSITSAYY

SEQ ID NO: 42513 - protein, 9 aa, synthetic construct
GYSITSAYY

SEQ ID NO: 42514 - protein, 8 aa, synthetic construct
GFTFGHYW

SEQ ID NO: 42515 - protein, 8 aa, synthetic construct
GFTFGSFS

SEQ ID NO: 42516 - protein, 8 aa, synthetic construct
GFSFSGTA

SEQ ID NO: 42517 - protein, 8 aa, synthetic construct
GFTFSSYA

SEQ ID NO: 42518 - protein, 8 aa, synthetic construct
GVTLSDYG

SEQ ID NO: 42519 - protein, 8 aa, synthetic construct
GYTFTDFY

SEQ ID NO: 42520 - protein, 8 aa, synthetic construct
GYSFTSYW

SEQ ID NO: 42521 - protein, 8 aa, synthetic construct
GYTFTNYY

SEQ ID NO: 42522 - protein, 9 aa, synthetic construct
GYSITSDYT

SEQ ID NO: 42523 - protein, 8 aa, synthetic construct
GFSFNTYA

SEQ ID NO: 42524 - protein, 9 aa, synthetic construct
GYSITIDYT

SEQ ID NO: 42525 - protein, 8 aa, synthetic construct
GFTFSNFE

SEQ ID NO: 42526 - protein, 8 aa, synthetic construct
GFTFSTYG

SEQ ID NO: 42527 - protein, 8 aa, synthetic construct
GFAFSIYD

SEQ ID NO: 42528 - protein, 9 aa, synthetic construct
GYSITSDYA

SEQ ID NO: 42529 - protein, 8 aa, synthetic construct
GLTIEDYY

SEQ ID NO: 42530 - protein, 8 aa, synthetic construct
GFSLTNYG

SEQ ID NO: 42531 - protein, 8 aa, synthetic construct
GYTFTSYW

SEQ ID NO: 42532 - protein, 8 aa, synthetic construct
GYTFTGSW

SEQ ID NO: 42533 - protein, 8 aa, synthetic construct
GFTFSDYY

SEQ ID NO: 42534 - protein, 10 aa, synthetic construct
GGSISSGGFY

SEQ ID NO: 42535 - protein, 8 aa, synthetic construct
GGSISSYY

SEQ ID NO: 42536 - protein, 10 aa, synthetic construct
GFSLINARMG

SEQ ID NO: 42537 - protein, 8 aa, synthetic construct
GFTFKNYG

SEQ ID NO: 42538 - protein, 10 aa, synthetic construct
GGSISSSTYY

SEQ ID NO: 42539 - protein, 8 aa, synthetic construct
GYTFNTYA

SEQ ID NO: 42540 - protein, 8 aa, synthetic construct
GYAFSSSW

SEQ ID NO: 42541 - protein, 8 aa, synthetic construct
GYTFTTYW

SEQ ID NO: 42542 - protein, 8 aa, synthetic construct
GFTFSDYF

SEQ ID NO: 42543 - protein, 8 aa, synthetic construct
GYAFSNSW

SEQ ID NO: 42544 - protein, 8 aa, synthetic construct
GYSFIEYT

SEQ ID NO: 42545 - protein, 8 aa, synthetic construct
GYTFSDYW

SEQ ID NO: 42546 - protein, 8 aa, synthetic construct
GYAFSSSW

SEQ ID NO: 42547 - protein, 8 aa, synthetic construct
GYAFSSYW

SEQ ID NO: 42548 - protein, 8 aa, synthetic construct
GFTFSSYA

SEQ ID NO: 42549 - protein, 8 aa, synthetic construct
GFTFSGRS

SEQ ID NO: 42550 - protein, 8 aa, synthetic construct
GFTFSSYG

SEQ ID NO: 42551 - protein, 8 aa, synthetic construct
GFNIKDTY

SEQ ID NO: 42552 - protein, 8 aa, synthetic construct
GFTFSDYY

SEQ ID NO: 42553 - protein, 8 aa, synthetic construct
GFTFSDHY

SEQ ID NO: 42554 - protein, 8 aa, synthetic construct
GFTFRNYG

SEQ ID NO: 42555 - protein, 8 aa, synthetic construct
GFPFSSYD

SEQ ID NO: 42556 - protein, 8 aa, synthetic construct
GASISSFY

SEQ ID NO: 42557 - protein, 8 aa, synthetic construct
GYTFTNYY

SEQ ID NO: 42558 - protein, 8 aa, synthetic construct
GYTFTTYY

SEQ ID NO: 42559 - protein, 10 aa, synthetic construct
GGSINNNNYY

SEQ ID NO: 42560 - protein, 8 aa, synthetic construct
GDTFKRYY

SEQ ID NO: 42561 - protein, 8 aa, synthetic construct
GFTFSSYA

SEQ ID NO: 42562 - protein, 8 aa, synthetic construct
GFTFSSYG

SEQ ID NO: 42563 - protein, 8 aa, synthetic construct
GFTFSDAW

SEQ ID NO: 42564 - protein, 8 aa, synthetic construct
GFNIKDTY

SEQ ID NO: 42565 - protein, 8 aa, synthetic construct
GGTFSSYA

SEQ ID NO: 42566 - protein, 8 aa, synthetic construct
GFTFSNAW

SEQ ID NO: 42567 - protein, 8 aa, synthetic construct
GYTFTSYY

SEQ ID NO: 42568 - protein, 8 aa, synthetic construct
GYTFTNYL

SEQ ID NO: 42569 - protein, 8 aa, synthetic construct
GFTFSRYW

SEQ ID NO: 42570 - protein, 8 aa, synthetic construct
GYTFTGYN

SEQ ID NO: 42571 - protein, 8 aa, synthetic construct
GYRFTNYW

SEQ ID NO: 42572 - protein, 8 aa, synthetic construct
GFAFSIYD

SEQ ID NO: 42573 - protein, 8 aa, synthetic construct
GFAFSIYD

SEQ ID NO: 42574 - protein, 8 aa, synthetic construct
GYAFSSYW

SEQ ID NO: 42575 - protein, 10 aa, synthetic construct
GGSISSGSYF

SEQ ID NO: 42576 - protein, 9 aa, synthetic construct
GYSITSDYT

SEQ ID NO: 42577 - protein, 8 aa, synthetic construct
GDSITSGY

SEQ ID NO: 42578 - protein, 8 aa, synthetic construct
GFSLSTSG

SEQ ID NO: 42579 - protein, 11 aa, synthetic construct
GDSVSSNSAAW

SEQ ID NO: 42580 - protein, 8 aa, synthetic construct
GGTFSTYA

SEQ ID NO: 42581 - protein, 8 aa, synthetic construct
GYSFTSYW

SEQ ID NO: 42582 - protein, 8 aa, synthetic construct
GGTFSSYG

SEQ ID NO: 42583 - protein, 8 aa, synthetic construct
GYPFTNYG

SEQ ID NO: 42584 - protein, 8 aa, synthetic construct
GFDFTTYW

SEQ ID NO: 42585 - protein, 9 aa, synthetic construct
GFTISSGYS

SEQ ID NO: 42586 - protein, 8 aa, synthetic construct
GFNIKDTY

SEQ ID NO: 42587 - protein, 8 aa, synthetic construct
GFTFSSYA

SEQ ID NO: 42588 - protein, 8 aa, synthetic construct
GFTFNTAW

SEQ ID NO: 42589 - protein, 8 aa, synthetic construct
GYTFTTYT

SEQ ID NO: 42590 - protein, 8 aa, synthetic construct
GFTFDDYG

SEQ ID NO: 42591 - protein, 8 aa, synthetic construct
GGTFSSYA

SEQ ID NO: 42592 - protein, 8 aa, synthetic construct
GFTFDDYG

SEQ ID NO: 42593 - protein, 8 aa, synthetic construct
GFTFDDYA

SEQ ID NO: 42594 - protein, 8 aa, synthetic construct
GLSLTSNG

SEQ ID NO: 42595 - protein, 8 aa, synthetic construct
GFSLTSYH

SEQ ID NO: 42596 - protein, 8 aa, synthetic construct
GFTFDDYG

SEQ ID NO: 42597 - protein, 8 aa, synthetic construct
GFTFSSYW

SEQ ID NO: 42598 - protein, 8 aa, synthetic construct
GYTFTEYT

SEQ ID NO: 42599 - protein, 8 aa, synthetic construct
GYTFTEYT

SEQ ID NO: 42600 - protein, 8 aa, synthetic construct
GYTFTEYT

SEQ ID NO: 42601 - protein, 8 aa, synthetic construct
GYTFTEYT

SEQ ID NO: 42602 - protein, 8 aa, synthetic construct
GFTFSRYG

SEQ ID NO: 42603 - protein, 8 aa, synthetic construct
GFTFSRYG

SEQ ID NO: 42604 - protein, 8 aa, synthetic construct
GFTFSGYA

SEQ ID NO: 42605 - protein, 8 aa, synthetic construct
GFAFSTYD

SEQ ID NO: 42606 - protein, 8 aa, synthetic construct
GYTFTSYW

SEQ ID NO: 42607 - protein, 8 aa, synthetic construct
GFTFTTYW

SEQ ID NO: 42608 - protein, 8 aa, synthetic construct
GYTFTTYW

SEQ ID NO: 42609 - protein, 8 aa, synthetic construct
GYTFSDYF

SEQ ID NO: 42610 - protein, 8 aa, synthetic construct
GFTFSDYF

SEQ ID NO: 42611 - protein, 10 aa, synthetic construct
GGSISSSSYF

SEQ ID NO: 42612 - protein, 8 aa, synthetic construct
GFTFSSYA

SEQ ID NO: 42613 - protein, 8 aa, synthetic construct
GFTFSSYA

SEQ ID NO: 42614 - protein, 8 aa, synthetic construct
GFTFSSYA

SEQ ID NO: 42615 - protein, 8 aa, synthetic construct
GFTFSSYA

SEQ ID NO: 42616 - protein, 8 aa, synthetic construct
GFTFSSYA

SEQ ID NO: 42617 - protein, 8 aa, synthetic construct
GFTFSSYA

SEQ ID NO: 42618 - protein, 8 aa, synthetic construct
GFTFSSYA

SEQ ID NO: 42619 - protein, 8 aa, synthetic construct
GFTFSSYA

SEQ ID NO: 42620 - protein, 8 aa, synthetic construct
GFSVTNYG

SEQ ID NO: 42621 - protein, 8 aa, synthetic construct
GFSVTNYG

SEQ ID NO: 42622 - protein, 8 aa, synthetic construct
GFSLASYN

SEQ ID NO: 42623 - protein, 8 aa, synthetic construct
GFSLASYN

SEQ ID NO: 42624 - protein, 8 aa, synthetic construct
GYTFTSFW

SEQ ID NO: 42625 - protein, 8 aa, synthetic construct
GYTFTSFW

SEQ ID NO: 42626 - protein, 8 aa, synthetic construct
GYSFTGYT

SEQ ID NO: 42627 - protein, 8 aa, synthetic construct
GYSFTGYT

SEQ ID NO: 42628 - protein, 8 aa, synthetic construct
GYSFTGYT

SEQ ID NO: 42629 - protein, 8 aa, synthetic construct
GYTFTNYL

SEQ ID NO: 42630 - protein, 8 aa, synthetic construct
GYTFSSYW

SEQ ID NO: 42631 - protein, 8 aa, synthetic construct
GYAFSSSW

SEQ ID NO: 42632 - protein, 8 aa, synthetic construct
GYTFSSYW

SEQ ID NO: 42633 - protein, 8 aa, synthetic construct
GYAFSNYW

SEQ ID NO: 42634 - protein, 8 aa, synthetic construct
GYTFSSYW

SEQ ID NO: 42635 - protein, 8 aa, synthetic construct
GYTFTSYW

SEQ ID NO: 42636 - protein, 8 aa, synthetic construct
GYTFTSYW

SEQ ID NO: 42637 - protein, 8 aa, synthetic construct
GYTFTSYW

SEQ ID NO: 42638 - protein, 8 aa, synthetic construct
GYTFTSYW

SEQ ID NO: 42639 - protein, 8 aa, synthetic construct
GYTFTSYW

SEQ ID NO: 42640 - protein, 8 aa, synthetic construct
GYTFTSYW

SEQ ID NO: 42641 - protein, 8 aa, synthetic construct
GYTFTSYW

SEQ ID NO: 42642 - protein, 8 aa, synthetic construct
GYTFSSYW

SEQ ID NO: 42643 - protein, 8 aa, synthetic construct
GYTFTSYW

SEQ ID NO: 42644 - protein, 8 aa, synthetic construct
GYTFSSYW

SEQ ID NO: 42645 - protein, 8 aa, synthetic construct
GYTFTSYW

SEQ ID NO: 42646 - protein, 8 aa, synthetic construct
GYTFTNYW

SEQ ID NO: 42647 - protein, 8 aa, synthetic construct
GYTFTNYW

SEQ ID NO: 42648 - protein, 8 aa, synthetic construct
GYTFSSYW

SEQ ID NO: 42649 - protein, 8 aa, synthetic construct
GYTFTSYY

SEQ ID NO: 42650 - protein, 8 aa, synthetic construct
GFSFSNYG

SEQ ID NO: 42651 - protein, 8 aa, synthetic construct
GFTFSKYA

SEQ ID NO: 42652 - protein, 8 aa, synthetic construct
GFTFSKYA

SEQ ID NO: 42653 - protein, 8 aa, synthetic construct
GFSFSNYG

SEQ ID NO: 42654 - protein, 10 aa, synthetic construct
GGSISSSSYW

SEQ ID NO: 42655 - protein, 8 aa, synthetic construct
GFSLTRFG

SEQ ID NO: 42656 - protein, 8 aa, synthetic construct
GYTFTGYF

SEQ ID NO: 42657 - protein, 8 aa, synthetic construct
GFNVYASG

SEQ ID NO: 42658 - protein, 8 aa, synthetic construct
GFNVYASG

SEQ ID NO: 42659 - protein, 8 aa, synthetic construct
GFNIDYYG

SEQ ID NO: 42660 - protein, 8 aa, synthetic construct
GYSITNDY

SEQ ID NO: 42661 - protein, 8 aa, synthetic construct
GGTFSTYA

SEQ ID NO: 42662 - protein, 8 aa, synthetic construct
GGTFSSYA

SEQ ID NO: 42663 - protein, 8 aa, synthetic construct
GYTFTNYG

SEQ ID NO: 42664 - protein, 8 aa, synthetic construct
GFTFSSYA

SEQ ID NO: 42665 - protein, 8 aa, synthetic construct
GIDFNSNY

SEQ ID NO: 42666 - protein, 8 aa, synthetic construct
GYTFTSYH

SEQ ID NO: 42667 - protein, 8 aa, synthetic construct
GGSFSGYY

SEQ ID NO: 42668 - protein, 8 aa, synthetic construct
GYSFTSYG

SEQ ID NO: 42669 - protein, 8 aa, synthetic construct
GFTFSSYS

SEQ ID NO: 42670 - protein, 8 aa, synthetic construct
GGSFSGYY

SEQ ID NO: 42671 - protein, 8 aa, synthetic construct
GYSFTSYG

SEQ ID NO: 42672 - protein, 9 aa, synthetic construct
GFTFSSYAM

SEQ ID NO: 42673 - protein, 10 aa, synthetic construct
GFSLTTYGMG

SEQ ID NO: 42674 - protein, 10 aa, synthetic construct
GFSLSTYGMG

SEQ ID NO: 42675 - protein, 8 aa, synthetic construct
IYPGDGDT

SEQ ID NO: 42676 - protein, 7 aa, synthetic construct
IDPETGG

SEQ ID NO: 42677 - protein, 8 aa, synthetic construct
INTESGVP

SEQ ID NO: 42678 - protein, 8 aa, synthetic construct
TYRGHSDT

SEQ ID NO: 42679 - protein, 8 aa, synthetic construct
IIPSNGAT

SEQ ID NO: 42680 - protein, 8 aa, synthetic construct
ILPGTGRT

SEQ ID NO: 42681 - protein, 8 aa, synthetic construct
INPNNGGT

SEQ ID NO: 42682 - protein, 7 aa, synthetic construct
IWWDDDK

SEQ ID NO: 42683 - protein, 7 aa, synthetic construct
IWGSETT

SEQ ID NO: 42684 - protein, 7 aa, synthetic construct
IWGSETT

SEQ ID NO: 42685 - protein, 8 aa, synthetic construct
ISWNSGSI

SEQ ID NO: 42686 - protein, 8 aa, synthetic construct
IFPGDGDT

SEQ ID NO: 42687 - protein, 8 aa, synthetic construct
IYPGDGDT

SEQ ID NO: 42688 - protein, 8 aa, synthetic construct
IIPILGTA

SEQ ID NO: 42689 - protein, 7 aa, synthetic construct
INHGGGT

SEQ ID NO: 42690 - protein, 8 aa, synthetic construct
IYPGSGNT

SEQ ID NO: 42691 - protein, 7 aa, synthetic construct
IGSGGGI

SEQ ID NO: 42692 - protein, 8 aa, synthetic construct
ITTRSSTI

SEQ ID NO: 42693 - protein, 7 aa, synthetic construct
ISYSGHT

SEQ ID NO: 42694 - protein, 8 aa, synthetic construct
IYPGNDDI

SEQ ID NO: 42695 - protein, 8 aa, synthetic construct
INTYTGEP

SEQ ID NO: 42696 - protein, 8 aa, synthetic construct
INTNTGEP

SEQ ID NO: 42697 - protein, 8 aa, synthetic construct
IDPYYGDT

SEQ ID NO: 42698 - protein, 8 aa, synthetic construct
IDPYYGDT

SEQ ID NO: 42699 - protein, 8 aa, synthetic construct
INTYTGEP

SEQ ID NO: 42700 - protein, 8 aa, synthetic construct
IDPSDSET

SEQ ID NO: 42701 - protein, 8 aa, synthetic construct
ILPGGGDT

SEQ ID NO: 42702 - protein, 8 aa, synthetic construct
IYPRDGIT

SEQ ID NO: 42703 - protein, 7 aa, synthetic construct
IYYSGST

SEQ ID NO: 42704 - protein, 8 aa, synthetic construct
IRSSGSST

SEQ ID NO: 42705 - protein, 8 aa, synthetic construct
ISGSGSNT

SEQ ID NO: 42706 - protein, 8 aa, synthetic construct
FYPGSGSI

SEQ ID NO: 42707 - protein, 8 aa, synthetic construct
ISSGSTTI

SEQ ID NO: 42708 - protein, 8 aa, synthetic construct
INPYNDGS

SEQ ID NO: 42709 - protein, 8 aa, synthetic construct
INPYNDGT

SEQ ID NO: 42710 - protein, 8 aa, synthetic construct
INPDSSTI

SEQ ID NO: 42711 - protein, 8 aa, synthetic construct
IHPSDSET

SEQ ID NO: 42712 - protein, 8 aa, synthetic construct
FDPEENEI

SEQ ID NO: 42713 - protein, 8 aa, synthetic construct
FDPEENEI

SEQ ID NO: 42714 - protein, 7 aa, synthetic construct
IWWDDVK

SEQ ID NO: 42715 - protein, 8 aa, synthetic construct
INTYTGEP

SEQ ID NO: 42716 - protein, 7 aa, synthetic construct
IWSGGNT

SEQ ID NO: 42717 - protein, 8 aa, synthetic construct
IDPENDET

SEQ ID NO: 42718 - protein, 8 aa, synthetic construct
ISYDGSNK

SEQ ID NO: 42719 - protein, 8 aa, synthetic construct
IFPGSGNI

SEQ ID NO: 42720 - protein, 8 aa, synthetic construct
IIPIFGTA

SEQ ID NO: 42721 - protein, 8 aa, synthetic construct
IKPQYGAV

SEQ ID NO: 42722 - protein, 8 aa, synthetic construct
IHPYDGDT

SEQ ID NO: 42723 - protein, 8 aa, synthetic construct
IDPYYGGT

SEQ ID NO: 42724 - protein, 8 aa, synthetic construct
IWAGGITN

SEQ ID NO: 42725 - protein, 8 aa, synthetic construct
ISSGGSGT

SEQ ID NO: 42726 - protein, 7 aa, synthetic construct
IGGSGDT

SEQ ID NO: 42727 - protein, 8 aa, synthetic construct
ISRSGRDI

SEQ ID NO: 42728 - protein, 8 aa, synthetic construct
INGRGSST

SEQ ID NO: 42729 - protein, 8 aa, synthetic construct
ISSSGSTI

SEQ ID NO: 42730 - protein, 8 aa, synthetic construct
IYPTNGYT

SEQ ID NO: 42731 - protein, 13 aa, synthetic construct
LSHCASYWNRGWT

SEQ ID NO: 42732 - protein, 8 aa, synthetic construct
IIPIFGTS

SEQ ID NO: 42733 - protein, 8 aa, synthetic construct
IVPWGDFT

SEQ ID NO: 42734 - protein, 8 aa, synthetic construct
VKWAGGST

SEQ ID NO: 42735 - protein, 8 aa, synthetic construct
VSSGGSYI

SEQ ID NO: 42736 - protein, 8 aa, synthetic construct
INPRNDRT

SEQ ID NO: 42737 - protein, 8 aa, synthetic construct
IYPGNGDA

SEQ ID NO: 42738 - protein, 8 aa, synthetic construct
INPGSGGT

SEQ ID NO: 42739 - protein, 7 aa, synthetic construct
IWSDGST

SEQ ID NO: 42740 - protein, 10 aa, synthetic construct
IRFKSHNYAT

SEQ ID NO: 42741 - protein, 7 aa, synthetic construct
ITYSGST

SEQ ID NO: 42742 - protein, 7 aa, synthetic construct
ITYSGST

SEQ ID NO: 42743 - protein, 7 aa, synthetic construct
ITYSGST

SEQ ID NO: 42744 - protein, 10 aa, synthetic construct
IRSKSNNFAT

SEQ ID NO: 42745 - protein, 8 aa, synthetic construct
ISYDGSNK

SEQ ID NO: 42746 - protein, 8 aa, synthetic construct
INPYNDDI

SEQ ID NO: 42747 - protein, 8 aa, synthetic construct
INPNSGGT

SEQ ID NO: 42748 - protein, 8 aa, synthetic construct
ISGSGGST

SEQ ID NO: 42749 - protein, 8 aa, synthetic construct
FNPYNGET

SEQ ID NO: 42750 - protein, 8 aa, synthetic construct
FSPGNGDI

SEQ ID NO: 42751 - protein, 8 aa, synthetic construct
FSPGNTDI

SEQ ID NO: 42752 - protein, 8 aa, synthetic construct
INTKTGEP

SEQ ID NO: 42753 - protein, 8 aa, synthetic construct
VDPGYSYS

SEQ ID NO: 42754 - protein, 8 aa, synthetic construct
IYPGYSDI

SEQ ID NO: 42755 - protein, 8 aa, synthetic construct
INWNGGST

SEQ ID NO: 42756 - protein, 8 aa, synthetic construct
INTYTGES

SEQ ID NO: 42757 - protein, 8 aa, synthetic construct
ISYDGTNE

SEQ ID NO: 42758 - protein, 8 aa, synthetic construct
INAGNGNT

SEQ ID NO: 42759 - protein, 8 aa, synthetic construct
IDPSDSYT

SEQ ID NO: 42760 - protein, 8 aa, synthetic construct
IYPGGGYT

SEQ ID NO: 42761 - protein, 8 aa, synthetic construct
ISSSGDPT

SEQ ID NO: 42762 - protein, 8 aa, synthetic construct
ISGSGGRT

SEQ ID NO: 42763 - protein, 7 aa, synthetic construct
INYGGST

SEQ ID NO: 42764 - protein, 10 aa, synthetic construct
IRSKAYGGTT

SEQ ID NO: 42765 - protein, 8 aa, synthetic construct
ISWNSGSI

SEQ ID NO: 42766 - protein, 8 aa, synthetic construct
IIPILGIA

SEQ ID NO: 42767 - protein, 8 aa, synthetic construct
INTETREP

SEQ ID NO: 42768 - protein, 8 aa, synthetic construct
INTETGEP

SEQ ID NO: 42769 - protein, 8 aa, synthetic construct
IIPSNGAT

SEQ ID NO: 42770 - protein, 8 aa, synthetic construct
IIPSNGAT

SEQ ID NO: 42771 - protein, 8 aa, synthetic construct
IDPYDSET

SEQ ID NO: 42772 - protein, 8 aa, synthetic construct
ILYDGGRT

SEQ ID NO: 42773 - protein, 7 aa, synthetic construct
MWSDGDT

SEQ ID NO: 42774 - protein, 8 aa, synthetic construct
IDPEDGET

SEQ ID NO: 42775 - protein, 8 aa, synthetic construct
INPYNDGT

SEQ ID NO: 42776 - protein, 8 aa, synthetic construct
IYPGDGDT

SEQ ID NO: 42777 - protein, 8 aa, synthetic construct
IYPGNGDT

SEQ ID NO: 42778 - protein, 8 aa, synthetic construct
ISWNSGTI

SEQ ID NO: 42779 - protein, 8 aa, synthetic construct
IYPGDGST

SEQ ID NO: 42780 - protein, 8 aa, synthetic construct
IDPANGNT

SEQ ID NO: 42781 - protein, 8 aa, synthetic construct
VNPYNGGT

SEQ ID NO: 42782 - protein, 8 aa, synthetic construct
INPYNGAA

SEQ ID NO: 42783 - protein, 7 aa, synthetic construct
ISYDGRN

SEQ ID NO: 42784 - protein, 8 aa, synthetic construct
ISYDGRNN

SEQ ID NO: 42785 - protein, 10 aa, synthetic construct
FRNKPYNYET

SEQ ID NO: 42786 - protein, 8 aa, synthetic construct
LSARSSLT

SEQ ID NO: 42787 - protein, 8 aa, synthetic construct
ISSTGRST

SEQ ID NO: 42788 - protein, 8 aa, synthetic construct
ISGRGRST

SEQ ID NO: 42789 - protein, 8 aa, synthetic construct
IRNDGSDK

SEQ ID NO: 42790 - protein, 8 aa, synthetic construct
INPNIGDT

SEQ ID NO: 42791 - protein, 8 aa, synthetic construct
IYPGDSDT

SEQ ID NO: 42792 - protein, 8 aa, synthetic construct
LNPNNGDT

SEQ ID NO: 42793 - protein, 7 aa, synthetic construct
ITYSGST

SEQ ID NO: 42794 - protein, 8 aa, synthetic construct
IRSKSNNF

SEQ ID NO: 42795 - protein, 7 aa, synthetic construct
ITYSGST

SEQ ID NO: 42796 - protein, 8 aa, synthetic construct
ISSNGRYI

SEQ ID NO: 42797 - protein, 8 aa, synthetic construct
INNGSGYI

SEQ ID NO: 42798 - protein, 7 aa, synthetic construct
ISSGGGT

SEQ ID NO: 42799 - protein, 7 aa, synthetic construct
ISNSGST

SEQ ID NO: 42800 - protein, 8 aa, synthetic construct
IDPENGDT

SEQ ID NO: 42801 - protein, 8 aa, synthetic construct
IWSGGSTD

SEQ ID NO: 42802 - protein, 8 aa, synthetic construct
NDPSNGRT

SEQ ID NO: 42803 - protein, 8 aa, synthetic construct
IYPGDGET

SEQ ID NO: 42804 - protein, 8 aa, synthetic construct
IYPSSGKT

SEQ ID NO: 42805 - protein, 7 aa, synthetic construct
IHHSGST

SEQ ID NO: 42806 - protein, 7 aa, synthetic construct
IYYSGST

SEQ ID NO: 42807 - protein, 7 aa, synthetic construct
IFSNAEK

SEQ ID NO: 42808 - protein, 8 aa, synthetic construct
IWYDGSNE

SEQ ID NO: 42809 - protein, 7 aa, synthetic construct
IYFTGST

SEQ ID NO: 42810 - protein, 8 aa, synthetic construct
INTNTGNP

SEQ ID NO: 42811 - protein, 8 aa, synthetic construct
IYPGDGNT

SEQ ID NO: 42812 - protein, 8 aa, synthetic construct
IRPSTGYT

SEQ ID NO: 42813 - protein, 8 aa, synthetic construct
ISNGGTYT

SEQ ID NO: 42814 - protein, 8 aa, synthetic construct
IYPGDYDT

SEQ ID NO: 42815 - protein, 8 aa, synthetic construct
IDPYYGTT

SEQ ID NO: 42816 - protein, 8 aa, synthetic construct
IDGSDTFN

SEQ ID NO: 42817 - protein, 8 aa, synthetic construct
IYPGDEDT

SEQ ID NO: 42818 - protein, 8 aa, synthetic construct
IYPGDGDT

SEQ ID NO: 42819 - protein, 8 aa, synthetic construct
ISGSGGRP

SEQ ID NO: 42820 - protein, 8 aa, synthetic construct
ISSDSRTI

SEQ ID NO: 42821 - protein, 8 aa, synthetic construct
IWWDGSNE

SEQ ID NO: 42822 - protein, 8 aa, synthetic construct
IYPTNGYT

SEQ ID NO: 42823 - protein, 8 aa, synthetic construct
ISSSGSTI

SEQ ID NO: 42824 - protein, 8 aa, synthetic construct
ISSSGGII

SEQ ID NO: 42825 - protein, 8 aa, synthetic construct
IWYDGSDK

SEQ ID NO: 42826 - protein, 7 aa, synthetic construct
IGTAGAT

SEQ ID NO: 42827 - protein, 7 aa, synthetic construct
IYYSGTT

SEQ ID NO: 42828 - protein, 8 aa, synthetic construct
INPSDGST

SEQ ID NO: 42829 - protein, 8 aa, synthetic construct
IYPGNVNT

SEQ ID NO: 42830 - protein, 7 aa, synthetic construct
IYYSGST

SEQ ID NO: 42831 - protein, 8 aa, synthetic construct
INPSGVST

SEQ ID NO: 42832 - protein, 8 aa, synthetic construct
ISGGGGRT

SEQ ID NO: 42833 - protein, 8 aa, synthetic construct
VSSGGTYT

SEQ ID NO: 42834 - protein, 10 aa, synthetic construct
IRSKVNNHET

SEQ ID NO: 42835 - protein, 8 aa, synthetic construct
IDPANGNS

SEQ ID NO: 42836 - protein, 8 aa, synthetic construct
IIPRYGKA

SEQ ID NO: 42837 - protein, 10 aa, synthetic construct
IKSKTEGGTT

SEQ ID NO: 42838 - protein, 8 aa, synthetic construct
INPSGGST

SEQ ID NO: 42839 - protein, 8 aa, synthetic construct
INPGSGGT

SEQ ID NO: 42840 - protein, 8 aa, synthetic construct
INPDSSTI

SEQ ID NO: 42841 - protein, 8 aa, synthetic construct
IYPGNGDT

SEQ ID NO: 42842 - protein, 8 aa, synthetic construct
INPGNNYA

SEQ ID NO: 42843 - protein, 8 aa, synthetic construct
ISSGGGTT

SEQ ID NO: 42844 - protein, 7 aa, synthetic construct
ISSGGGT

SEQ ID NO: 42845 - protein, 8 aa, synthetic construct
IYPGDGDT

SEQ ID NO: 42846 - protein, 7 aa, synthetic construct
IYYSGIT

SEQ ID NO: 42847 - protein, 7 aa, synthetic construct
ITYSGST

SEQ ID NO: 42848 - protein, 7 aa, synthetic construct
ISYSGST

SEQ ID NO: 42849 - protein, 7 aa, synthetic construct
IWWDDDK

SEQ ID NO: 42850 - protein, 9 aa, synthetic construct
IYYRSKWYN

SEQ ID NO: 42851 - protein, 8 aa, synthetic construct
IIPIEGRA

SEQ ID NO: 42852 - protein, 9 aa, synthetic construct
IYPGDSDTR

SEQ ID NO: 42853 - protein, 8 aa, synthetic construct
ISAIFGTA

SEQ ID NO: 42854 - protein, 8 aa, synthetic construct
INTSTGES

SEQ ID NO: 42855 - protein, 8 aa, synthetic construct
IHPDSSTI

SEQ ID NO: 42856 - protein, 7 aa, synthetic construct
IQYSGIT

SEQ ID NO: 42857 - protein, 8 aa, synthetic construct
IYPTNGYT

SEQ ID NO: 42858 - protein, 8 aa, synthetic construct
ISYDGSNK

SEQ ID NO: 42859 - protein, 10 aa, synthetic construct
IKDTSNNYAT

SEQ ID NO: 42860 - protein, 8 aa, synthetic construct
INPSSGCS

SEQ ID NO: 42861 - protein, 8 aa, synthetic construct
ISWNSGSI

SEQ ID NO: 42862 - protein, 8 aa, synthetic construct
IIPIFGTA

SEQ ID NO: 42863 - protein, 8 aa, synthetic construct
ISWNSGSI

SEQ ID NO: 42864 - protein, 8 aa, synthetic construct
ISWNSGSI

SEQ ID NO: 42865 - protein, 7 aa, synthetic construct
IWSNGGT

SEQ ID NO: 42866 - protein, 7 aa, synthetic construct
MWSDGDT

SEQ ID NO: 42867 - protein, 8 aa, synthetic construct
LNWNGDIT

SEQ ID NO: 42868 - protein, 8 aa, synthetic construct
IKQDGSEK

SEQ ID NO: 42869 - protein, 8 aa, synthetic construct
INPNNGGT

SEQ ID NO: 42870 - protein, 8 aa, synthetic construct
INPNNGGT

SEQ ID NO: 42871 - protein, 8 aa, synthetic construct
INPNNGGT

SEQ ID NO: 42872 - protein, 8 aa, synthetic construct
INPNNGGT

SEQ ID NO: 42873 - protein, 8 aa, synthetic construct
ISGGGTYI

SEQ ID NO: 42874 - protein, 8 aa, synthetic construct
ISGGGTYI

SEQ ID NO: 42875 - protein, 8 aa, synthetic construct
ISSGGTYI

SEQ ID NO: 42876 - protein, 8 aa, synthetic construct
ISSGGSYT

SEQ ID NO: 42877 - protein, 8 aa, synthetic construct
IRPSTGYT

SEQ ID NO: 42878 - protein, 8 aa, synthetic construct
IRPSTGYT

SEQ ID NO: 42879 - protein, 8 aa, synthetic construct
IRPSTGYT

SEQ ID NO: 42880 - protein, 8 aa, synthetic construct
ISNGGTYT

SEQ ID NO: 42881 - protein, 8 aa, synthetic construct
ISNGGTYT

SEQ ID NO: 42882 - protein, 7 aa, synthetic construct
IYYSGIT

SEQ ID NO: 42883 - protein, 7 aa, synthetic construct
ISGSGGS

SEQ ID NO: 42884 - protein, 7 aa, synthetic construct
ISGSGGS

SEQ ID NO: 42885 - protein, 7 aa, synthetic construct
ISGSGGS

SEQ ID NO: 42886 - protein, 7 aa, synthetic construct
ISGSGGS

SEQ ID NO: 42887 - protein, 7 aa, synthetic construct
ISGSGGS

SEQ ID NO: 42888 - protein, 7 aa, synthetic construct
ISGSGGS

SEQ ID NO: 42889 - protein, 7 aa, synthetic construct
ISGSGGS

SEQ ID NO: 42890 - protein, 7 aa, synthetic construct
ISGSGGS

SEQ ID NO: 42891 - protein, 7 aa, synthetic construct
IWAGGIT

SEQ ID NO: 42892 - protein, 7 aa, synthetic construct
IWAGGIT

SEQ ID NO: 42893 - protein, 7 aa, synthetic construct
IWAGGST

SEQ ID NO: 42894 - protein, 7 aa, synthetic construct
IWAGGST

SEQ ID NO: 42895 - protein, 8 aa, synthetic construct
IYPSTSYT

SEQ ID NO: 42896 - protein, 8 aa, synthetic construct
IYPSDSYT

SEQ ID NO: 42897 - protein, 8 aa, synthetic construct
INPYNGGT

SEQ ID NO: 42898 - protein, 8 aa, synthetic construct
INPYNGGT

SEQ ID NO: 42899 - protein, 8 aa, synthetic construct
INPYNGGT

SEQ ID NO: 42900 - protein, 8 aa, synthetic construct
INPGSGGT

SEQ ID NO: 42901 - protein, 8 aa, synthetic construct
IYPGDGDT

SEQ ID NO: 42902 - protein, 8 aa, synthetic construct
IYPGDGDT

SEQ ID NO: 42903 - protein, 8 aa, synthetic construct
IYPGDGDT

SEQ ID NO: 42904 - protein, 8 aa, synthetic construct
IYPGDGDT

SEQ ID NO: 42905 - protein, 8 aa, synthetic construct
ILPGGGDT

SEQ ID NO: 42906 - protein, 8 aa, synthetic construct
ILPGGGDT

SEQ ID NO: 42907 - protein, 8 aa, synthetic construct
ILPGGGDT

SEQ ID NO: 42908 - protein, 8 aa, synthetic construct
ILPGGGDT

SEQ ID NO: 42909 - protein, 8 aa, synthetic construct
ILPGGGDT

SEQ ID NO: 42910 - protein, 8 aa, synthetic construct
ILPGGGDT

SEQ ID NO: 42911 - protein, 8 aa, synthetic construct
ILPGGGDT

SEQ ID NO: 42912 - protein, 8 aa, synthetic construct
IDPSDSET

SEQ ID NO: 42913 - protein, 8 aa, synthetic construct
IDPSDSET

SEQ ID NO: 42914 - protein, 8 aa, synthetic construct
IDPSDSET

SEQ ID NO: 42915 - protein, 8 aa, synthetic construct
IDPSDSET

SEQ ID NO: 42916 - protein, 8 aa, synthetic construct
IDPSDSET

SEQ ID NO: 42917 - protein, 8 aa, synthetic construct
IDPSDSET

SEQ ID NO: 42918 - protein, 8 aa, synthetic construct
IDPSDSET

SEQ ID NO: 42919 - protein, 8 aa, synthetic construct
ILPGGGDT

SEQ ID NO: 42920 - protein, 8 aa, synthetic construct
IYPGNLNT

SEQ ID NO: 42921 - protein, 8 aa, synthetic construct
ISTGGGNT

SEQ ID NO: 42922 - protein, 8 aa, synthetic construct
ISTGGVNT

SEQ ID NO: 42923 - protein, 8 aa, synthetic construct
ISTGGVNT

SEQ ID NO: 42924 - protein, 8 aa, synthetic construct
ISTGGGNT

SEQ ID NO: 42925 - protein, 7 aa, synthetic construct
MYYSGNI

SEQ ID NO: 42926 - protein, 7 aa, synthetic construct
IWRGGST

SEQ ID NO: 42927 - protein, 8 aa, synthetic construct
IHPYDGDT

SEQ ID NO: 42928 - protein, 8 aa, synthetic construct
IYPDSDYT

SEQ ID NO: 42929 - protein, 8 aa, synthetic construct
IYPDSDYT

SEQ ID NO: 42930 - protein, 8 aa, synthetic construct
LYGGSDST

SEQ ID NO: 42931 - protein, 7 aa, synthetic construct
ISYSGYT

SEQ ID NO: 42932 - protein, 8 aa, synthetic construct
IIPIEGRA

SEQ ID NO: 42933 - protein, 8 aa, synthetic construct
IIPIEGRA

SEQ ID NO: 42934 - protein, 8 aa, synthetic construct
INTYTGEP

SEQ ID NO: 42935 - protein, 8 aa, synthetic construct
ISGSGGST

SEQ ID NO: 42936 - protein, 9 aa, synthetic construct
IYVGSHVNT

SEQ ID NO: 42937 - protein, 8 aa, synthetic construct
IYPGDGST

SEQ ID NO: 42938 - protein, 7 aa, synthetic construct
INHRGST

SEQ ID NO: 42939 - protein, 8 aa, synthetic construct
ISAYNGNT

SEQ ID NO: 42940 - protein, 7 aa, synthetic construct
ISTNSRT

SEQ ID NO: 42941 - protein, 7 aa, synthetic construct
INHRGST

SEQ ID NO: 42942 - protein, 8 aa, synthetic construct
ISAYNGYT

SEQ ID NO: 42943 - protein, 8 aa, synthetic construct
ISTSGSYT

SEQ ID NO: 42944 - protein, 7 aa, synthetic construct
IWWDDDK

SEQ ID NO: 42945 - protein, 7 aa, synthetic construct
IWWDDDK

SEQ ID NO: 42946 - protein, 13 aa, synthetic construct
VRYYYGSSGYFDY

SEQ ID NO: 42947 - protein, 13 aa, synthetic construct
ARRRYYGSSSFDY

SEQ ID NO: 42948 - protein, 10 aa, synthetic construct
SNDYLYSLDF

SEQ ID NO: 42949 - protein, 14 aa, synthetic construct
ARGAIYDGYDVLDN

SEQ ID NO: 42950 - protein, 13 aa, synthetic construct
ARSHLLRASWFAY

SEQ ID NO: 42951 - protein, 15 aa, synthetic construct
ARRDYYGNFYYAMDY

SEQ ID NO: 42952 - protein, 11 aa, synthetic construct
ARDYGYGYFDY

SEQ ID NO: 42953 - protein, 12 aa, synthetic construct
ARMELWSYYFDY

SEQ ID NO: 42954 - protein, 14 aa, synthetic construct
AKHYYYGGSYAMDY

SEQ ID NO: 42955 - protein, 14 aa, synthetic construct
AKHYYYGGSYAMDY

SEQ ID NO: 42956 - protein, 15 aa, synthetic construct
AKDIQYGNYYYGMDV

SEQ ID NO: 42957 - protein, 12 aa, synthetic construct
ARNVFDGYWLVY

SEQ ID NO: 42958 - protein, 13 aa, synthetic construct
ARDGSSWDWYFDV

SEQ ID NO: 42959 - protein, 10 aa, synthetic construct
ARWGGGAFDI

SEQ ID NO: 42960 - protein, 6 aa, synthetic construct
ASLTAY

SEQ ID NO: 42961 - protein, 10 aa, synthetic construct
ANYGNYWFAY

SEQ ID NO: 42962 - protein, 13 aa, synthetic construct
VRGYFDWVDYFDY

SEQ ID NO: 42963 - protein, 13 aa, synthetic construct
TREPLTGYYAMDY

SEQ ID NO: 42964 - protein, 9 aa, synthetic construct
TRGNWDVVY

SEQ ID NO: 42965 - protein, 11 aa, synthetic construct
AREVRLRYFDV

SEQ ID NO: 42966 - protein, 15 aa, synthetic construct
ARWSWSDGYYVYFDY

SEQ ID NO: 42967 - protein, 15 aa, synthetic construct
ARGYGNYARGAWLAY

SEQ ID NO: 42968 - protein, 14 aa, synthetic construct
ARRMITTGDWYFDV

SEQ ID NO: 42969 - protein, 14 aa, synthetic construct
ARRMITTGDWYFDV

SEQ ID NO: 42970 - protein, 11 aa, synthetic construct
ARDYGDYGMDY

SEQ ID NO: 42971 - protein, 6 aa, synthetic construct
ARNLYL

SEQ ID NO: 42972 - protein, 11 aa, synthetic construct
TRRVPIRLDYW

SEQ ID NO: 42973 - protein, 16 aa, synthetic construct
ARWGYSYRNYAYYYDY

SEQ ID NO: 42974 - protein, 19 aa, synthetic construct
ARDQRRIAAAGTHFYGMDV

SEQ ID NO: 42975 - protein, 9 aa, synthetic construct
ARGGGYFDY

SEQ ID NO: 42976 - protein, 11 aa, synthetic construct
ARQWGSYAFDS

SEQ ID NO: 42977 - protein, 11 aa, synthetic construct
ARHDGYSYFDY

SEQ ID NO: 42978 - protein, 12 aa, synthetic construct
ARSGQFGNYFDY

SEQ ID NO: 42979 - protein, 13 aa, synthetic construct
TRDDGYYGYAMDY

SEQ ID NO: 42980 - protein, 13 aa, synthetic construct
ARPIYFDNDYFDY

SEQ ID NO: 42981 - protein, 12 aa, synthetic construct
ARPDGNYWYFDV

SEQ ID NO: 42982 - protein, 13 aa, synthetic construct
ARSTMIATRAMDY

SEQ ID NO: 42983 - protein, 13 aa, synthetic construct
AIVGSFSGIAYRP

SEQ ID NO: 42984 - protein, 13 aa, synthetic construct
AIVGSFSPLTLGL

SEQ ID NO: 42985 - protein, 16 aa, synthetic construct
ARIVSFDNDVVSAMDY

SEQ ID NO: 42986 - protein, 11 aa, synthetic construct
ARIGDSSPSDY

SEQ ID NO: 42987 - protein, 13 aa, synthetic construct
ARALTYYDYEFAY

SEQ ID NO: 42988 - protein, 7 aa, synthetic construct
AFRGGVY

SEQ ID NO: 42989 - protein, 20 aa, synthetic construct
AKDMGWGSGWRPYYYYGMDV

SEQ ID NO: 42990 - protein, 12 aa, synthetic construct
ARLRNWDEPMDY

SEQ ID NO: 42991 - protein, 15 aa, synthetic construct
ATFALFGFREQAFDI

SEQ ID NO: 42992 - protein, 15 aa, synthetic construct
ARDRSYGDSSWALDA

SEQ ID NO: 42993 - protein, 11 aa, synthetic construct
TRYDGSRAMDY

SEQ ID NO: 42994 - protein, 6 aa, synthetic construct
VSGMEY

SEQ ID NO: 42995 - protein, 13 aa, synthetic construct
ASRGGHYGYALDY

SEQ ID NO: 42996 - protein, 12 aa, synthetic construct
TRVKLGTYYFDS

SEQ ID NO: 42997 - protein, 13 aa, synthetic construct
VRYANIGYEYFNV

SEQ ID NO: 42998 - protein, 14 aa, synthetic construct
AGTVTTYYYFGMDV

SEQ ID NO: 42999 - protein, 11 aa, synthetic construct
ARYISRGLGDS

SEQ ID NO: 43000 - protein, 10 aa, synthetic construct
ARGYGKAYDQ

SEQ ID NO: 43001 - protein, 13 aa, synthetic construct
SRWGGDGFYAMDV

SEQ ID NO: 43002 - protein, 12 aa, synthetic construct
ARFGGEVLRYTD

SEQ ID NO: 43003 - protein, 24 aa, synthetic construct
ARDFGPDWEDGDSYDGSGRGFFDF

SEQ ID NO: 43004 - protein, 11 aa, synthetic construct
AKGPGWGSFDL

SEQ ID NO: 43005 - protein, 10 aa, synthetic construct
ARDHRDAMDY

SEQ ID NO: 43006 - protein, 15 aa, synthetic construct
ARQGTTALATRFFDV

SEQ ID NO: 43007 - protein, 10 aa, synthetic construct
ALGGGYAMDY

SEQ ID NO: 43008 - protein, 10 aa, synthetic construct
RANWDVAFAY

SEQ ID NO: 43009 - protein, 12 aa, synthetic construct
ARYRSYDWYFDV

SEQ ID NO: 43010 - protein, 12 aa, synthetic construct
ASHYGSTLAFAS

SEQ ID NO: 43011 - protein, 16 aa, synthetic construct
TRRIGNSDYDWWYFDV

SEQ ID NO: 43012 - protein, 11 aa, synthetic construct
ARLGRRYALDY

SEQ ID NO: 43013 - protein, 11 aa, synthetic construct
ARLGRRYTMDY

SEQ ID NO: 43014 - protein, 11 aa, synthetic construct
ARLGRRYTMDY

SEQ ID NO: 43015 - protein, 11 aa, synthetic construct
VRQGGDFPMDY

SEQ ID NO: 43016 - protein, 13 aa, synthetic construct
ARAHNSSSWSFDY

SEQ ID NO: 43017 - protein, 17 aa, synthetic construct
ARGAGYNFDGAYRFFDF

SEQ ID NO: 43018 - protein, 12 aa, synthetic construct
ASPRGRGSAFDI

SEQ ID NO: 43019 - protein, 11 aa, synthetic construct
ARTRSSGAFDI

SEQ ID NO: 43020 - protein, 11 aa, synthetic construct
GRSGNDDAMDY

SEQ ID NO: 43021 - protein, 9 aa, synthetic construct
KRSYGNYDY

SEQ ID NO: 43022 - protein, 9 aa, synthetic construct
KTSTFFFDY

SEQ ID NO: 43023 - protein, 14 aa, synthetic construct
GRGGYGSSYWYFDV

SEQ ID NO: 43024 - protein, 14 aa, synthetic construct
ARVQYSGYYDWFDP

SEQ ID NO: 43025 - protein, 11 aa, synthetic construct
VRHTALAGFDY

SEQ ID NO: 43026 - protein, 14 aa, synthetic construct
ARERGYGYHDPHDY

SEQ ID NO: 43027 - protein, 11 aa, synthetic construct
ARSGGYDPMDY

SEQ ID NO: 43028 - protein, 12 aa, synthetic construct
ARERYFDWSFDY

SEQ ID NO: 43029 - protein, 11 aa, synthetic construct
ARDISYGSFDY

SEQ ID NO: 43030 - protein, 9 aa, synthetic construct
AREITTVDY

SEQ ID NO: 43031 - protein, 14 aa, synthetic construct
ARLDGSSYRGAMDS

SEQ ID NO: 43032 - protein, 9 aa, synthetic construct
ASLTTGSDS

SEQ ID NO: 43033 - protein, 13 aa, synthetic construct
AKDRDFWSGPFDY

SEQ ID NO: 43034 - protein, 17 aa, synthetic construct
ARYNEYKSYIYDWYFDF

SEQ ID NO: 43035 - protein, 15 aa, synthetic construct
ARDGLYSSSWYDSDY

SEQ ID NO: 43036 - protein, 19 aa, synthetic construct
AKDIHSGSYYGLLYYAMDV

SEQ ID NO: 43037 - protein, 14 aa, synthetic construct
ARGGYYSHDMWSED

SEQ ID NO: 43038 - protein, 10 aa, synthetic construct
ALDYSYAMDY

SEQ ID NO: 43039 - protein, 10 aa, synthetic construct
SNDYLYSLDY

SEQ ID NO: 43040 - protein, 13 aa, synthetic construct
ARSHLLRASWFAY

SEQ ID NO: 43041 - protein, 13 aa, synthetic construct
ARSHLLRASWFAY

SEQ ID NO: 43042 - protein, 8 aa, synthetic construct
ARGNWDDY

SEQ ID NO: 43043 - protein, 12 aa, synthetic construct
ATHSRGTDYFDY

SEQ ID NO: 43044 - protein, 11 aa, synthetic construct
ARGYYSSYLYL

SEQ ID NO: 43045 - protein, 18 aa, synthetic construct
ARWGDVYYGLMRGHVMDA

SEQ ID NO: 43046 - protein, 14 aa, synthetic construct
ARGTYYYGTRVFDY

SEQ ID NO: 43047 - protein, 14 aa, synthetic construct
ARSITTVVGCAMDY

SEQ ID NO: 43048 - protein, 11 aa, synthetic construct
ARYDYNYAMDY

SEQ ID NO: 43049 - protein, 15 aa, synthetic construct
AKDIQYGNYYYGMDV

SEQ ID NO: 43050 - protein, 10 aa, synthetic construct
ASGYEDAMDY

SEQ ID NO: 43051 - protein, 7 aa, synthetic construct
ARRGGVD

SEQ ID NO: 43052 - protein, 13 aa, synthetic construct
ARDHYRYDPLLDY

SEQ ID NO: 43053 - protein, 15 aa, synthetic construct
AIERGADLEGYAMDY

SEQ ID NO: 43054 - protein, 16 aa, synthetic construct
AREGDYDVGNYYAMDY

SEQ ID NO: 43055 - protein, 16 aa, synthetic construct
AKEGDYDVGNYYAMDY

SEQ ID NO: 43056 - protein, 10 aa, synthetic construct
TGASYGMEYL

SEQ ID NO: 43057 - protein, 20 aa, synthetic construct
ARRSYDSSGYWGHFYSYMDV

SEQ ID NO: 43058 - protein, 10 aa, synthetic construct
ARVSFDYWGQ

SEQ ID NO: 43059 - protein, 13 aa, synthetic construct
ARYYHAGAFDLWG

SEQ ID NO: 43060 - protein, 16 aa, synthetic construct
AKNGESGPLDYWYLDL

SEQ ID NO: 43061 - protein, 7 aa, synthetic construct
SVGYFDV

SEQ ID NO: 43062 - protein, 23 aa, synthetic construct
ARQVWGWQGGMYPRSNWWYNLDS

SEQ ID NO: 43063 - protein, 13 aa, synthetic construct
ARTGRYEENAMDY

SEQ ID NO: 43064 - protein, 11 aa, synthetic construct
ARLGRRYTMDY

SEQ ID NO: 43065 - protein, 11 aa, synthetic construct
ARQGGDFPMDY

SEQ ID NO: 43066 - protein, 11 aa, synthetic construct
ARLGRRYALDY

SEQ ID NO: 43067 - protein, 15 aa, synthetic construct
ARVVDFDQDYNGFDY

SEQ ID NO: 43068 - protein, 13 aa, synthetic construct
ARGQWWSGGDFDY

SEQ ID NO: 43069 - protein, 16 aa, synthetic construct
ARHSGYGTHWGVLFAY

SEQ ID NO: 43070 - protein, 17 aa, synthetic construct
AKERNYDYDDYYYAMDY

SEQ ID NO: 43071 - protein, 13 aa, synthetic construct
AVHNAHYGTWFAY

SEQ ID NO: 43072 - protein, 10 aa, synthetic construct
ARELIHAMDN

SEQ ID NO: 43073 - protein, 12 aa, synthetic construct
ARGPNYFYSMDY

SEQ ID NO: 43074 - protein, 12 aa, synthetic construct
ARIYGNNVYFDV

SEQ ID NO: 43075 - protein, 14 aa, synthetic construct
TRDSYADDAALFDI

SEQ ID NO: 43076 - protein, 16 aa, synthetic construct
ASLVYCGGDCYSGFDY

SEQ ID NO: 43077 - protein, 16 aa, synthetic construct
VSLVYCGGDCYSGFDY

SEQ ID NO: 43078 - protein, 19 aa, synthetic construct
ARIPGYGGNGDYHYYGMDV

SEQ ID NO: 43079 - protein, 13 aa, synthetic construct
ARSGIAVAGAFDY

SEQ ID NO: 43080 - protein, 14 aa, synthetic construct
AKEDDSSGYYSFDY

SEQ ID NO: 43081 - protein, 14 aa, synthetic construct
ARRYFDWLLGAFDI

SEQ ID NO: 43082 - protein, 10 aa, synthetic construct
GEGYLDPMDY

SEQ ID NO: 43083 - protein, 9 aa, synthetic construct
ARSRWLLDY

SEQ ID NO: 43084 - protein, 10 aa, synthetic construct
ARFDGYIFDY

SEQ ID NO: 43085 - protein, 16 aa, synthetic construct
ARGGSIYYGNLGFFDV

SEQ ID NO: 43086 - protein, 9 aa, synthetic construct
ARGSAWFPY

SEQ ID NO: 43087 - protein, 8 aa, synthetic construct
ARGGLLQY

SEQ ID NO: 43088 - protein, 12 aa, synthetic construct
ARSLLYGDYLDY

SEQ ID NO: 43089 - protein, 13 aa, synthetic construct
ARSITTVVGCAMD

SEQ ID NO: 43090 - protein, 13 aa, synthetic construct
AKVDYSNYLFFDY

SEQ ID NO: 43091 - protein, 10 aa, synthetic construct
ARGGHGYFDL

SEQ ID NO: 43092 - protein, 11 aa, synthetic construct
AKEAPYYAKDY

SEQ ID NO: 43093 - protein, 12 aa, synthetic construct
SRWGGWGFYAMD

SEQ ID NO: 43094 - protein, 10 aa, synthetic construct
ARDRNSHFDY

SEQ ID NO: 43095 - protein, 10 aa, synthetic construct
ARDVGSHFDY

SEQ ID NO: 43096 - protein, 14 aa, synthetic construct
ARDGYDILTGNPRD

SEQ ID NO: 43097 - protein, 15 aa, synthetic construct
ARGDYVWGTYRPLFD

SEQ ID NO: 43098 - protein, 12 aa, synthetic construct
ARIAVAGFFFDY

SEQ ID NO: 43099 - protein, 16 aa, synthetic construct
ARGGNSAFYSYYDMDV

SEQ ID NO: 43100 - protein, 9 aa, synthetic construct
ARGVYYFDY

SEQ ID NO: 43101 - protein, 11 aa, synthetic construct
AREDTMTGLDV

SEQ ID NO: 43102 - protein, 15 aa, synthetic construct
AEVRGSGFNYFGMDV

SEQ ID NO: 43103 - protein, 14 aa, synthetic construct
AREEMAFRAYRFDI

SEQ ID NO: 43104 - protein, 17 aa, synthetic construct
ARHRGNYYATYYYAMDY

SEQ ID NO: 43105 - protein, 8 aa, synthetic construct
ARNDYFDY

SEQ ID NO: 43106 - protein, 14 aa, synthetic construct
APFGYYVSDYAMAY

SEQ ID NO: 43107 - protein, 11 aa, synthetic construct
ARNWPYYYMDF

SEQ ID NO: 43108 - protein, 11 aa, synthetic construct
TTPYEWSWYDY

SEQ ID NO: 43109 - protein, 12 aa, synthetic construct
ARSFFTGFHLDY

SEQ ID NO: 43110 - protein, 15 aa, synthetic construct
ARRSPLGSWIYYAYD

SEQ ID NO: 43111 - protein, 13 aa, synthetic construct
ARPAYWGQGTLVT

SEQ ID NO: 43112 - protein, 12 aa, synthetic construct
ARGETARATFAY

SEQ ID NO: 43113 - protein, 14 aa, synthetic construct
TREGYGNYGAWFAY

SEQ ID NO: 43114 - protein, 16 aa, synthetic construct
ARHSGYGSSYGVLFAY

SEQ ID NO: 43115 - protein, 16 aa, synthetic construct
ARHSGYGTHWGVLFAY

SEQ ID NO: 43116 - protein, 14 aa, synthetic construct
ARSITTVVGCAMDY

SEQ ID NO: 43117 - protein, 13 aa, synthetic construct
ARHDGAVAGLFDY

SEQ ID NO: 43118 - protein, 11 aa, synthetic construct
ARLGRRYTMDY

SEQ ID NO: 43119 - protein, 12 aa, synthetic construct
ARPNYPFYAMDY

SEQ ID NO: 43120 - protein, 10 aa, synthetic construct
ARSFGYGLDY

SEQ ID NO: 43121 - protein, 14 aa, synthetic construct
ARYDWVPKIGVFDS

SEQ ID NO: 43122 - protein, 13 aa, synthetic construct
ARGRYSYRYWFDY

SEQ ID NO: 43123 - protein, 15 aa, synthetic construct
ARDVGRWAPGGFLDY

SEQ ID NO: 43124 - protein, 11 aa, synthetic construct
ARGVASWYLDY

SEQ ID NO: 43125 - protein, 12 aa, synthetic construct
ARWEVYHGYVPY

SEQ ID NO: 43126 - protein, 12 aa, synthetic construct
ASLYFGFPWFAY

SEQ ID NO: 43127 - protein, 13 aa, synthetic construct
AREDYDYHWYFDV

SEQ ID NO: 43128 - protein, 13 aa, synthetic construct
SRWGGAGAYAMDV

SEQ ID NO: 43129 - protein, 14 aa, synthetic construct
AKEAPYYAKDYMDV

SEQ ID NO: 43130 - protein, 13 aa, synthetic construct
TTDFYDGTYYWNY

SEQ ID NO: 43131 - protein, 16 aa, synthetic construct
ARRADYGNYEYTWFAY

SEQ ID NO: 43132 - protein, 11 aa, synthetic construct
AKRGNSNSFDY

SEQ ID NO: 43133 - protein, 15 aa, synthetic construct
ARDELWATNYYYMDV

SEQ ID NO: 43134 - protein, 11 aa, synthetic construct
AKRGNSNSFDY

SEQ ID NO: 43135 - protein, 11 aa, synthetic construct
AKRGNSNSFDY

SEQ ID NO: 43136 - protein, 13 aa, synthetic construct
ARPRYNSGYFFDY

SEQ ID NO: 43137 - protein, 18 aa, synthetic construct
ARLQVFGYPGIRDYVMDA

SEQ ID NO: 43138 - protein, 20 aa, synthetic construct
ARVRTWGDYTTGEEIINSWY

SEQ ID NO: 43139 - protein, 13 aa, synthetic construct
ARAWGYSSYYFDY

SEQ ID NO: 43140 - protein, 8 aa, synthetic construct
AAGWNFDY

SEQ ID NO: 43141 - protein, 8 aa, synthetic construct
ARGWNFDY

SEQ ID NO: 43142 - protein, 8 aa, synthetic construct
AAGWNFDY

SEQ ID NO: 43143 - protein, 8 aa, synthetic construct
ARGWNFDY

SEQ ID NO: 43144 - protein, 15 aa, synthetic construct
ARDNYGRNYDYGMDY

SEQ ID NO: 43145 - protein, 15 aa, synthetic construct
TRDNYGRNYDYGMDY

SEQ ID NO: 43146 - protein, 14 aa, synthetic construct
ARLGGDNYYEYFDV

SEQ ID NO: 43147 - protein, 10 aa, synthetic construct
APTTVVPFAY

SEQ ID NO: 43148 - protein, 9 aa, synthetic construct
ARSRWLLDY

SEQ ID NO: 43149 - protein, 9 aa, synthetic construct
ARSRWLLDY

SEQ ID NO: 43150 - protein, 9 aa, synthetic construct
ARSRWLLDY

SEQ ID NO: 43151 - protein, 10 aa, synthetic construct
ARFDGYIFDY

SEQ ID NO: 43152 - protein, 10 aa, synthetic construct
ARFDGYIFDY

SEQ ID NO: 43153 - protein, 13 aa, synthetic construct
ARHDGAVAGLFDY

SEQ ID NO: 43154 - protein, 8 aa, synthetic construct
AKEQWEGD

SEQ ID NO: 43155 - protein, 8 aa, synthetic construct
AKEQWEGD

SEQ ID NO: 43156 - protein, 8 aa, synthetic construct
AKEQWEGD

SEQ ID NO: 43157 - protein, 8 aa, synthetic construct
AKEQWEGD

SEQ ID NO: 43158 - protein, 8 aa, synthetic construct
AKGGENTF

SEQ ID NO: 43159 - protein, 8 aa, synthetic construct
AKGGENTF

SEQ ID NO: 43160 - protein, 8 aa, synthetic construct
AKGGENTF

SEQ ID NO: 43161 - protein, 8 aa, synthetic construct
AKGGENTF

SEQ ID NO: 43162 - protein, 8 aa, synthetic construct
ASRGGHYG

SEQ ID NO: 43163 - protein, 8 aa, synthetic construct
ASRGGHYG

SEQ ID NO: 43164 - protein, 8 aa, synthetic construct
AKRSDDYS

SEQ ID NO: 43165 - protein, 8 aa, synthetic construct
AKRSDDYS

SEQ ID NO: 43166 - protein, 8 aa, synthetic construct
ARTWRGNS

SEQ ID NO: 43167 - protein, 8 aa, synthetic construct
ARTWRGNS

SEQ ID NO: 43168 - protein, 9 aa, synthetic construct
ARDYGYVLD

SEQ ID NO: 43169 - protein, 9 aa, synthetic construct
ARDYGYVLD

SEQ ID NO: 43170 - protein, 9 aa, synthetic construct
ARDYGYVLD

SEQ ID NO: 43171 - protein, 8 aa, synthetic construct
ARRSPLGS

SEQ ID NO: 43172 - protein, 9 aa, synthetic construct
ARSITTVVG

SEQ ID NO: 43173 - protein, 9 aa, synthetic construct
ARSITTVVG

SEQ ID NO: 43174 - protein, 9 aa, synthetic construct
ARSITTVVG

SEQ ID NO: 43175 - protein, 9 aa, synthetic construct
ARSITTVVG

SEQ ID NO: 43176 - protein, 9 aa, synthetic construct
TRRVPIRLD

SEQ ID NO: 43177 - protein, 9 aa, synthetic construct
TRRVPIRLD

SEQ ID NO: 43178 - protein, 9 aa, synthetic construct
TRRVPIRLD

SEQ ID NO: 43179 - protein, 9 aa, synthetic construct
TRRVPIRLD

SEQ ID NO: 43180 - protein, 9 aa, synthetic construct
TRRVPIRLD

SEQ ID NO: 43181 - protein, 9 aa, synthetic construct
TRRVPIRLD

SEQ ID NO: 43182 - protein, 9 aa, synthetic construct
TRRVPIRLD

SEQ ID NO: 43183 - protein, 9 aa, synthetic construct
ARNLYLFGQ

SEQ ID NO: 43184 - protein, 9 aa, synthetic construct
ARNLYLWGQ

SEQ ID NO: 43185 - protein, 9 aa, synthetic construct
ARNLYLFGQ

SEQ ID NO: 43186 - protein, 9 aa, synthetic construct
ARNLYLWGQ

SEQ ID NO: 43187 - protein, 9 aa, synthetic construct
ARNLYLFGQ

SEQ ID NO: 43188 - protein, 9 aa, synthetic construct
ARNLYLWGQ

SEQ ID NO: 43189 - protein, 9 aa, synthetic construct
ARNLYLWGQ

SEQ ID NO: 43190 - protein, 9 aa, synthetic construct
TRRVPVYFD

SEQ ID NO: 43191 - protein, 9 aa, synthetic construct
ARYDWYFDV

SEQ ID NO: 43192 - protein, 9 aa, synthetic construct
TRHDRGGLY

SEQ ID NO: 43193 - protein, 9 aa, synthetic construct
ATHTGDYFD

SEQ ID NO: 43194 - protein, 9 aa, synthetic construct
ATHTGDYFD

SEQ ID NO: 43195 - protein, 9 aa, synthetic construct
TRHDRGGLY

SEQ ID NO: 43196 - protein, 9 aa, synthetic construct
ARHVGYSYG

SEQ ID NO: 43197 - protein, 9 aa, synthetic construct
SNHYYGSSD

SEQ ID NO: 43198 - protein, 10 aa, synthetic construct
TRYDGSRAMD

SEQ ID NO: 43199 - protein, 10 aa, synthetic construct
SRDSSFYYVY

SEQ ID NO: 43200 - protein, 10 aa, synthetic construct
SRDSSFYYVY

SEQ ID NO: 43201 - protein, 9 aa, synthetic construct
SRQYSAYFD

SEQ ID NO: 43202 - protein, 8 aa, synthetic construct
ARWTSGLD

SEQ ID NO: 43203 - protein, 10 aa, synthetic construct
ARGRYSYRYW

SEQ ID NO: 43204 - protein, 10 aa, synthetic construct
ARGRYSYRYW

SEQ ID NO: 43205 - protein, 10 aa, synthetic construct
ARLGYPTTTL

SEQ ID NO: 43206 - protein, 10 aa, synthetic construct
ARLGYPTTTL

SEQ ID NO: 43207 - protein, 10 aa, synthetic construct
ATSGSSVLYF

SEQ ID NO: 43208 - protein, 10 aa, synthetic construct
AREGTYYAMD

SEQ ID NO: 43209 - protein, 10 aa, synthetic construct
ARAAWGSCYD

SEQ ID NO: 43210 - protein, 10 aa, synthetic construct
AREYDILTGY

SEQ ID NO: 43211 - protein, 11 aa, synthetic construct
ARDYGGIYYFD

SEQ ID NO: 43212 - protein, 10 aa, synthetic construct
ARAAWGSCYD

SEQ ID NO: 43213 - protein, 10 aa, synthetic construct
AREYDILTGY

SEQ ID NO: 43214 - protein, 9 aa, synthetic construct
AKGGYTFDY

SEQ ID NO: 43215 - protein, 11 aa, synthetic construct
ARIGPIKYPTA

SEQ ID NO: 43216 - protein, 11 aa, synthetic construct
ARIGPIKYPTA

SEQ ID NO: 43217 - protein, 267 aa, synthetic construct
MALPVTALLLPLALLLHAARPEVQLVESGGGLVQPGGSLRLSCAASGFNIKDTCIGWVRRAPGKEEELVAKICKYSGHTRYADSVKGRFTISADTSKNTAYLQMNSLRAEDTAVYYCAAVSVRDGHYNYWGQGTTVTVSSGGGSGGGSEVQLVESGGGLVQPGGSLRLSCAASGFNIKDTCIGWVRRAPGKEEELVADICPYKGSTRYADSVKGRFTISADTSKNTAYLQMNSLRAEDTAVYYCAIVSARDGYYNYWGQGTTVTVSS

SEQ ID NO: 43218 - protein, 140 aa, synthetic construct
MALPVTALLLPLALLLHAARPEVQLVESGGGLVQPGGSLRLSCAASGFNIKDTCIGWVRRAPGKEEELVAKICKYSGHTRYADSVKGRFTISADTSKNTAYLQMNSLRAEDTAVYYCAAVSVRDGHYNYWGQGTTVTVSS

SEQ ID NO: 43219 - protein, 267 aa, synthetic construct
MALPVTALLLPLALLLHAARPEVQLVESGGGLVQPGGSLRLSCTFSGGTFSSYTMGWFRQAPGKEREFVAEVRWGGVTTYSNSLKDRFSISEDSVKNAVYLQMNSLKPEDTAVYYCAAVRQMYMTVVPDYWGQGTLVTVSSSGGGGSFEQLQLQESGPGLVKPSETLSLTCTVSGGSISSGDYYWGWIRQPPGKGLEWIGHIYYSGATYYNPSLKSRVTISVDTSRNQFSLKLSSVTAADTAVYYCTRDDSSNWRSRGQGTLVTVSS

SEQ ID NO: 43220 - protein, 141 aa, synthetic construct
MALPVTALLLPLALLLHAARPEVQLVESGGGLVQPGGSLRLSCTFSGGTFSSYTMGWFRQAPGKEREFVAEVRWGGVTTYSNSLKDRFSISEDSVKNAVYLQMNSLKPEDTAVYYCAAVRQMYMTVVPDYWGQGTLVTVSS

SEQ ID NO: 43221 - protein, 279 aa, synthetic construct
MALPVTALLLPLALLLHAARPEVQLVESGGGVVQPGRSLRLSCAASGFSFSGYGMHWVRQAPGKGLEWVAYISYDGSNKYYADSVKGRFTISRDNSKNTLYLQMNSLRAEDTAVYYCAKDPAWGLRLGESSSYDFDIWGQGTMVTVSSGSGGGGSGGGGSGGGGSFEVQLLESGGGLVQPGGSLRLSCAASGFSFSSYALSWVRQAPGKGLEWVSSIGENDGTTDYADAVKGRFTISRDNSKNTLYLQMNSLRVEDTAVYYCVKDGVHWGQGTLVTVSS

SEQ ID NO: 43222 - protein, 148 aa, synthetic construct
MALPVTALLLPLALLLHAARPEVQLVESGGGVVQPGRSLRLSCAASGFSFSGYGMHWVRQAPGKGLEWVAYISYDGSNKYYADSVKGRFTISRDNSKNTLYLQMNSLRAEDTAVYYCAKDPAWGLRLGESSSYDFDIWGQGTMVTVSS

SEQ ID NO: 43223 - protein, 272 aa, synthetic construct
MDWIWRILFLVGAATGAHSEVQLLESGGGLVQPGGSLRLSCAASGFSFSSYALSWVRQAPGKGLEWVSSIGENDGTTDYADAVKGRFTISRDNSKNTLYLQMNSLRVEDTAVYYCVKDGVHWGQGTLVTVSSGSGGGGSGGGGSFEVQLVESGGGVVQPGRSLRLSCAASGFSFSGYGMHWVRQAPGKGLEWVAYISYDGSNKYYADSVKGRFTISRDNSKNTLYLQMNSLRAEDTAVYYCAKDPAWGLRLGESSSYDFDIWGQGTMVTVSS

SEQ ID NO: 43224 - protein, 132 aa, synthetic construct
MDWIWRILFLVGAATGAHSEVQLLESGGGLVQPGGSLRLSCAASGFSFSSYALSWVRQAPGKGLEWVSSIGENDGTTDYADAVKGRFTISRDNSKNTLYLQMNSLRVEDTAVYYCVKDGVHWGQGTLVTVSS

SEQ ID NO: 43225 - protein, 145 aa, synthetic construct
MALPVTALLLPLALLLHAARPQLQLQESGPGLVKPSETLALTCNVSGGSISSSSYYWGWIRQPPGKRLEWIGSIYYSGSTYFNPSLKSRVTISVDTSKNQFSLKLSSVTAADTAVYYCAGGDYYGPVGQWPSDYRGQGTLVTVSS

SEQ ID NO: 43226 - protein, 275 aa, synthetic construct
MDWIWRILFLVGAATGAHSQLQLQESGPGLVKPSETLSLTCTVSGGSVSSSSYYWGWIRQPPGKRLELIGSIYYGGSTYFNPSLKSRVTISVDTSKNQFSLKLSSVTAADTAVYYCAGGDTYGPVGQWPSDYRGQGTLVTVSSGGGGSGGGSFEVQLLESGGGLVQPGGSLRLSCAASGFIFSIYAMSWVRQAPGKGLEWVSGISGSGVNTYYADSVKGRFIISRDNSRNTVYLQMNSLRADDTAVYHCANGKGWDGNTWYEDYRGQGTLVTVSS

SEQ ID NO: 43227 - protein, 143 aa, synthetic construct
MDWIWRILFLVGAATGAHSQLQLQESGPGLVKPSETLSLTCTVSGGSVSSSSYYWGWIRQPPGKRLELIGSIYYGGSTYFNPSLKSRVTISVDTSKNQFSLKLSSVTAADTAVYYCAGGDTYGPVGQWPSDYRGQGTLVTVSS

SEQ ID NO: 43228 - protein, 142 aa, synthetic construct
MALPVTALLLPLALLLHAARPEVQLLESGGGLVQPGGSLRLSCAASGFTFSSYAMSWVRQAPGKGLEWVSSISGSGDYIYYADSVKGRFTISRDISKNTLYLQMNSLRAEDTAVYYCAKEGTGANSSLADYRGQGTLVTVSS

SEQ ID NO: 43229 - protein, 139 aa, synthetic construct
MALPVTALLLPLALLLHAARPQVQLVESGGGLVQPGGSLRLSCAASGFTFTNHAMSWVRQAPGKGLELVSSISGNGRTTYYADSVKGRFTISRDISKNTLDLQMNSLRAEDTAVYYCAKDGGETLVDSRGQGTLVTVSS

SEQ ID NO: 43230 - protein, 267 aa, synthetic construct
MALPVTALLLPLALLLHAARPQLQLQESGPGLVKPSETLSLTCTVSGDSISSGDYYWGWIRQPPGKGLEWIGHIYYSGVTYYNPSLKSRVTISVDTSRNQFSLKLSSVTAADTAVYYCTREDSSNWRSRGQGTLVTVSSLESGGGGSFEVQLLESGGGLIQPGGSLRLSCAASGFTFSSHAMTWVRQAPGKGLEWVSAISGSGDYTHYADSVKGRFTISRDNSKNTVYLQMNSLRAEDSAVYYCAKDEDGGSLLGHRGQGTLVTVSS

SEQ ID NO: 43231 - protein, 127 aa, synthetic construct
EVQLVESGGGVVQPGRSLRLSCAASGFSFSGYGMHWVRQAPGKGLEWVAYISYDGSNKYYADSVKGRFTISRDNSKNTLYLQMNSLRAEDTAVYYCAKDPAWGLRLGESSSYDFDIWGQGTMVTVSS

SEQ ID NO: 43232 - protein, 113 aa, synthetic construct
EVQLLESGGGLVQPGGSLRLSCAASGFSFSSYALSWVRQAPGKGLEWVSSIGENDGTTDYADAVKGRFTISRDNSKNTLYLQMNSLRVEDTAVYYCVKDGVHWGQGTLVTVSS

SEQ ID NO: 43233 - protein, 113 aa, synthetic construct; identical to SEQ ID NO: 43232

SEQ ID NO: 43234 - protein, 127 aa, synthetic construct; identical to SEQ ID NO: 43231

SEQ ID NO: 43235 - protein, 123 aa, synthetic construct
QVQLVESGGGLVQAGDSVTLSCTASGRTFSSYALAWFRQRPGKEREFVAGLRWGGPTNYADSVKDRFTISGDSAKHTMYLQMNSLKPEDTAVYYCGYNPGGWAVPSQYEYDSWGQGTQVTVSS

SEQ ID NO: 43236 - protein, 118 aa, synthetic construct
QVQLQESGGGLAQAGGSLRLSCAASGRTFSMGWFRQAPGKEREFVAAITYSGGSPYYASSVRGRFTISRDNAKNTVYLQMNSLKPEDTAVYYCAANPTYGSDWNAENWGQGTQVTVSS

SEQ ID NO: 43237 - protein, 116 aa, synthetic construct
EVQLVESGGGLVQPGGSLRLSCAASGFSFSDFWMSWVRQAPGKGLEWVATISQAGSEKDYVDSVKGRFTISRDNAKKSLYLQMNSLRAEDTAVYYCASGVYSFDYRGQGTLVTVSS

SEQ ID NO: 43238 - protein, 116 aa, synthetic construct
EVQLVESGGGLVQPGGSLRLSCAASGFTFSNYWMSWVRQAPGKGQEWVATINQDGSDKDYVDSVKGRFTISRDNAKKSLYLQMNSLRAEDTAVYYCASGVYSFDYRGQGTLVTVSS

SEQ ID NO: 43239 - protein, 116 aa, synthetic construct
EVQLVESGGGLVQPGGSLRLSCAASGIDFSRYWMSWVRQAPGKGLEWVATISQAGSEKDYVDSVKGRFTISRDNAKKSLYLQMNSLRAEDTAVYYCASGVYSFDYRGQGTLVTVSS

SEQ ID NO: 43240 - protein, 116 aa, synthetic construct
EVQLVESGGGLVQPGGSLRLSCAASGIDFSRYWMSWVRQAPGKGQEWVATINQDGSDKDYVDSVKGRFTISRDNAKKSLYLQMNSLRAEDTAVYYCASGVYSFDYRGQGTLVTVSS

SEQ ID NO: 43241 - protein, 120 aa, synthetic construct
EVQLVESGGGLVQPGGSLRLSCTFSGGTFSSYTMGWFRQAPGKEREFVAEVRWGGVTTYSNSLKDRFSISEDSVKNAVYLQMNSLKPEDTAVYYCAAVRQMYMTVVPDYWGQGTLVTVSS

SEQ ID NO: 43242 - protein, 118 aa, synthetic construct
EVQLVESGGGLVQAGGSLRLSCAASGRTFSMGWFRQAPGKEREFVAAITYSGGSPYYADSVKGRFTISRDNAKNTVYLQMNSLKPEDTAVYYCAANPTYGSDWNAENWGQGTQVTVSS

SEQ ID NO: 43243 - protein, 118 aa, synthetic construct
QLQLQESGPGLVKPSETLSLTCTVSGGSISSGDYYWGWIRQPPGKGLEWIGHIYYSGATYYNPSLKSRVTISVDTSRNQFSLKLSSVTAADTAVYYCTRDDSSNWRSRGQGTLVTVSS

SEQ ID NO: 43244 - protein, 118 aa, synthetic construct
QLQLQESGPGLVKPSETLSLTCTVSGDSISSGDYYWGWIRQPPGKGLEWIGHIYYSGVTYYNPSLKSRVTISVDTSRNQFSLKLSSVTAADTAVYYCTREDSSNWRSRGQGTLVTVSS

SEQ ID NO: 43245 - protein, 118 aa, synthetic construct
QLQLQESGPGLVKPSETLSLTCTVSGGSISSGDYYWGWIRQPPGKGLEWIGSISYSGSTYYNPSLKSRVTISVDTSRNQFSLKLSSVTAADTAVYYCTREDSSNWRSRGQGTLVTVSS

SEQ ID NO: 43246 - protein, 124 aa, synthetic construct
QLQLQESGPGLVKPSETLALTCNVSGGSISSSSYYWGWIRQPPGKRLEWIGSIYYSGSTYFNPSLKSRVTISVDTSKNQFSLKLSSVTAADTAVYYCAGGDYYGPVGQWPSDYRGQGTLVTVSS

SEQ ID NO: 43247 - protein, 130 aa, synthetic construct
EVQLLESGGGLVQPGGSLRLSCAASGFIFSSYAMSWVRQAPGKGQEWVSGVSGTGVNTYYADSVKGRFTISRDNSKNTLYLQMNSLRAEDTAVYYCASGKGWDSGSWYEDYRGQGTLVTVSSTRPRLCLL

SEQ ID NO: 43248 - protein, 124 aa, synthetic construct
QLQLQESGPGLVKPSETLSLTCTVSGGSVSSSSYYWGWIRQPPGKRLELIGSIYYGGSTYFNPSLKSRVTISVDTSKNQFSLKLSSVTAADTAVYYCAGGDTYGPVGQWPSDYRGQGTLVTVSS

SEQ ID NO: 43249 - protein, 122 aa, synthetic construct
EVQLLESGGGLVQPGGSLRLSCAASGFIFSIYAMSWVRQAPGKGLEWVSGISGSGVNTYYADSVKGRFIISRDNSRNTVYLQMNSLRADDTAVYHCANGKGWDGNTWYEDYRGQGTLVTVSS

SEQ ID NO: 43250 - protein, 117 aa, synthetic construct
EVQVLESGGGLVQPGGSLRLSCAASGFTFSNFAMSWVRQAPGKGLEWVSTISGSAGTTDYADSVKGRFTISRDNSKKTLYLQMNSLRVEDTAVYYCADGRGPFFDYRGQGTLVTVSS

SEQ ID NO: 43251 - protein, 119 aa, synthetic construct
EVQLVESGGGLVQPGGSLRLSCAASGFNIKDTCIGWVRRAPGKEEELVAKICKYSGHTRYADSVKGRFTISADTSKNTAYLQMNSLRAEDTAVYYCAAVSVRDGHYNYWGQGTTVTVSS

SEQ ID NO: 43252 - protein, 119 aa, synthetic construct
EVQLVESGGGLVQPGGSLRLSCAASGFNIKDTCIGWVRRAPGKEEELVADICPYKGSTRYADSVKGRFTISADTSKNTAYLQMNSLRAEDTAVYYCAIVSARDGYYNYWGQGTTVTVSS

SEQ ID NO: 43253 - protein, 119 aa, synthetic construct
EVQLLESGGGLVQPGGSLRLSCAASGFTFSSYAMSWVRQAPGKGLEWVSAITGSGGSTYYADSVKGRFTISRDNSKNTLYLQMNSLRAEDTAVYYCAKDEDGGSLLGHRGQGTLVTVSS

SEQ ID NO: 43254 - protein, 119 aa, synthetic construct
EVQLLESGGGLIQPGGSLRLSCAASGFTFSSHAMTWVRQAPGKGLEWVSAISSGGSYTYYADSVKGRFTISRDNSKNTLYLQMNSLRAEDTAVYYCAKDEDGGSLLGHRGQGTLVTVSS

SEQ ID NO: 43255 - protein, 119 aa, synthetic construct
EVQLVESGGGLVQPGGSLRLSCAASGFSFSDFWMSWVRQAPGKGLEWVSAISGSGDYTHYADSVKGRFTISRDNSKNTVYLQMNSLRAEDSAVYYCAKDEDGGSLLGHRGQGTLVTVSS

SEQ ID NO: 43256 - protein, 121 aa, synthetic construct
EVQLLESGGGLVQPGGSLRLSCAASGFAFSIYDMSWVRQAPGKGLEWVSSISGSGDYIYYADSVKGRFTISRDISKNTLYLQMNSLRAEDTAVYYCAKEGTGANSSLADYRGQGTLVTVSS

SEQ ID NO: 43257 - protein, 121 aa, synthetic construct
EVQLLESGGGLVQPGGSLRLSCAASGFTFSSYAMSWVRQAPGKGLEWVSSISGSGDYIYYADSVKGRFTISRDISKNTLYLQMNSLRAEDTAVYYCAKEGTGANSSLADYRGQGTLVTVSS

SEQ ID NO: 43258 - protein, 118 aa, synthetic construct
QVQLVESGGGLVQPGGSLRLSCAASGFTFTNHAMSWVRQAPGKGLELVSSISGNGRTTYYADSVKGRFTISRDISKNTLDLQMNSLRAEDTAVYYCAKDGGETLVDSRGQGTLVTVSS

SEQ ID NO: 43259 - protein, 119 aa, synthetic construct
EVQLLESGGGLIQPGGSLRLSCAASGFTFSSHAMTWVRQAPGKGLEWVSAISGSGDYTHYADSVKGRFTISRDNSKNTVYLQMNSLRAEDSAVYYCAKDEDGGSLLGHRGQGTLVTVSS

SEQ ID NO: 43260 - protein, 120 aa, synthetic construct
QVQLQESGGGLVQAGDSLRLSCAASGRAVSSLFMGWFRRAPGKERELVAAISRYSLYTYYADSVKGRFTISADNAKNAVYLQMNSLKPEDTAVYYCASKLEYTSNDYDSWGQGTQVTVSS

SEQ ID NO: 43261 - protein, 120 aa, synthetic construct
EVQLQESGGGLVQPGGSLRLSCAASGRTFSSLFMGWFRQAPGKERELVAAISRYSLYTYYADSVKGRFTISADNAKNAVYLQMNSLKPEDTAVYYCASKLEYTSNDYDSWGQGTQVTVSS

SEQ ID NO: 43262 - protein, 120 aa, synthetic construct
EVQLQESGGGLVQPGGSLRLSCAASGRTFSSLFMGWVRQAPGKGLELVSAISRYSLYTYYADSVKGRFTISRDNAKNTLYLQMNSLRPEDTAVYYCASKLEYTSNDYDSWGQGTLVTVSS

SEQ ID NO: 43263 - protein, 128 aa, synthetic construct
EVQLVESGGGLVQPGGSLRLSCEASGFASDDYIIGWFRQAPGKEREGVSCISSKYANTVYTDSVKGRFRLSRGTAKNTVYLQMSALKPEDTAVYYCAMDSRRVTCPEISTMHRNFDSWGQGTLVTVSS

SEQ ID NO: 43264 - protein, 128 aa, synthetic construct
EVQLVESGGGLVQPGGSLRLSCAASGFASDYYIIGWFRQAPGKEREGVSCISSRYANTNYADSVKGRFTISRDNAKNTVYLQMNSLKPEDTAVYYCAADTRRYTCPDIATMHRNFDSWGQGTLVTVSS

SEQ ID NO: 43265 - protein, 124 aa, synthetic construct
EVQLVESGGSLVQPGGSLRLSCAASGFTFDDYAMSWVRQVPGKGLEWVSSINWSGTHTDYADSVKGRFTISRNNANNTLYLQMNSLKSEDTAVYYCAKNWRDAGTTWFEKSGSAGQGTQVTVSS

SEQ ID NO: 43266 - protein, 118 aa, synthetic construct
EVQLVESGGGLVQAGGSLRLSCAASGITFSINTMGWYRQAPGKQRELVALISSIGDTYYADSVKGRFTISRDNAKNTVYLQMNSLKPEDTAVYYCKRFRTAAQGTDYWGQGTQVTVSS

SEQ ID NO: 43267 - protein, 119 aa, synthetic construct
EVQLVESGGGLVQPGGSLRLSCAASGSIFGFNDMAWYRQAPGKQRELVALISRVGVTSSADSVKGRFTISRVNAKDTVYLQMNSLKPEDTAVYYCYMDQRLDGSTLAYWGQGTQVTVSS

SEQ ID NO: 43268 - protein, 120 aa, synthetic construct
DVQLVESGGGLVQPGGSLRLSCAASGSIGGLNAMAWYRQAPGKERELVAGIFGVGSTRYADSVKGRFTISRDNSKNTVYLQMNSLRPEDTAVYYCRMSSVTRGSSDYWGQGTLVTVSSLE

SEQ ID NO: 43269 - protein, 125 aa, synthetic construct
EVQLVESGGGLVQPGGSLRLSCAASGRTYYLNAMGWFRQAPGKEREFVAAIDWSEGNKDYADSVKGRFTISRDNSKNTVYLQMNSLRPEDTAVYYCAADTPPWGPLIYIESYDSWGQGTLVTVSS

SEQ ID NO: 43270 - protein, 123 aa, synthetic construct
EVQLVESGGGSVQAGGSLRLSCAASGDTYGSYWMGWFRQAPGKEREGVAAINRGGGYTVYADSVKGRFTISRDTAKNTVYLQMNSLRPDDTADYYCAASGVLGGLHEDWFNYWGQGTLVTVSS

SEQ ID NO: 43271 - protein, 122 aa, synthetic construct
VQLVESGGGSVQAGGSLRLSCAASGDTYGSYWMGWFRQAPGQEREAVAAINRGGGYTVYADSVKGRFTISRDNAKNTLYLQMNSLRPDDTADYYCAASGVLGGLHEDWFNYWGQGTLVTVSS

SEQ ID NO: 43272 - protein, 124 aa, synthetic construct
EVQLVESGGGSVQTGGSLRLTCAASGRTSRSYGMGWFRQAPGKEREFVSGISWRGDSTGYADSVKGRFTISRDNAKNTVDLQMNSLKPEDTAIYYCAAAAGSAWYGTLYEYDYWGQGTLVTVSS

SEQ ID NO: 43273 - protein, 124 aa, synthetic construct
EVQLVESGGGSVQAGGSLRLTCAASGSTSRSYGMGWFRQAPGKEREFVSGISWRGDSTGYADSVKGRFTISRDNAKNTVDLQMNSLKPEDTAIYYCAAAAGSTWYGTLYEYDYWGQGTLVTVSS

SEQ ID NO: 43274 - protein, 125 aa, synthetic construct
DVQLVESGGGLVQPGGSLRLSCAASGFILDYYAIGWFRQAPGKEREGVLCIDASDDITYYADSVKGRFTISRDNSKNTVYLQMNSLRPEDTAVYYCATPIGLSSSCLLEYDYDYWGQGTLVTVSS

SEQ ID NO: 43275 - protein, 126 aa, synthetic construct
EVQLVESGGGLVQAGDSLRLSCAASGRAFSRYAMGWFRQAPGKEREFVAAIGWGPSKTNYADSVKGRFTISRDNAKNTVYLQMNTLKPEDTAVYSCAAKFVNTDSTWSRSEMYTYWGQGTLVTVSS

SEQ ID NO: 43276 - protein, 122 aa, synthetic construct
EVQLVESGGGLVQAGGSLRLSCVASGISSSKRNMGWYRQAPGKQRESVATISSGGNKDYTDAVKDRFTISRDTTKNTVYLQMNSLKPEDTAVYYCKIEAGTGWATRRGYTYWGQGTLVTVSS

SEQ ID NO: 43277 - protein, 112 aa, synthetic construct
QVQLVQSGGGLVQPGGSLRLSCAASDFDFAAYEMSWVRQAPGQGLEWVAIISHDGIDKYYTDSVKGRFTISRDNSKNTLYLQMNTLRAEDTATYYCLRLGAVGQGTLVTVSS

SEQ ID NO: 43278 - protein, 120 aa, synthetic construct
QVQLVQSGGGLVQPGGSLRLSCAASDFAFDDYEMSWVRQAPGKALEWIGDINHSGTTIYNPSLKSRVTISRDNSKNTLYLQMNTLRAEDTAIYYCARPHYGDYSDAFDIWGQGTMVTVSS

SEQ ID NO: 43279 - protein, 115 aa, synthetic construct [sequence omitted]

SEQ ID NO: 43280 - protein, 116 aa, synthetic construct
EVQLVESGGGLVQAGGSLRLSCAASGSIFSGNVMGWYRRQAPGKEREWVAAIASGGSIYYRDSVKGRFTISRDNAKNTVYLQMNSLKPEDTAVYYCNSHPPTLPYWGLGTQVTVSS

SEQ ID NO: 43281 - protein, 126 aa, synthetic construct
EVQLVESGGGSVQAGGSLRLSCTTSGRALNMYVMGWFRQAPGNEREFVAATSSSGGSTSYPDSVKGRFTISRDNAKNTVYLQMNSLKPEDTAAYRCAASPYVSTPTMNILEEYRYWGLGTQVTVSS

SEQ ID NO: 43282 - protein, 121 aa, synthetic construct [sequence omitted]

SEQ ID NO: 43283 - protein, 266 aa, synthetic construct
EVQLVESGGGSVQTGGSLRLTCAASGRTSRSYGMGWFRQAPGKEREFVSGISWRGDSTGYADSVKGRFTISRDNAKNTVDLQMNSLKPEDTAIYYCAAAAGSAWYGTLYEYDYWGQGTLVTVSSLEGGGGSGGGGSGGGGSFEEVQLVESGGGSVQAGGSLRLSCAASGDTYGSYWMGWFRQAPGKEREGVAAINRGGGYTVYADSVKGRFTISRDTAKNTVYLQMNSLRPDDTADYYCAASGVLGGLHEDWFNYWGQGTLVTVSS

SEQ ID NO: 43284 - protein, 285 aa, synthetic construct
EVQLVESGGGSVQAGGSLRLTCAASGSTSRSYGMGWFRQAPGKEREFVSGISWRGDSTGYADSVKGRFTISRDNAKNTVDLQMNSLKPEDTAIYYCAAAAGSTWYGTLYEYDYWGQGTLVTVSSLEGGGGSGGGGSGGGGSGSGGSGSGGSGSGGSGSGGSFEVQLVESGGGSVQAGGSLRLSCAASGDTYGSYWMGWFRQAPGQEREAVAAINRGGGYTVYADSVKGRFTISRDNAKNTLYLQMNSLRPDDTADYYCAASGVLGGLHEDWFNYWGQGTLVTVSS

SEQ ID NO: 43285 - protein, 275 aa, synthetic construct
EVQLVESGGGLVQAGGSLRLSCAASGITFSINTMGWYRQAPGKQRELVALISSIGDTYYADSVKGRFTISRDNAKNTVYLQMNSLKPEDTAVYYCKRFRTAAQGTDYWGQGTQVTVSSLEGGGGSGGGGSGGGGSGSGGSGSGGSGSGGSGSGGSFEVQLVESGGGLVQPGGSLRLSCAASGSIFGFNDMAWYRQAPGKQRELVALISRVGVTSSADSVKGRFTISRVNAKDTVYLQMNSLKPEDTAVYYCYMDQRLDGSTLAYWGQGTQVTVSS

SEQ ID NO: 43286 - protein, 242 aa, synthetic construct; identical to SEQ ID NO: 41356

SEQ ID NO: 43287 - protein, 280 aa, synthetic construct
DVQLVESGGGLVQPGGSLRLSCAASGSIGGLNAMAWYRQAPGKERELVAGIFGVGSTRYADSVKGRFTISRDNSKNTVYLQMNSLRPEDTAVYYCRMSSVTRGSSDYWGQGTLVTVSSLEGGGGSGGGGSGGGGSGSGGSGSGGSGSGGSGSGGSFEVQLVESGGSLVQPGGSLRLSCAASGFTFDDYAMSWVRQVPGKGLEWVSSINWSGTHTDYADSVKGRFTISRNNANNTLYLQMNSLKSEDTAVYYCAKNWRDAGTTWFEKSGSAGQGTQVTVSS

SEQ ID NO: 43288 - protein, 288 aa, synthetic construct
DVQLVESGGGLVQPGGSLRLSCAASGFILDYYAIGWFRQAPGKEREGVLCIDASDDITYYADSVKGRFTISRDNSKNTVYLQMNSLRPEDTAVYYCATPIGLSSSCLLEYDYDYWGQGTLVTVSSLEGGSGSGGGGSGGGGSGSGGSGSGGSGSGGSGSGGSFEVQLVESGGGLVQPGGSLRLSCAASGRTYYLNAMGWFRQAPGKEREFVAAIDWSEGNKDYADSVKGRFTISRDNSKNTVYLQMNSLRPEDTAVYYCAADTPPWGPLIYIESYDSWGQGTLVTVSS

SEQ ID NO: 43289 - protein, 271 aa, synthetic construct
QVQLVQSGGGLVQPGGSLRLSCAASDFDFAAYEMSWVRQAPGQGLEWVAIISHDGIDKYYTDSVKGRFTISRDNSKNTLYLQMNTLRAEDTATYYCLRLGAVGQGTLVTVSSLEGGGGSGGGGSGGGGSGSGGSGSGGSGSGGSGSGGSFEQVQLVQSGGGLVQPGGSLRLSCAASDFAFDDYEMSWVRQAPGKALEWIGDINHSGTTIYNPSLKSRVTISRDNSKNTLYLQMNTLRAEDTAIYYCARPHYGDYSDAFDIWGQGTMVTVSS

SEQ ID NO: 43290 - protein, 119 aa, synthetic construct
QVKLEESGGGLVQAGRSLRLSCAASEHTFSSHVMGWFRQAPGKERESVAVIGWRDISTSYADSVKGRFTISRDNAKKTLYLQMNSLKPEDTAVYYCAARRIDAADFDSWGQGTQVTVSS

SEQ ID NO: 43291 - protein, 118 aa, synthetic construct
EVQLVESGGGLVQAGGSLRLSCAASGRTFTMGWFRQAPGKEREFVAAISLSPTLAYYAESVKGRFTISRDNAKNTVVLQMNSLKPEDTALYYCAADRKSVMSIRPDYWGQGTQVTVSS

SEQ ID NO: 43292 - protein, 252 aa, synthetic construct
QVKLEESGGGLVQAGRSLRLSCAASEHTFSSHVMGWFRQAPGKERESVAVIGWRDISTSYADSVKGRFTISRDNAKKTLYLQMNSLKPEDTAVYYCAARRIDAADFDSWGQGTQVTVSSGGGGSGGGGSGGGGSEVQLVESGGGLVQAGGSLRLSCAASGRTFTMGWFRQAPGKEREFVAAISLSPTLAYYAESVKGRFTISRDNAKNTVVLQMNSLKPEDTALYYCAADRKSVMSIRPDYWGQGTQVTVSS

SEQ ID NO: 43293 - protein, 116 aa, synthetic construct
EVQLVESGGGLVQAGGSLRLSCIATGKVFSIYDMGWYRQAPGKQRELVAEITSSGTTHYDDFVSGRFTISRDNAKNTVYLQMNTLKAEDTAVYYCRANHVFGGSYWGQGTQVTVSS

SEQ ID NO: 43294 - protein, 122 aa, synthetic construct
QVQLVESGGGLVQPGGSLRLSCEASGFTLDYYAIGWFRQAPGKEREGVICISRSDGSTYYADSVKGRFTISRDNAKKTVYLQMISLKPEDTAAYYCAAGADCSGYLRDYEFRGQGTQVTVSS

SEQ ID NO: 43295 - protein, 245 aa, synthetic construct
EVQLVESGGGLVQAGGSLRLSCIATGKVFSIYDMGWYRQAPGKQRELVAEITSSGTTHYDDFVSGRFTISRDNAKNTVYLQMNTLKAEDTAVYYCRANHVFGGSYWGQGTQVTVSSEVAALEKQVQLVESGGGLVQPGGSLRLSCEASGFTLDYYAIGWFRQAPGKEREGVICISRSDGSTYYADSVKGRFTISRDNAKKTVYLQMISLKPEDTAAYYCAAGADCSGYLRDYEFRGQGTQVTVSS

SEQ ID NO: 43296 - protein, 128 aa, synthetic construct
QVKLEESGGRLVQPRGSLRLSCAGSGRTFSTYGMAWFRQAPGKEREFVASKASMNYSGRTYYADSVKGRFTIARDNAKNMVFLQMNNLKPEDTAVYYCAAGTGCSTYGCFDAQIIDYWGKGTLVTVSS

SEQ ID NO: 43297 - protein, 119 aa, synthetic construct
QVKLEESGGGLVQPGESLRLSCSASGSIFKVFRVFAMSWYRQGPGKQRELVASISSGETTTYADSVKGRFTISRDNAKNTAYLQMDSLKPEDTAVYYCNADHTFTGDFWGQGTQVTVSS

SEQ ID NO: 43298 - protein, 254 aa, synthetic construct
QVKLEESGGRLVQPRGSLRLSCAGSGRTFSTYGMAWFRQAPGKEREFVASKASMNYSGRTYYADSVKGRFTIARDNAKNMVFLQMNNLKPEDTAVYYCAAGTGCSTYGCFDAQIIDYWGKGTLVTVSSEVAALEKQVKLEESGGGLVQPGESLRLSCSASGSIFKVFRVFAMSWYRQGPGKQRELVASISSGETTTYADSVKGRFTISRDNAKNTAYLQMDSLKPEDTAVYYCNADHTFTGDFWGQGTQVTVSS

SEQ ID NO: 43299 - protein, 117 aa, synthetic construct
QVKLEESGGELVQPGGPLRLSCAASGNIFSINRMGWYRQAPGKQRAFVASITVRGITNYADSVKGRFTISVDKSKNTIYLQMNALKPEDTAVYYCNAVSSNRDPDYWGQGTQVTVSS

SEQ ID NO: 43300 - protein, 129 aa, synthetic construct
PVQLVESGGGLVQAGDSLRLSCAASGRTFGIGTMGWFRQPPGKEREFVAAIRWSTGGTRYADSVKGRFTISRDNAKLTVDLQMDSLKPEDTAVYYCAADRLSLDLSGRYHYNPAVYDYWGQGTQVTVSS

SEQ ID NO: 43301 - protein, 261 aa, synthetic construct
QVKLEESGGELVQPGGPLRLSCAASGNIFSINRMGWYRQAPGKQRAFVASITVRGITNYADSVKGRFTISVDKSKNTIYLQMNALKPEDTAVYYCNAVSSNRDPDYWGQGTQVTVSSGGGGSGGGGSGGGGSPVQLVESGGGLVQAGDSLRLSCAASGRTFGIGTMGWFRQPPGKEREFVAAIRWSTGGTRYADSVKGRFTISRDNAKLTVDLQMDSLKPEDTAVYYCAADRLSLDLSGRYHYNPAVYDYWGQGTQVTVSS

SEQ ID NO: 43302 - protein, 119 aa, synthetic construct; identical to SEQ ID NO: 8805

SEQ ID NO: 43303 - protein, 120 aa, synthetic construct; identical to SEQ ID NO: 8806

SEQ ID NO: 43304 - protein, 118 aa, synthetic construct; identical to SEQ ID NO: 41572

SEQ ID NO: 43305 - protein, 118 aa, synthetic construct; identical to SEQ ID NO: 41573

SEQ ID NO: 43306 - protein, 118 aa, synthetic construct; identical to SEQ ID NO: 41574

SEQ ID NO: 43307 - protein, 118 aa, synthetic construct; identical to SEQ ID NO: 41575

SEQ ID NO: 43308 - protein, 125 aa, synthetic construct; identical to SEQ ID NO: 41576

SEQ ID NO: 43309 - protein, 125 aa, synthetic construct; identical to SEQ ID NO: 41577

SEQ ID NO: 43310 - protein, 125 aa, synthetic construct; identical to SEQ ID NO: 41578

SEQ ID NO: 43311 - protein, 125 aa, synthetic construct; identical to SEQ ID NO: 41579

SEQ ID NO: 43312 - protein, 125 aa, synthetic construct; identical to SEQ ID NO: 41578

SEQ ID NO: 43313 - protein, 118 aa, synthetic construct; identical to SEQ ID NO: 41581

SEQ ID NO: 43314 - protein, 128 aa, synthetic construct; identical to SEQ ID NO: 41582

SEQ ID NO: 43315 - protein, 127 aa, synthetic construct; identical to SEQ ID NO: 41583

SEQ ID NO: 43316 - protein, 127 aa, synthetic construct; identical to SEQ ID NO: 41584

SEQ ID NO: 43317 - protein, 125 aa, synthetic construct; identical to SEQ ID NO: 41585

SEQ ID NO: 43318 - protein, 121 aa, synthetic construct; identical to SEQ ID NO: 41586

SEQ ID NO: 43319 - protein, 5 aa, synthetic construct
GRTFS

SEQ ID NO: 43320 - protein, 5 aa, synthetic construct
GRTFS

SEQ ID NO: 43321 - protein, 5 aa, synthetic construct
GRTFT

SEQ ID NO: 43322 - protein, 5 aa, synthetic construct
GRTFT

SEQ ID NO: 43323 - protein, 8 aa, synthetic construct
GNINSRNC

SEQ ID NO: 43324 - protein, 8 aa, synthetic construct
GNINSRNC

SEQ ID NO: 43325 - protein, 8 aa, synthetic construct
GNINSRNC

SEQ ID NO: 43326 - protein, 8 aa, synthetic construct
GNISSRNC

SEQ ID NO: 43327 - protein, 8 aa, synthetic construct
GNINSRNC

SEQ ID NO: 43328 - protein, 5 aa, synthetic construct
GRTFT

SEQ ID NO: 43329 - protein, 8 aa, synthetic construct
GYTYSINC

SEQ ID NO: 43330 - protein, 8 aa, synthetic construct
GYTYGINC

SEQ ID NO: 43331 - protein, 8 aa, synthetic construct
GYTYSINC

SEQ ID NO: 43332 - protein, 8 aa, synthetic construct
GLSFSTYT

SEQ ID NO: 43333 - protein, 8 aa, synthetic construct
GRTFSNYN

SEQ ID NO: 43334 - protein, 8 aa, synthetic construct
ITYSGGSP

SEQ ID NO: 43335 - protein, 8 aa, synthetic construct
ITYSGGSP

SEQ ID NO: 43336 - protein, 8 aa, synthetic construct
ISLSPTLA

SEQ ID NO: 43337 - protein, 8 aa, synthetic construct
ISLSPTLA

SEQ ID NO: 43338 - protein, 8 aa, synthetic construct
IGQVTGRT

SEQ ID NO: 43339 - protein, 8 aa, synthetic construct
IGQVTGRT

SEQ ID NO: 43340 - protein, 8 aa, synthetic construct
IGQVTGRT

SEQ ID NO: 43341 - protein, 8 aa, synthetic construct
IGQVTGRS

SEQ ID NO: 43342 - protein, 8 aa, synthetic construct
IGQVTGRS

SEQ ID NO: 43343 - protein, 8 aa, synthetic construct
ISLSPTLA

SEQ ID NO: 43344 - protein, 8 aa, synthetic construct
ISTGGGTT

SEQ ID NO: 43345 - protein, 8 aa, synthetic construct
ISTGGGRT

SEQ ID NO: 43346 - protein, 8 aa, synthetic construct
ISTGGGRT

SEQ ID NO: 43347 - protein, 8 aa, synthetic construct
IPYTSQHM

SEQ ID NO: 43348 - protein, 8 aa, synthetic construct
VDWSGGSP

SEQ ID NO: 43349 - protein, 10 aa, synthetic construct
AANPTYGSDW

SEQ ID NO: 43350 - protein, 10 aa, synthetic construct
AANPTYGSDW

SEQ ID NO: 43351 - protein, 11 aa, synthetic construct
AADRKSVMSIR

SEQ ID NO: 43352 - protein, 11 aa, synthetic construct
AADRKSVMSIR

SEQ ID NO: 43353 - protein, 11 aa, synthetic construct
AAAPGCLLSAL

SEQ ID NO: 43354 - protein, 10 aa, synthetic construct
AAPGCLLSAL

SEQ ID NO: 43355 - protein, 10 aa, synthetic construct
AAPGCLLSAL

SEQ ID NO: 43356 - protein, 11 aa, synthetic construct
AAAPGCLLSAL

SEQ ID NO: 43357 - protein, 11 aa, synthetic construct
AAAPGCLLSAL

SEQ ID NO: 43358 - protein, 11 aa, synthetic construct
ADRKSVMSIRP

SEQ ID NO: 43359 - protein, 11 aa, synthetic construct
ARSTYSGYACV

SEQ ID NO: 43360 - protein, 11 aa, synthetic construct
AGKTTYPGYGC

SEQ ID NO: 43361 - protein, 9 aa, synthetic construct
AGKTTYPGY

SEQ ID NO: 43362 - protein, 9 aa, synthetic construct
ATDRRPGTS

SEQ ID NO: 43363 - protein, 9 aa, synthetic construct
AGRVQYGSS

SEQ ID NO: 43364 - protein, 124 aa, synthetic construct; identical to SEQ ID NO: 8815

SEQ ID NO: 43365 - protein, 126 aa, synthetic construct
RSDLGKKLLEAARAGQDDEVRILMANGADVNAKDEYGLTPLYLATAHGHLEIVEVLLKNGADVNAVDAIGFTPLHLAAFIGHLEIAEVLLKHGADVNAQDKFGKTAFDISIGNGNEDLAEILQKLN

SEQ ID NO: 43366 - protein, 58 aa, synthetic construct
VDNKFNKERYSAYYEIWQLPNLNVRQKAAFIGSLQDDPSQSANLLAEAKKLNDAQAPK

SEQ ID NO: 43367 - protein, 51 aa, synthetic construct
YAKEMRNAYWEIALLPNLTNQQKRAPIRKLYDDPSQSSELLSEAKKLNDSQ

SEQ ID NO: 43368 - protein, 51 aa, synthetic construct
YAKEMWIAWEEIRNLPNLNGWQMTAFIAKLLDDPSQSSELLSEAKKLNDSQ

SEQ ID NO: 43369 - protein, 89 aa, synthetic construct
LPAPKNLVVSRVTEDSARLSWTAPDAAFDSFAIGYWEWDDDGEAIVLTVPGSERSYDLTGLKPGTEYPVYIAGVKGGQWSFPLSAIFTT

SEQ ID NO: 43370 - protein, 91 aa, synthetic construct
LPAPKNLVVSRVTEDSARLSWAIDEQRDWFESFLIQYQESEKVGEAIVLTVPGSERSYDLTGLKPGTEYTVSIYGVYHVYRSNPLSAIFTT

SEQ ID NO: 43371 - protein, 89 aa, synthetic construct
LPAPKNLVVSRVTEDSARLSWTAPDAAFDSFPIGYWEWDDDGEAIVLTVPGSERSYDLTGLKPGTEYHVYIAGVKGGQWSFPLSAIFTT

SEQ ID NO: 43372 - protein, 94 aa, synthetic construct
LPAPKNLVVSEVTEDSARLSWDDPWAFYESFLIQYQESEKVGEAIVLTVPGSERSYDLTGLKPGTEYTVSIYGVHNVYKDTNMRGLPLSAIFTT

SEQ ID NO: 43373 - protein, 89 aa, synthetic construct
LPAPKNLVVSRVTEDSARLSWTAPDAAFDSFWIRYFEFLGSGEAIVLTVPGSERSYDLTGLKPGTEYVVNIMGVKGGKISPPLSAIFTT

SEQ ID NO: 43374 - protein, 193 aa, synthetic construct
LPAPKNLVVSEVTEDSARLSWDDPWAFYESFLIQYQESEKVGEAIVLTVPGSERSYDLTGLKPGTEYTVSIYGVHNVYKDTNMRGLPLSAIFTTAPAPAPAPAPLPAPKNLVVSRVTEDSARLSWTAPDAAFDSFWIRYFEFLGSGEAIVLTVPGSERSYDLTGLKPGTEYVVNIMGVKGGKISPPLSAIFTT

SEQ ID NO: 43375 - protein, 90 aa, synthetic construct; identical to SEQ ID NO: 8816

SEQ ID NO: 43376 - protein, 597 aa, synthetic construct
STIEEQAKTFLDKFNHEAEDLFYQSSLASWNYNTNITEENVQNMNNAGDKWSAFLKEQSTLAQMYPLQEIQNLTVKLQLQALQQNGSSVLSEDKSKRLNTILNTMSTIYSTGKVCNPDNPQECLLLEPGLNEIMANSLDYNERLWAWESWRSEVGKQLRPLYEEYVVLKNEMARANHYEDYGDYWRGDYEVNGVDGYDYSRGQLIEDVEHTFEEIKPLYEHLHAYVRAKLMNAYPSYISPIGCLPAHLLGDMWGRFWTNLYSLTVPFGQKPNIDVTDAMVDQAWDAQRIFKEAEKFFVSVGLPNMTQGFWENSMLTDPGNVQKAVCHPTAWDLGKGDFRILMCTKVTMDDFLTAHHEMGHIQYDMAYAAQPFLLRNGANEGFHEAVGEIMSLSAATPKHLKSIGLLSPDFQEDNETEINFLLKQALTIVGTLPFTYMLEKWRWMVFKGEIPKDQWMKKWWEMKREIVGVVEPVPHDETYCDPASLFHVSNDYSFIRYYTRTLYQFQFQEALCQAAKHEGPLHKCDISNSTEAGQKLFNMLRLGKSEPWTLALENVVGAKNMNVRPLLNYFEPLFTWLKDQNKNSFVGWSTDWSPYAD

SEQ ID NO: 43377 - protein, 269 aa, synthetic construct
EPLVVKVEEGDNAVLQCLKGTSDGPTQQLTWSRESPLKPFLKLSLGLPGLGIHMRPLAIWLFIFNVSQQMGGFYLCQPGPPSEKAWQPGWTVNVEGSGELFRWNVSDLGGLGCGLKNRSSEGPSSPSGKLMSPKLYVWAKDRPEIWEGEPPCLPPRDSLNQSLSQDLTMAPGSTLWLSCGVPPDSVSRGPLSWTHVHPKGPKSLLSLELKDDRPARDMWVMETGLLLPRATAQDAGKYYCHRGNLTMSFHLEITARPVLWHWLLRTGGW

SEQ ID NO: 43378 - protein, 490 aa, synthetic construct
MPSWALFMVTSCLLLAPQNLAQVSSQDVSLLASDSEPLKCFSRTFEDLTCFWDEEEAAPSGTYQLLYAYPREKPRACPLSSQSMPHFGTRYVCQFPDQEEVRLFFPLHLWVKNVFLNQTRTQRVLFVDSVGLPAPPSIIKAMGGSQPGELQISWEEPAPEISDFLRYELRYGPRDPKNSTGPTVIQLIATETCCPALQRPHSASALDQSPCAQPTMPWQDGPKQTSPSREASALTAEGGSCLISGLQPGNSYWLQLRSEPDGISLGGSWGSWSLPVTVDLPGDAVALGLQCFTLDLKNVTCQWQQQDHASSQGFFYHSRARCCPRDRYPIWENCEEEEKTNPGLQTPQFSRCHFKSRNDSIIHILVEVTTAPGTVHSYLGSPFWIHQAVRLPTPNLHWREISSGHLELEWQHPSSWAAQETCYQLRYTGEGHQDWKVLEPPLGARGGTLELRPRSRYRLQLRARLNGPTYQGPWSSWSDPTRVETATETA

SEQ ID NO: 43379 - protein, 167 aa, synthetic construct
MALPVTALLLPLALLLHAARPGWFLDSPDRPWNPPTFSPALLVVTEGDNATFTCSFSNTSESFVLNWYRMSPSNQTDKLAAFPEDRSQPGQDCRFRVTQLPNGRDFHMSVVRARRNDSGTYLCGAISLAPKAQIKESLRAELRVTERRAEVPTAHPSPSPRPAGQFQ

SEQ ID NO: 43380 - protein, 146 aa, synthetic construct
GWFLDSPDRPWNPPTFSPALLVVTEGDNATFTCSFSNTSESFVLNWYRMSPSNQTDKLAAFPEDRSQPGQDCRFRVTQLPNGRDFHMSVVRARRNDSGTYLCGAISLAPKAQIKESLRAELRVTERRAEVPTAHPSPSPRPAGQFQ

SEQ ID NO: 43381 - protein, 167 aa, synthetic construct
MQIPQAPWPVVWAVLQLGWRPGWFLDSPDRPWNPPTFSPALLVVTEGDNATFTCSFSNTSESFVLNWYRMSPSNQTDKLAAFPEDRSQPGQDCRFRVTQLPNGRDFHMSVVRARRNDSGTYLCGAISLAPKAQIKESLRAELRVTERRAEVPTAHPSPSPRPAGQFQ

SEQ ID NO: 43382 - protein, 162 aa, synthetic construct
MACLGFQRHKAQLNLATRTWPCTLLFFLLFIPVFCKAMHVAQPAVVLASSRGIASFVCEYASPGKATEVRVTVLRQADSQVTEVCAATYMMGNELTFLDDSICTGTSSGNQVNLTIQGLRAMDTGLYICKVELMYPPPYYLGIGNGTQIYVIDPEPCPDSDF

SEQ ID NO: 43383 - protein, 135 aa, synthetic construct
LFNQEVQIPLTESYCGPCPKNWICYKNNCYQFFDESKNWYESQASCMSQNASLLKVYSKEDQDLLKLVKSYHWMGLVHIPTNGSWQWEDGSILSPNLLTIIEMQKGDCALYASSFKGYIENCSTPNTYICMQRTV

SEQ ID NO: 43384 - protein, 208 aa, synthetic construct
MVRGVPFRHLLLVLQLALLPAATQGKKVVLGKKGDTVELTCTASQKKSIQFHWKNSNQIKILGNQGSFLTKGPSKLNDRADSRRSLWDQGNFPLIIKNLKIEDSDTYICEVEDQKEEVQLLVFGLTANSDTHLLQGQSLTLTLESPPGSSPSVQCRSPRGKNIQGGKTLSVSQLELQDSGTWTCTVLQNQKKVEFKIDIVVLAFQKAS

SEQ ID NO: 43385 - protein, 167 aa, synthetic construct
IYQELTQLKAAVERLCHPCPWEWTFFQGNCYFMSNSQRNWHDSITACKEVGAQLVVIKSAEEQNFLQLQSSRSNRFTWMGLSDLNQEGTWQWVDGSPLLPSFKQYWNRGEPNNVGEEDCAEFSGNGWNDDKCNLAKFWICKKSAASCSRDEEQFLSPAPATPNPPPA

SEQ ID NO: 43386 - protein, 192 aa, synthetic construct; identical to SEQ ID NO: 8817

SEQ ID NO: 43387 - protein, 192 aa, synthetic construct; identical to SEQ ID NO: 8817

SEQ ID NO: 43388 - protein, 274 aa, synthetic construct
ARKRTQPTFGFTVNWKFSESTTVFTGQCFIDRNGKEVLKTMWLLRSSVNDIGDDWKATRVGINIFTRLRTQKEGGSGGSARKCSLTGKWTNDLGSNMTIGAVNSRGEFTGTYITAVTATSNEIKESPLHGTQNTINKSGGSTTVFTGQCFIDRNGKEVLKTMWLLRSSVNDIGDDWKATRVGINIFTRLRTQKEGGSGGSARKCSLTGKWTNDLGSNMTIGAVNSRGEFTGTYITAVTATSNEIKESPLHGTQNTINKRTQPTFGFTVNWKFSE

SEQ ID NO: 43389 - protein, 566 aa, synthetic construct
EWVKFAKPCREGEDNSKRNPIAKITSDYQATQKITYRISGVGIDQPPFGIFVVDKNTGDINITAIVDREETPSFLITCRALNAQGLDVEKPLILTVKILDINDNPPVFSQQIFMGEIEENSASNSLVMILNATDADEPNHLNSKIAFKIVSQEPAGTPMFLLSRNTGEVRTLTNSLDREQASSYRLVVSGADKDGEGLSTQCECNIKVKDVNDNFPMFRDSQYSARIEENILSSELLRFQVTDLDEEYTDNWLAVYFFTSGNEGNWFEIQTDPRTNEGILKVVKALDYEQLQSVKLSIAVKNKAEFHQSVISRYRVQSTPVTIQVINVREGIAFRPASKTFTVQKGISSKKLVDYILGTYQAIDEDTNKAASNVKYVMGRNDGGYLMIDSKTAEIKFVKNMNRDSTFIVNKTITAEVLAIDEYTGKTSTGTVYVRVPDFNDNCPTAVLEKDAVCSSSPSVVVSARTLNNRYTGPYTFALEDQPVKLPAVWSITTLNATSALLRAQEQIPPGVYHISLVLTDSQNNRCEMPRSLTLEVCQCDNRGICGTSYPTTSPGTRYGRPHSGR

SEQ ID NO: 43390 - protein, 156 aa, synthetic construct
MALPVTALLLPLALLLHAARPLFNQEVQIPLTESYCGPCPKNWICYKNNCYQFFDESKNWYESQASCMSQNASLLKVYSKEDQDLLKLVKSYHWMGLVHIPTNGSWQWEDGSILSPNLLTIIEMQKGDCALYASSFKGYIENCSTPNTYICMQRTV

SEQ ID NO: 43391 - protein, 307 aa, synthetic construct; identical to SEQ ID NO: 8818

SEQ ID NO: 43392 - protein, 135 aa, synthetic construct; identical to SEQ ID NO: 43383

SEQ ID NO: 43393 - protein, 223 aa, synthetic construct
RVQPTESIVRFPNITNLCPFGEVFNATRFASVYAWNRKRISNCVADYSVLYNSASFSTFKCYGVSPTKLNDLCFTNVYADSFVIRGDEVRQIAPGQTGKIADYNYKLPDDFTGCVIAWNSNNLDSKVGGNYNYLYRLFRKSNLKPFERDISTEIYQAGSTPCNGVEGFNCYFPLQSYGFQPTNGVGYQPYRVVVLSFELLHAPATVCGPKKSTNLVKNKCVNF

SEQ ID NO: 43394 - protein, 187 aa, synthetic construct
MELTELLLVVMLLLTARLTLSSPAPPACDLRVLSKLLRDSHVLHSRLSQCPEVHPLPTPVLLPAVDFSLGEWKTQMEETKAQDILGAVTLLLEGVMAARGQLGPTCLSSLLGQLSGQVRLLLGALQSLLGTQLPPQGRTTAHKDPNAIFLSFQHLLRGKVRFLMLVGGSTLCVRRAPPTTAVPSRTS

SEQ ID NO: 43395 - protein, 187 aa, synthetic construct; identical to SEQ ID NO: 8819

SEQ ID NO: 43396 - protein, 92 aa, synthetic construct
APDVQDCPECTLQENPFFSQPGAPILQCMGCCFSRAYPTPLRSKKTMLVQKNVTSESTCCVAKSYNRVTVMGGFKVENHTACHCSTCYYHKS

SEQ ID NO: 43397 - protein, 165 aa, synthetic construct
MEMFQGLLLLLLLSMGGTWASREMLRPRCRPINATLAVEKEGCPVCITVNTTICAGYCPTMTRVLQGVLPALPQVVCNYRDVRFESIRLPGCPRGVNPVVSYAVALSCQCALCRRSTTDCGGPKDHPLTCDDPRFQASSSSKAPPPSLPSPSRLPGPSDTPILPQ

SEQ ID NO: 43398 - protein, 111 aa, synthetic construct
NSCELTNITIAIEKEECRFCISINTTWCAGYCYTRDLVYKDPARPKIQKTCTFKELVYETVRVPGCAHHADSLYTYPVATQCHCGKCDSDSTDCTVRGLGPSYCSFGEMKE

SEQ ID NO: 43399 - protein, 141 aa, synthetic construct
MEMLQGLLLLLLLSMGGAWASREPLRPWCHPINAILAVEKEGCPVCITVNTTICAGYCPTMMRVLQAVLPPLPQVVCTYRDVRFESIRLPGCPRGVDPVVSFPVALSCRCGPCRRSTSDCGGPKDHPLTCDHPQLSGLLFL

SEQ ID NO: 43400 - protein, 138 aa, synthetic construct
MTALFLMSMLFGLACGQAMSFCIPTEYTMHIERRECAYCLTINTTICAGYCMTRDINGKLFLPKYALSQDVCTYRDFIYRTVEIPGCPLHVAPYFSYPVALSCKCGKCNTDYSDCIHEAIKTNYCTKPQKSYLVGFSV

SEQ ID NO: 43401 - protein, 272 aa, synthetic construct
MEMFQGLLLLLLLSMGGTWASREMLRPRCRPINATLAVEKEGCPVCITVNTTICAGYCPTMTRVLQGVLPALPQVVCNYRDVRFESIRLPGCPRGVNPVVSYAVALSCQCALCRRSTTDCGGPKDHPLTCDDPRFQASSSSKAPPPSLPSPSRLPGPSDTPILPQGGGGSGGGGSGGGGSAPDVQDCPECTLQENPFFSQPGAPILQCMGCCFSRAYPTPLRSKKTMLVQKNVTSESTCCVAKSYNRVTVMGGFKVENHTACHCSTCYYHKS

SEQ ID NO: 43402 - protein, 239 aa, synthetic construct
MALPVTALLLPLALLLHAARPNSCELTNITIAIEKEECRFCISINTTWCAGYCYTRDLVYKDPARPKIQKTCTFKELVYETVRVPGCAHHADSLYTYPVATQCHCGKCDSDSTDCTVRGLGPSYCSFGEMKEGGGGSGGGGSGGGGSAPDVQDCPECTLQENPFFSQPGAPILQCMGCCFSRAYPTPLRSKKTMLVQKNVTSESTCCVAKSYNRVTVMGGFKVENHTACHCSTCYYHKS

SEQ ID NO: 43403 - protein, 248 aa, synthetic construct
MEMLQGLLLLLLLSMGGAWASREPLRPWCHPINAILAVEKEGCPVCITVNTTICAGYCPTMMRVLQAVLPPLPQVVCTYRDVRFESIRLPGCPRGVDPVVSFPVALSCRCGPCRRSTSDCGGPKDHPLTCDHPQLSGLLFLGGGGSGGGGSGGGGSAPDVQDCPECTLQENPFFSQPGAPILQCMGCCFSRAYPTPLRSKKTMLVQKNVTSESTCCVAKSYNRVTVMGGFKVENHTACHCSTCYYHKS

SEQ ID NO: 43404 - protein, 245 aa, synthetic construct
MTALFLMSMLFGLACGQAMSFCIPTEYTMHIERRECAYCLTINTTICAGYCMTRDINGKLFLPKYALSQDVCTYRDFIYRTVEIPGCPLHVAPYFSYPVALSCKCGKCNTDYSDCIHEAIKTNYCTKPQKSYLVGFSVGGGGSGGGGSGGGGSAPDVQDCPECTLQENPFFSQPGAPILQCMGCCFSRAYPTPLRSKKTMLVQKNVTSESTCCVAKSYNRVTVMGGFKVENHTACHCSTCYYHKS

SEQ ID NO: 43405 - protein, 5 aa, synthetic construct
GGGGG

SEQ ID NO: 43406 - protein, 53 aa, synthetic construct
MDPDLEIRAAFLRQRNTALRTEVAELEQEVQRLENEVSQYETRYGPLGGGKTR

SEQ ID NO: 43407 - protein, 53 aa, synthetic construct
TRMDPDLEIEAAFLERENTALETRVAELRQRVQRLRNRVSQYRTRYGPLGGGK

SEQ ID NO: 43408 - protein, 28 aa, synthetic construct
EVAALEKEVAALEKEVAALEKEVAALEK

SEQ ID NO: 43409 - protein, 28 aa, synthetic construct
KVAALKEKVAALKEKVAALKEKVAALKE

SEQ ID NO: 43410 - protein, 13 aa, synthetic construct
AHIVMVDAYKPTK

SEQ ID NO: 43411 - protein, 488 aa, synthetic construct
MALPVTALLLPLALLLHAARPSYVLTQPPSVSVAPGQTARITCGGNNIGGKSVHWYQQPPGQAPVVVVYDDSDRPSGIPERFSGSNSGNTATLTISRVEAGDEAVYYCQVWDSSSDHVVFGGGTKLTVLGGGGSGGGGSGGGGSQLQLQESGPGLVKPSETLSLTCTVSGGSISSSSYFWGWIRQPPGKGLEWIGSIYYSGITYYNPSLKSRVTISVDTSKNQFSLKLSSVTAADTAVYYCARHDGAVAGLFDYWGQGTLVTVSSATRKIEVMYPPPYLDNEKSNGTIIHVKGKHLCPSPLFPGPSKPFWVLVVVGGVLACYSLLVTVAFIIFWVRSKRSRLLHSDYMNMTPRRPGPTRKHYQPYAPPRDFAAYRSRVKFSRSADAPAYQQGQNQLYNELNLGRREEYDVLDKRRGRDPEMGGKPRRKNPQEGLYNELQKDKMAEAYSEIGMKGERRRGKGHDGLYQGLSTATKDTYDALHMQALPPR

SEQ ID NO: 43412 - protein, 494 aa, synthetic construct
MALPVTALLLPLALLLHAARPSYVLTQPPSVSVAPGQTARITCGGNNIGGKSVHWYQQPPGQAPVVVVYDDSDRPSGIPERFSGSNSGNTATLTISRVEAGDEAVYYCQVWDSSSDHVVFGGGTKLTVLGGGGSGGGGSGGGGSQLQLQESGPGLVKPSETLSLTCTVSGGSISSSSYFWGWIRQPPGKGLEWIGSIYYSGITYYNPSLKSRVTISVDTSKNQFSLKLSSVTAADTAVYYCARHDGAVAGLFDYWGQGTLVTVSSATRAKPTTTPAPRPPTPAPTIASQPLSLRPEACRPAAGGAVHTRGLDFACDIYIWAPLAGTCGVLLLSLVITLYCKRGRKKLLYIFKQPFMRPVQTTQEEDGCSCRFPEEEEGGCELRVKFSRSADAPAYQQGQNQLYNELNLGRREEYDVLDKRRGRDPEMGGKPRRKNPQEGLYNELQKDKMAEAYSEIGMKGERRRGKGHDGLYQGLSTATKDTYDALHMQALPPR

SEQ ID NO: 43413 - protein, 494 aa, synthetic construct
MALPVTALLLPLALLLHAARPQLQLQESGPGLVKPSETLSLTCTVSGGSISSSSYFWGWIRQPPGKGLEWIGSIYYSGITYYNPSLKSRVTISVDTSKNQFSLKLSSVTAADTAVYYCARHDGAVAGLFDYWGQGTLVTVSSAGGGGSGGGGSGGGGSSYVLTQPPSVSVAPGQTARITCGGNNIGGKSVHWYQQPPGQAPVVVVYDDSDRPSGIPERFSGSNSGNTATLTISRVEAGDEAVYYCQVWDSSSDHVVFGGGTKLTVLTRAKPTTTPAPRPPTPAPTIASQPLSLRPEACRPAAGGAVHTRGLDFACDIYIWAPLAGTCGVLLLSLVITLYCKRGRKKLLYIFKQPFMRPVQTTQEEDGCSCRFPEEEEGGCELRVKFSRSADAPAYQQGQNQLYNELNLGRREEYDVLDKRRGRDPEMGGKPRRKNPQEGLYNELQKDKMAEAYSEIGMKGERRRGKGHDGLYQGLSTATKDTYDALHMQALPPR

SEQ ID NO: 43414 - protein, 627 aa, synthetic construct
MALPVTALLLPLALLLHAARPSYVLTQPPSVSVAPGQTARITCGGNNIGGKSVHWYQQPPGQAPVVVVYDDSDRPSGIPERFSGSNSGNTATLTISRVEAGDEAVYYCQVWDSSSDHVVFGGGTKLTVLLEIQNPDPAVYQLRDSKSSDKSVCLFTDFDSQTNVSQSKDSDVYITDKCVLDMRSMDFKSNSAVAWSNKSDFACANAFNNSIIPEDTFFPSSDVPCDVKLVEKSFETDTNLNFQNLSVIGFRILLLKVAGFNLLMTLRLWSSRAKRSGSGVKQTLNFDLLKLAGDVESNPGPTSMDWIWRILFLVGAATGAHSFEQLQLQESGPGLVKPSETLSLTCTVSGGSISSSSYFWGWIRQPPGKGLEWIGSIYYSGITYYNPSLKSRVTISVDTSKNQFSLKLSSVTAADTAVYYCARHDGAVAGLFDYWGQGTLVTVSSATREDLKNVFPPEVAVFEPSKAEIAHTQKATLVCLATGFYPDHVELSWWVNGKEVHSGVCTDPQPLKEQPALNDSRYCLSSRLRVSATFWQNPRNHFRCQVQFYGLSENDEWTQDRAKPVTQIVSAEAWGRADCGITSASYHQGVLSATILYEILLGKATLYAVLVSALVLMAMVKRKDSRG

SEQ ID NO: 43415 - protein, 623 aa, synthetic construct
MALPVTALLLPLALLLHAARPSYVLTQPPSVSVAPGQTARITCGGNNIGGKSVHWYQQPPGQAPVVVVYDDSDRPSGIPERFSGSNSGNTATLTISRVEAGDEAVYYCQVWDSSSDHVVFGGGTKLTVLLEDLKNVFPPEVAVFEPSKAEIAHTQKATLVCLATGFYPDHVELSWWVNGKEVHSGVCTDPQPLKEQPALNDSRYCLSSRLRVSATFWQNPRNHFRCQVQFYGLSENDEWTQDRAKPVTQIVSAEAWGRADCGITSASYHQGVLSATILYEILLGKATLYAVLVSALVLMAMVKRKDSRGRAKRSGSGATNFSLLKQAGDVEENPGPTSMDWIWRILFLVGAATGAHSFEQLQLQESGPGLVKPSETLSLTCTVSGGSISSSSYFWGWIRQPPGKGLEWIGSIYYSGITYYNPSLKSRVTISVDTSKNQFSLKLSSVTAADTAVYYCARHDGAVAGLFDYWGQGTLVTVSSATRIQNPDPAVYQLRDSKSSDKSVCLFTDFDSQTNVSQSKDSDVYITDKCVLDMRSMDFKSNSAVAWSNKSDFACANAFNNSIIPEDTFFPSSDVPCDVKLVEKSFETDTNLNFQNLSVIGFRILLLKVAGFNLLMTLRLWSS

SEQ ID NO: 43416 - protein, 623 aa, synthetic construct
MALPVTALLLPLALLLHAARPSYVLTQPPSVSVAPGQTARITCGGNNIGGKSVHWYQQPPGQAPVVVVYDDSDRPSGIPERFSGSNSGNTATLTISRVEAGDEAVYYCQVWDSSSDHVVFGGGTKLTVLLEDLKNVFPPEVAVFEPSEAEISHTQKATLVCLATGFYPDHVELSWWVNGKEVHSGVCTDPQPLKEQPALNDSRYCLSSRLRVSATFWQNPRNHFRCQVQFYGLSENDEWTQDRAKPVTQIVSAEAWGRADCGFTSESYQQGVLSATILYEILLGKATLYAVLVSALVLMAMVKRKDSRGRAKRSGSGATNFSLLKQAGDVEENPGPTSMDWIWRILFLVGAATGAHSFEQLQLQESGPGLVKPSETLSLTCTVSGGSISSSSYFWGWIRQPPGKGLEWIGSIYYSGITYYNPSLKSRVTISVDTSKNQFSLKLSSVTAADTAVYYCARHDGAVAGLFDYWGQGTLVTVSSATRIQNPDPAVYQLRDSKSSDKSVCLFTDFDSQTNVSQSKDSDVYITDKCVLDMRSMDFKSNSAVAWSNKSDFACANAFNNSIIPEDTFFPSPESSCDVKLVEKSFETDTNLNFQNLSVIGFRILLLKVAGFNLLMTLRLWSS

SEQ ID NO: 43417 - protein, 627 aa, synthetic construct
MALPVTALLLPLALLLHAARPSYVLTQPPSVSVAPGQTARITCGGNNIGGKSVHWYQQPPGQAPVVVVYDDSDRPSGIPERFSGSNSGNTATLTISRVEAGDEAVYYCQVWDSSSDHVVFGGGTKLTVLLEIQNPDPAVYQLRDSKSSDKSVCLFTDFDSQTNVSQSKDSDVYITDKCVLDMRSMDFKSNSAVAWSNKSDFACANAFNNSIIPEDTFFPSPESSCDVKLVEKSFETDTNLNFQNLSVIGFRILLLKVAGFNLLMTLRLWSSRAKRSGSGVKQTLNFDLLKLAGDVESNPGPTSMDWIWRILFLVGAATGAHSFEQLQLQESGPGLVKPSETLSLTCTVSGGSISSSSYFWGWIRQPPGKGLEWIGSIYYSGITYYNPSLKSRVTISVDTSKNQFSLKLSSVTAADTAVYYCARHDGAVAGLFDYWGQGTLVTVSSATREDLKNVFPPEVAVFEPSEAEISHTQKATLVCLATGFYPDHVELSWWVNGKEVHSGVCTDPQPLKEQPALNDSRYCLSSRLRVSATFWQNPRNHFRCQVQFYGLSENDEWTQDRAKPVTQIVSAEAWGRADCGFTSESYQQGVLSATILYEILLGKATLYAVLVSALVLMAMVKRKDSRG

SEQ ID NO: 43418 - protein, 639 aa, synthetic construct
MALPVTALLLPLALLLHAARPLEEDLKNVFPPEVAVFEPSKAEIAHTQKATLVCLATGFYPDHVELSWWVNGKEVHSGVCTDPQPLKEQPALNDSRYCLSSRLRVSATFWQNPRNHFRCQVQFYGLSENDEWTQDRAKPVTQIVSAEAWGRADCGITSASYHQGVLSATILYEILLGKATLYAVLVSALVLMAMVKRKDSRGRAKRSGSGATNFSLLKQAGDVEENPGPTSMALPVTALLLPLALLLHAARPSYVLTQPPSVSVAPGQTARITCGGNNIGGKSVHWYQQPPGQAPVVVVYDDSDRPSGIPERFSGSNSGNTATLTISRVEAGDEAVYYCQVWDSSSDHVVFGGGTKLTVLGGGGSGGGGSGGGGSQLQLQESGPGLVKPSETLSLTCTVSGGSISSSSYFWGWIRQPPGKGLEWIGSIYYSGITYYNPSLKSRVTISVDTSKNQFSLKLSSVTAADTAVYYCARHDGAVAGLFDYWGQGTLVTVSSATRIQNPDPAVYQLRDSKSSDKSVCLFTDFDSQTNVSQSKDSDVYITDKCVLDMRSMDFKSNSAVAWSNKSDFACANAFNNSIIPEDTFFPSSDVPCDVKLVEKSFETDTNLNFQNLSVIGFRILLLKVAGFNLLMTLRLWSS

SEQ ID NO: 43419 - protein, 646 aa, synthetic construct
MALPVTALLLPLALLLHAARPLEGSGDRPDPAVYQLRDSKSSDKSVCLFTDFDSQTNVSQSKDSDVYITDKCVLDMRSMDFKSNSAVAWSNKSDFACANAFNNSIIPEDTFFPSPESSCDVKLVEKSFETDTNLNFQNLSVIGFRILLLKVAGFNLLMTLRLWSSSSRAKRSGSGVKQTLNFDLLKLAGDVESNPGPTSMALPVTALLLPLALLLHAARPSYVLTQPPSVSVAPGQTARITCGGNNIGGKSVHWYQQPPGQAPVVVVYDDSDRPSGIPERFSGSNSGNTATLTISRVEAGDEAVYYCQVWDSSSDHVVFGGGTKLTVLGGGGSGGGGSGGGGSQLQLQESGPGLVKPSETLSLTCTVSGGSISSSSYFWGWIRQPPGKGLEWIGSIYYSGITYYNPSLKSRVTISVDTSKNQFSLKLSSVTAADTAVYYCARHDGAVAGLFDYWGQGTLVTVSSATREDLKNVFPPEVAVFEPSEAEISHTQKATLVCLATGFYPDHVELSWWVNGKEVHSGVCTDPQPLKEQPALNDSRYCLSSRLRVSATFWQNPRNHFRCQVQFYGLSENDEWTQDRAKPVTQIVSAEAWGRADCGFTSESYQQGVLSATILYEILLGKATLYAVLVSALVLMAMVKRKDSRG

SEQ ID NO: 43420 - protein, 623 aa, synthetic construct
MALPVTALLLPLALLLHAARPSYVLTQPPSVSVAPGQTARITCGGNNIGGKSVHWYQQPPGQAPVVVVYDDSDRPSGIPERFSGSNSGNTATLTISRVEAGDEAVYYCQVWDSSSDHVVFGGGTKLTVLLEDLKNVFPPEVAVFEPSEAEISHTQKATLVCLATGFYPDHVELSWWVNGKEVHSGVSTDPQPLKEQPALNDSRYCLSSRLRVSATFWQNPRNHFRCQVQFYGLSENDEWTQDRAKPVTQIVSAEAWGRADCGFTSESYQQGVLSATILYEILLGKATLYAVLVSALVLMAMVKRKDSRGRAKRSGSGATNFSLLKQAGDVEENPGPTSMDWIWRILFLVGAATGAHSFEQLQLQESGPGLVKPSETLSLTCTVSGGSISSSSYFWGWIRQPPGKGLEWIGSIYYSGITYYNPSLKSRVTISVDTSKNQFSLKLSSVTAADTAVYYCARHDGAVAGLFDYWGQGTLVTVSSATRIQNPDPAVYQLRDSKSSDKSVCLFTDFDSQTNVSQSKDSDVYITDKTVLDMRSMDFKSNSAVAWSNKSDFACANAFNNSIIPEDTFFPSPESSCDVKLVEKSFETDTNLNFQNLSVIGFRILLLKVAGFNLLMTLRLWSS

SEQ ID NO: 43421 - protein, 631 aa, synthetic construct
MALPVTALLLPLALLLHAARPSYVLTQPPSVSVAPGQTARITCGGNNIGGKSVHWYQQPPGQAPVVVVYDDSDRPSGIPERFSGSNSGNTATLTISRVEAGDEAVYYCQVWDSSSDHVVFGGGTKLTVLLEDKQLDADVSPKPTIFLPSIAETKLQKAGTYLCLLEKFFPDVIKIHWQEKKSNTILGSQEGNTMKTNDTYMKFSWLTVPEKSLDKEHRCIVRHENNKNGVDQEIIFPPIKTDVITMDPKDNCSKDANDTLLLQLTNTSAYYMYLLLLLKSVVYFAIITCCLLRRTAFCCNGEKSRAKRSGSGATNFSLLKQAGDVEENPGPTSMDWIWRILFLVGAATGAHSFEQLQLQESGPGLVKPSETLSLTCTVSGGSISSSSYFWGWIRQPPGKGLEWIGSIYYSGITYYNPSLKSRVTISVDTSKNQFSLKLSSVTAADTAVYYCARHDGAVAGLFDYWGQGTLVTVSSATRSQPHTKPSVFVMKNGTNVACLVKEFYPKDIRINLVSSKKITEFDPAIVISPSGKYNAVKLGKYEDSNSVTCSVQHDNKTVHSTDFEVKTDSTDHVKPKETENTKQPSKSCHKPKAIVHTEKVNMMSLTVLGLRMLFAKTVAVNFLLTAKLFFL

SEQ ID NO: 43422 - protein, 631 aa, synthetic construct
MALPVTALLLPLALLLHAARPSYVLTQPPSVSVAPGQTARITCGGNNIGGKSVHWYQQPPGQAPVVVVYDDSDRPSGIPERFSGSNSGNTATLTISRVEAGDEAVYYCQVWDSSSDHVVFGGGTKLTVLLESQPHTKPSVFVMKNGTNVACLVKEFYPKDIRINLVSSKKITEFDPAIVISPSGKYNAVKLGKYEDSNSVTCSVQHDNKTVHSTDFEVKTDSTDHVKPKETENTKQPSKSCHKPKAIVHTEKVNMMSLTVLGLRMLFAKTVAVNFLLTAKLFFLRAKRSGSGATNFSLLKQAGDVEENPGPTSMDWIWRILFLVGAATGAHSFEQLQLQESGPGLVKPSETLSLTCTVSGGSISSSSYFWGWIRQPPGKGLEWIGSIYYSGITYYNPSLKSRVTISVDTSKNQFSLKLSSVTAADTAVYYCARHDGAVAGLFDYWGQGTLVTVSSATRDKQLDADVSPKPTIFLPSIAETKLQKAGTYLCLLEKFFPDVIKIHWQEKKSNTILGSQEGNTMKTNDTYMKFSWLTVPEKSLDKEHRCIVRHENNKNGVDQEIIFPPIKTDVITMDPKDNCSKDANDTLLLQLTNTSAYYMYLLLLLKSVVYFAIITCCLLRRTAFCCNGEKS

SEQ ID NO: 43423 - protein, 646 aa, synthetic construct
MALPVTALLLPLALLLHAARPLEDKQLDADVSPKPTIFLPSIAETKLQKAGTYLCLLEKFFPDVIKIHWQEKKSNTILGSQEGNTMKTNDTYMKFSWLTVPEKSLDKEHRCIVRHENNKNGVDQEIIFPPIKTDVITMDPKDNCSKDANDTLLLQLTNTSAYYMYLLLLLKSVVYFAIITCCLLRRTAFCCNGEKSRAKRSGSGATNFSLLKQAGDVEENPGPTSMALPVTALLLPLALLLHAARPSYVLTQPPSVSVAPGQTARITCGGNNIGGKSVHWYQQPPGQAPVVVVYDDSDRPSGIPERFSGSNSGNTATLTISRVEAGDEAVYYCQVWDSSSDHVVFGGGTKLTVLGGGGSGGGGSGGGGSQLQLQESGPGLVKPSETLSLTCTVSGGSISSSSYFWGWIRQPPGKGLEWIGSIYYSGITYYNPSLKSRVTISVDTSKNQFSLKLSSVTAADTAVYYCARHDGAVAGLFDYWGQGTLVTVSSATRSQPHTKPSVFVMKNGTNVACLVKEFYPKDIRINLVSSKKITEFDPAIVISPSGKYNAVKLGKYEDSNSVTCSVQHDNKTVHSTDFEVKTDSTDHVKPKETENTKQPSKSCHKPKAIVHTEKVNMMSLTVLGLRMLFAKTVAVNFLLTAKLFFL

SEQ ID NO: 43424 - protein, 800 aa, synthetic construct
MALPVTALLLPLALLLHAARPSYVLTQPPSVSVAPGQTARITCGGNNIGGKSVHWYQQPPGQAPVVVVYDDSDRPSGIPERFSGSNSGNTATLTISRVEAGDEAVYYCQVWDSSSDHVVFGGGTKLTVLGQPKANPTVTLFPPSSEELQANKATLVCLISDFYPGAVTVAWKADGSPVKAGVETTKPSKQSNNKYAASSYLSLTPEQWKSHRSYSCQVTHEGSTVEKTVAPTECSGSQSFGLLDPKLCYLLDGILFIYGVILTALFLRVKFSRSADAPAYQQGQNQLYNELNLGRREEYDVLDKRRGRDPEMGGKPQRRKNPQEGLYNELQKDKMAEAYSEIGMKGERRRGKGHDGLYQGLSTATKDTYDALHMQALPPRRAKRSGSGATNFSLLKQAGDVEENPGPTSMDWIWRILFLVGAATGAHSFEQLQLQESGPGLVKPSETLSLTCTVSGGSISSSSYFWGWIRQPPGKGLEWIGSIYYSGITYYNPSLKSRVTISVDTSKNQFSLKLSSVTAADTAVYYCARHDGAVAGLFDYWGQGTLVTVSSAASTKGPSVFPLAPSSKSTSGGTAALGCLVKDYFPEPVTVSWNSGALTSGVHTFPAVLQSSGLYSLSSVVTVPSSSLGTQTYICNVNHKPSNTKVDKRVEPKSCGTQSFGLLDPKLCYLLDGILFIYGVILTALFLRVKFSRSADAPAYQQGQNQLYNELNLGRREEYDVLDKRRGRDPEMGGKPQRRKNPQEGLYNELQKDKMAEAYSEIGMKGERRRGKGHDGLYQGLSTATKDTYDALHMQALPPR

SEQ ID NO: 43425 - protein, 819 aa, synthetic construct
MALPVTALLLPLALLLHAARPSYVLTQPPSVSVAPGQTARITCGGNNIGGKSVHWYQQPPGQAPVVVVYDDSDRPSGIPERFSGSNSGNTATLTISRVEAGDEAVYYCQVWDSSSDHVVFGGGTKLTVLLEDLKNVFPPEVAVFEPSEAEISHTQKATLVCLATGFYPDHVELSWWVNGKEVHSGVSTDPQPLKEQPALNDSRYCLSSRLRVSATFWQNPRNHFRCQVQFYGLSENDEWTQDRAKPVTQIVSAEAWGRADCGSQSFGLLDPKLCYLLDGILFIYGVILTALFLRVKFSRSADAPAYQQGQNQLYNELNLGRREEYDVLDKRRGRDPEMGGKPQRRKNPQEGLYNELQKDKMAEAYSEIGMKGERRRGKGHDGLYQGLSTATKDTYDALHMQALPPRRAKRSGSGATNFSLLKQAGDVEENPGPTSMDWIWRILFLVGAATGAHSFEQLQLQESGPGLVKPSETLSLTCTVSGGSISSSSYFWGWIRQPPGKGLEWIGSIYYSGITYYNPSLKSRVTISVDTSKNQFSLKLSSVTAADTAVYYCARHDGAVAGLFDYWGQGTLVTVSSATRIQNPDPAVYQLRDSKSSDKSVCLFTDFDSQTNVSQSKDSDVYITDKTVLDMRSMDFKSNSAVAWSNKSDFACANAFNNSIIPEDTFFPSPESSCGTQSFGLLDPKLCYLLDGILFIYGVILTALFLRVKFSRSADAPAYQQGQNQLYNELNLGRREEYDVLDKRRGRDPEMGGKPQRRKNPQEGLYNELQKDKMAEAYSEIGMKGERRRGKGHDGLYQGLSTATKDTYDALHMQALPPR

SEQ ID NO: 43426 - protein, 861 aa, synthetic construct
MALPVTALLLPLALLLHAARPSYVLTQPPSVSVAPGQTARITCGGNNIGGKSVHWYQQPPGQAPVVVVYDDSDRPSGIPERFSGSNSGNTATLTISRVEAGDEAVYYCQVWDSSSDHVVFGGGTKLTVLLEEDLKNVFPPEVAVFEPSEAEISHTQKATLVCLATGFYPDHVELSWWVNGKEVHSGVSTDPQPLKEQPALNDSRYCLSSRLRVSATFWQNPRNHFRCQVQFYGLSENDEWTQDRAKPVTQIVSAEAWGRADCGSQSFGLLDPKLCYLLDGILFIYGVILTALFLRVKFSRSADAPAYQQGQNQLYNELNLGRREEYDVLDKRRGRDPEMGGKPQRRKNPQEGLYNELQKDKMAEAYSEIGMKGERRRGKGHDGLYQGLSTATKDTYDALHMQALPPRRAKRSGSGATNFSLLKQAGDVEENPGPTSMDWIWRILFLVGAATGAHSFEQLQLQESGPGLVKPSETLSLTCTVSGGSISSSSYFWGWIRQPPGKGLEWIGSIYYSGITYYNPSLKSRVTISVDTSKNQFSLKLSSVTAADTAVYYCARHDGAVAGLFDYWGQGTLVTVSSATRIQNPDPAVYQLRDSKSSDKSVCLFTDFDSQTNVSQSKDSDVYITDKTVLDMRSMDFKSNSAVAWSNKSDFACANAFNNSIIPEDTFFPSPESSCGTQSFGLLDPKLCYLLDGILFIYGVILTALFLRSKRSRLLHSDYMNMTPRRPGPTRKHYQPYAPPRDFAAYRSRVKFSRSADAPAYQQGQNQLYNELNLGRREEYDVLDKRRGRDPEMGGKPQRRKNPQEGLYNELQKDKMAEAYSEIGMKGERRRGKGHDGLYQGLSTATKDTYDALHMQALPPR

SEQ ID NO: 43427 - protein, 904 aa, synthetic construct
MALPVTALLLPLALLLHAARPSYVLTQPPSVSVAPGQTARITCGGNNIGGKSVHWYQQPPGQAPVVVVYDDSDRPSGIPERFSGSNSGNTATLTISRVEAGDEAVYYCQVWDSSSDHVVFGGGTKLTVLLEEDLKNVFPPEVAVFEPSEAEISHTQKATLVCLATGFYPDHVELSWWVNGKEVHSGVSTDPQPLKEQPALNDSRYCLSSRLRVSATFWQNPRNHFRCQVQFYGLSENDEWTQDRAKPVTQIVSAEAWGRADCGSQSFGLLDPKLCYLLDGILFIYGVILTALFLKRGRKKLLYIFKQPFMRPVQTTQEEDGCSCRFPEEEEGGCELRVKFSRSADAPAYQQGQNQLYNELNLGRREEYDVLDKRRGRDPEMGGKPQRRKNPQEGLYNELQKDKMAEAYSEIGMKGERRRGKGHDGLYQGLSTATKDTYDALHMQALPPRRAKRSGSGATNFSLLKQAGDVEENPGPTSMDWIWRILFLVGAATGAHSFEQLQLQESGPGLVKPSETLSLTCTVSGGSISSSSYFWGWIRQPPGKGLEWIGSIYYSGITYYNPSLKSRVTISVDTSKNQFSLKLSSVTAADTAVYYCARHDGAVAGLFDYWGQGTLVTVSSATRIQNPDPAVYQLRDSKSSDKSVCLFTDFDSQTNVSQSKDSDVYITDKTVLDMRSMDFKSNSAVAWSNKSDFACANAFNNSIIPEDTFFPSPESSCGTQSFGLLDPKLCYLLDGILFIYGVILTALFLKRGRKKLLYIFKQPFMRPVQTTQEEDGCSCRFPEEEEGGCELRVKFSRSADAPAYQQGQNQLYNELNLGRREEYDVLDKRRGRDPEMGGKPQRRKNPQEGLYNELQKDKMAEAYSEIGMKGERRRGKGHDGLYQGLSTATKDTYDALHMQALPPR

SEQ ID NO: 43428 - protein, 591 aa, synthetic construct
MALPVTALLLPLALLLHAARPSYVLTQPPSVSVAPGQTARITCGGNNIGGKSVHWYQQPPGQAPVVVVYDDSDRPSGIPERFSGSNSGNTATLTISRVEAGDEAVYYCQVWDSSSDHVVFGGGTKLTVLLEQSFGLLDPKLCYLLDGILFIYGVILTALFLRVKFSRSADAPAYQQGQNQLYNELNLGRREEYDVLDKRRGRDPEMGGKPQRRKNPQEGLYNELQKDKMAEAYSEIGMKGERRRGKGHDGLYQGLSTATKDTYDALHMQALPPRRAKRSGSGATNFSLLKQAGDVEENPGPTSMDWIWRILFLVGAATGAHSFEQLQLQESGPGLVKPSETLSLTCTVSGGSISSSSYFWGWIRQPPGKGLEWIGSIYYSGITYYNPSLKSRVTISVDTSKNQFSLKLSSVTAADTAVYYCARHDGAVAGLFDYWGQGTLVTVSSATRQSFGLLDPKLCYLLDGILFIYGVILTALFLRVKFSRSADAPAYQQGQNQLYNELNLGRREEYDVLDKRRGRDPEMGGKPQRRKNPQEGLYNELQKDKMAEAYSEIGMKGERRRGKGHDGLYQGLSTATKDTYDALHMQALPPR

SEQ ID NO: 43429 - protein, 649 aa, synthetic construct
MALPVTALLLPLALLLHAARPSYVLTQPPSVSVAPGQTARITCGGNNIGGKSVHWYQQPPGQAPVVVVYDDSDRPSGIPERFSGSNSGNTATLTISRVEAGDEAVYYCQVWDSSSDHVVFGGGTKLTVLLEGQPKANPTVTLFPPSSEELQANKATLVCLISDFYPGAVTVAWKADGSPVKAGVETTKPSKQSNNKYAASSYLSLTPEQWKSHRSYSCQVTHEGSTVEKTVAPTECSPIKTDVITMDPKDNCSKDANDTLLLQLTNTSAYYMYLLLLLKSVVYFAIITCCLLRRTAFCCNGEKSRAKRSGSGATNFSLLKQAGDVEENPGPTSMDWIWRILFLVGAATGAHSFEQLQLQESGPGLVKPSETLSLTCTVSGGSISSSSYFWGWIRQPPGKGLEWIGSIYYSGITYYNPSLKSRVTISVDTSKNQFSLKLSSVTAADTAVYYCARHDGAVAGLFDYWGQGTLVTVSSATRASTKGPSVFPLAPSSKSTSGGTAALGCLVKDYFPEPVTVSWNSGALTSGVHTFPAVLQSSGLYSLSSVVTVPSSSLGTQTYICNVNHKPSNTKVDKRVEPKSCEVKTDSTDHVKPKETENTKQPSKSCHKPKAIVHTEKVNMMSLTVLGLRMLFAKTVAVNFLLTAKLFFL

SEQ ID NO: 43430 - protein, 627 aa, synthetic construct
MALPVTALLLPLALLLHAARPSYVLTQPPSVSVAPGQTARITCGGNNIGGKSVHWYQQPPGQAPVVVVYDDSDRPSGIPERFSGSNSGNTATLTISRVEAGDEAVYYCQVWDSSSDHVVFGGGTKLTVLLEGQPKANPTVTLFPPSSEELQANKATLVCLISDFYPGAVTVAWKADGSPVKAGVETTKPSKQSNNKYAASSYLSLTPEQWKSHRSYSCQVTHEGSTVEKTVAPTECSGRADCGITSASYHQGVLSATILYEILLGKATLYAVLVSALVLMAMVKRKDSRGRAKRSGSGATNFSLLKQAGDVEENPGPTSMDWIWRILFLVGAATGAHSFEQLQLQESGPGLVKPSETLSLTCTVSGGSISSSSYFWGWIRQPPGKGLEWIGSIYYSGITYYNPSLKSRVTISVDTSKNQFSLKLSSVTAADTAVYYCARHDGAVAGLFDYWGQGTLVTVSSATRASTKGPSVFPLAPSSKSTSGGTAALGCLVKDYFPEPVTVSWNSGALTSGVHTFPAVLQSSGLYSLSSVVTVPSSSLGTQTYICNVNHKPSNTKVDKRVEPKSCIPEDTFFPSSDVPCDVKLVEKSFETDTNLNFQNLSVIGFRILLLKVAGFNLLMTLRLWSS

SEQ ID NO: 43431 - protein, 627 aa, synthetic construct
MALPVTALLLPLALLLHAARPSYVLTQPPSVSVAPGQTARITCGGNNIGGKSVHWYQQPPGQAPVVVVYDDSDRPSGIPERFSGSNSGNTATLTISRVEAGDEAVYYCQVWDSSSDHVVFGGGTKLTVLLEGQPKANPTVTLFPPSSEELQANKATLVCLISDFYPGAVTVAWKADGSPVKAGVETTKPSKQSNNKYAASSYLSLTPEQWKSHRSYSCQVTHEGSTVEKTVAPTECSGRADCGFTSESYQQGVLSATILYEILLGKATLYAVLVSALVLMAMVKRKDSRGRAKRSGSGATNFSLLKQAGDVEENPGPTSMDWIWRILFLVGAATGAHSFEQLQLQESGPGLVKPSETLSLTCTVSGGSISSSSYFWGWIRQPPGKGLEWIGSIYYSGITYYNPSLKSRVTISVDTSKNQFSLKLSSVTAADTAVYYCARHDGAVAGLFDYWGQGTLVTVSSATRASTKGPSVFPLAPSSKSTSGGTAALGCLVKDYFPEPVTVSWNSGALTSGVHTFPAVLQSSGLYSLSSVVTVPSSSLGTQTYICNVNHKPSNTKVDKRVEPKSCIPEDTFFPSPESSCDVKLVEKSFETDTNLNFQNLSVIGFRILLLKVAGFNLLMTLRLWSS

SEQ ID NO: 43432 - protein, 453 aa, synthetic construct
MALPVTALLLPLALLLHAARPSYVLTQPPSVSVAPGQTARITCGGNNIGGKSVHWYQQPPGQAPVVVVYDDSDRPSGIPERFSGSNSGNTATLTISRVEAGDEAVYYCQVWDSSSDHVVFGGGTKLTVLGGGGSGGGGSGGGGSQLQLQESGPGLVKPSETLSLTCTVSGGSISSSSYFWGWIRQPPGKGLEWIGSIYYSGITYYNPSLKSRVTISVDTSKNQFSLKLSSVTAADTAVYYCARHDGAVAGLFDYWGQGTLVTVSSATRDGNEEMGGITQTPYKVSISGTTVILTCPQYPGSEILWQHNDKNIGGDEDDKNIGSDEDHLSLKEFSELEQSGYYVCYPRGSKPEDANFYLYLRARVCENCMEMDVMSVATIVIVDICITGGLLLLVYYWSKNRKAKAKPVTRGAGAGGRQRGQNKERPPPVPNPDYEPIRKGQRDLYSGLNQRRI

SEQ ID NO: 43433 - protein, 418 aa, synthetic construct
MALPVTALLLPLALLLHAARPSYVLTQPPSVSVAPGQTARITCGGNNIGGKSVHWYQQPPGQAPVVVVYDDSDRPSGIPERFSGSNSGNTATLTISRVEAGDEAVYYCQVWDSSSDHVVFGGGTKLTVLGGGGSGGGGSGGGGSQLQLQESGPGLVKPSETLSLTCTVSGGSISSSSYFWGWIRQPPGKGLEWIGSIYYSGITYYNPSLKSRVTISVDTSKNQFSLKLSSVTAADTAVYYCARHDGAVAGLFDYWGQGTLVTVSSATRFKIPIEELEDRVFVNCNTSITWVEGTVGTLLSDITRLDLGKRILDPRGIYRCNGTDIYKDKESTVQVHYRMCQSCVELDPATVAGIIVTDVIATLLLALGVFCFAGHETGRLSGAADTQALLRNDQVYQPLRDRDDAQYSHLGGNWARNK

SEQ ID NO: 43434 - protein, 428 aa, synthetic construct
MALPVTALLLPLALLLHAARPSYVLTQPPSVSVAPGQTARITCGGNNIGGKSVHWYQQPPGQAPVVVVYDDSDRPSGIPERFSGSNSGNTATLTISRVEAGDEAVYYCQVWDSSSDHVVFGGGTKLTVLGGGGSGGGGSGGGGSQLQLQESGPGLVKPSETLSLTCTVSGGSISSSSYFWGWIRQPPGKGLEWIGSIYYSGITYYNPSLKSRVTISVDTSKNQFSLKLSSVTAADTAVYYCARHDGAVAGLFDYWGQGTLVTVSSATRQSIKGNHLVKVYDYQEDGSVLLTCDAEAKNITWFKDGKMIGFLTEDKKKWNLGSNAKDPRGMYQCKGSQNKSKPLQVYYRMCQNCIELNAATISGFLFAEIVSIFVLAVGVYFIAGQDGVRQSRASDKQTLLPNDQLYQPLKDREDDQYSHLQGNQLRRN

SEQ ID NO: 43435 - protein, 411 aa, synthetic construct
MALPVTALLLPLALLLHAARPSYVLTQPPSVSVAPGQTARITCGGNNIGGKSVHWYQQPPGQAPVVVVYDDSDRPSGIPERFSGSNSGNTATLTISRVEAGDEAVYYCQVWDSSSDHVVFGGGTKLTVLGGGGSGGGGSGGGGSQLQLQESGPGLVKPSETLSLTCTVSGGSISSSSYFWGWIRQPPGKGLEWIGSIYYSGITYYNPSLKSRVTISVDTSKNQFSLKLSSVTAADTAVYYCARHDGAVAGLFDYWGQGTLVTVSSATRQSFGLLDPKLCYLLDGILFIYGVILTALFLRVKFSRSADAPAYQQGQNQLYNELNLGRREEYDVLDKRRGRDPEMGGKPQRRKNPQEGLYNELQKDKMAEAYSEIGMKGERRRGKGHDGLYQGLSTATKDTYDALHMQALPPR

SEQ ID NO: 43436 - protein, 506 aa, synthetic construct
MALPVTALLLPLALLLHAARPSYVLTQPPSVSVAPGQTARITCGGNNIGGKSVHWYQQPPGQAPVVVVYDDSDRPSGIPERFSGSNSGNTATLTISRVEAGDEAVYYCQVWDSSSDHVVFGGGTKLTVLGGGGSGGGGSGGGGSQLQLQESGPGLVKPSETLSLTCTVSGGSISSSSYFWGWIRQPPGKGLEWIGSIYYSGITYYNPSLKSRVTISVDTSKNQFSLKLSSVTAADTAVYYCARHDGAVAGLFDYWGQGTLVTVSSATRGMRTEDLPKAVVFLEPQWYRVLEKDSVTLKCQGAYSPEDNSTQWFHNESLISSQASSYFIDAATVDDSGEYRCQTNLSTLSDPVQLEVHIGWLLLQAPRWVFKEEDPIHLRCHSWKNTALHKVTYLQNGKGRKYFHHNSDFYIPKATLKDSGSYFCRGLVGSKNVSSETVNITITQGLAVPTISSFFPPGYQVSFCLVMVLLFAVDTGLYFSVKTNIRSSTRDWKDHKFKWRKDPQDK

SEQ ID NO: 43437 - protein, 481 aa, synthetic construct
MALPVTALLLPLALLLHAARPSYVLTQPPSVSVAPGQTARITCGGNNIGGKSVHWYQQPPGQAPVVVVYDDSDRPSGIPERFSGSNSGNTATLTISRVEAGDEAVYYCQVWDSSSDHVVFGGGTKLTVLGGGGSGGGGSGGGGSQLQLQESGPGLVKPSETLSLTCTVSGGSISSSSYFWGWIRQPPGKGLEWIGSIYYSGITYYNPSLKSRVTISVDTSKNQFSLKLSSVTAADTAVYYCARHDGAVAGLFDYWGQGTLVTVSSATRGMRTEDLPKAVVFLEPQWYRVLEKDSVTLKCQGAYSPEDNSTQWFHNESLISSQASSYFIDAATVDDSGEYRCQTNLSTLSDPVQLEVHIGWLLLQAPRWVFKEEDPIHLRCHSWKNTALHKVTYLQNGKGRKYFHHNSDFYIPKATLKDSGSYFCRGLVGSKNVSSETVNITITQGLAVPTISSFFPPGYQVSFCLVMVLLFAVDTGLYFSV

SEQ ID NO: 43438 - protein, 482 aa, synthetic construct
MALPVTALLLPLALLLHAARPSYVLTQPPSVSVAPGQTARITCGGNNIGGKSVHWYQQPPGQAPVVVVYDDSDRPSGIPERFSGSNSGNTATLTISRVEAGDEAVYYCQVWDSSSDHVVFGGGTKLTVLGGGGSGGGGSGGGGSQLQLQESGPGLVKPSETLSLTCTVSGGSISSSSYFWGWIRQPPGKGLEWIGSIYYSGITYYNPSLKSRVTISVDTSKNQFSLKLSSVTAADTAVYYCARHDGAVAGLFDYWGQGTLVTVSSATRGMRTEDLPKAVVFLEPQWYRVLEKDSVTLKCQGAYSPEDNSTQWFHNESLISSQASSYFIDAATVDDSGEYRCQTNLSTLSDPVQLEVHIGWLLLQAPRWVFKEEDPIHLRCHSWKNTALHKVTYLQNGKGRKYFHHNSDFYIPKATLKDSGSYFCRGLVGSKNVSSETVNITITQGLAVPTISSFFPPGYQVSFCLVMVLLFAVDTGLYFSVK

SEQ ID NO: 43439 - protein, 726 aa, synthetic construct
MALPVTALLLPLALLLHAARPSYVLTQPPSVSVAPGQTARITCGGNNIGGKSVHWYQQPPGQAPVVVVYDDSDRPSGIPERFSGSNSGNTATLTISRVEAGDEAVYYCQVWDSSSDHVVFGGGTKLTVLLEGQPKANPTVTLFPPSSEELQANKATLVCLISDFYPGAVTVAWKADGSPVKAGVETTKPSKQSNNKYAASSYLSLTPEQWKSHRSYSCQVTHEGSTVEKTVAPTECSGSQSFGLLDPKLCYLLDGILFIYGVILTALFLRVKFSRSADAPAYQQGQNQLYNELNLGRREEYDVLDKRRGRDPEMGGKPQRRKNPQEGLYNELQKDKMAEAYSEIGMKGERRRGKGHDGLYQGLSTATKDTYDALHMQALPPRRAKRSGSGATNFSLLKQAGDVEENPGPTSMDWIWRILFLVGAATGAHSFEQLQLQESGPGLVKPSETLSLTCTVSGGSISSSSYFWGWIRQPPGKGLEWIGSIYYSGITYYNPSLKSRVTISVDTSKNQFSLKLSSVTAADTAVYYCARHDGAVAGLFDYWGQGTLVTVSSATRASTKGPSVFPLAPSSKSTSGGTAALGCLVKDYFPEPVTVSWNSGALTSGVHTFPAVLQSSGLYSLSSVVTVPSSSLGTQTYICNVNHKPSNTKVDKRVEPKSCGTITQGLAVSTISSFFPPGYQVSFCLVMVLLFAVDTGLYFSVKTNIRSSTRDWKDHKFKWRKDPQDK

SEQ ID NO: 43440 - protein, 741 aa, synthetic construct
MALPVTALLLPLALLLHAARPSYVLTQPPSVSVAPGQTARITCGGNNIGGKSVHWYQQPPGQAPVVVVYDDSDRPSGIPERFSGSNSGNTATLTISRVEAGDEAVYYCQVWDSSSDHVVFGGGTKLTVLLEDLKNVFPPEVAVFEPSEAEISHTQKATLVCLATGFYPDHVELSWWVNGKEVHSGVSTDPQPLKEQPALNDSRYCLSSRLRVSATFWQNPRNHFRCQVQFYGLSENDEWTQDRAKPVTQIVSAEAWGRADCGSQSFGLLDPKLCYLLDGILFIYGVILTALFLRVKFSRSADAPAYQQGQNQLYNELNLGRREEYDVLDKRRGRDPEMGGKPQRRKNPQEGLYNELQKDKMAEAYSEIGMKGERRRGKGHDGLYQGLSTATKDTYDALHMQALPPRRAKRSGSGATNFSLLKQAGDVEENPGPTSMDWIWRILFLVGAATGAHSFEQLQLQESGPGLVKPSETLSLTCTVSGGSISSSSYFWGWIRQPPGKGLEWIGSIYYSGITYYNPSLKSRVTISVDTSKNQFSLKLSSVTAADTAVYYCARHDGAVAGLFDYWGQGTLVTVSSATRIQNPDPAVYQLRDSKSSDKSVCLFTDFDSQTNVSQSKDSDVYITDKTVLDMRSMDFKSNSAVAWSNKSDFACANAFNNSIIPEDTFFPSPESSCGTITQGLAVSTISSFFPPGYQVSFCLVMVLLFAVDTGLYFSVKTNIRSSTRDWKDHKFKWRKDPQDK

SEQ ID NO: 43441 - protein, 716 aa, synthetic construct
MALPVTALLLPLALLLHAARPSYVLTQPPSVSVAPGQTARITCGGNNIGGKSVHWYQQPPGQAPVVVVYDDSDRPSGIPERFSGSNSGNTATLTISRVEAGDEAVYYCQVWDSSSDHVVFGGGTKLTVLLEDLKNVFPPEVAVFEPSEAEISHTQKATLVCLATGFYPDHVELSWWVNGKEVHSGVSTDPQPLKEQPALNDSRYCLSSRLRVSATFWQNPRNHFRCQVQFYGLSENDEWTQDRAKPVTQIVSAEAWGRADCGSQSFGLLDPKLCYLLDGILFIYGVILTALFLRVKFSRSADAPAYQQGQNQLYNELNLGRREEYDVLDKRRGRDPEMGGKPQRRKNPQEGLYNELQKDKMAEAYSEIGMKGERRRGKGHDGLYQGLSTATKDTYDALHMQALPPRRAKRSGSGATNFSLLKQAGDVEENPGPTSMDWIWRILFLVGAATGAHSFEQLQLQESGPGLVKPSETLSLTCTVSGGSISSSSYFWGWIRQPPGKGLEWIGSIYYSGITYYNPSLKSRVTISVDTSKNQFSLKLSSVTAADTAVYYCARHDGAVAGLFDYWGQGTLVTVSSATRIQNPDPAVYQLRDSKSSDKSVCLFTDFDSQTNVSQSKDSDVYITDKTVLDMRSMDFKSNSAVAWSNKSDFACANAFNNSIIPEDTFFPSPESSCGTITQGLAVSTISSFFPPGYQVSFCLVMVLLFAVDTGLYFSV

SEQ ID NO: 43442 - protein, 717 aa, synthetic construct
MALPVTALLLPLALLLHAARPSYVLTQPPSVSVAPGQTARITCGGNNIGGKSVHWYQQPPGQAPVVVVYDDSDRPSGIPERFSGSNSGNTATLTISRVEAGDEAVYYCQVWDSSSDHVVFGGGTKLTVLLEDLKNVFPPEVAVFEPSEAEISHTQKATLVCLATGFYPDHVELSWWVNGKEVHSGVSTDPQPLKEQPALNDSRYCLSSRLRVSATFWQNPRNHFRCQVQFYGLSENDEWTQDRAKPVTQIVSAEAWGRADCGSQSFGLLDPKLCYLLDGILFIYGVILTALFLRVKFSRSADAPAYQQGQNQLYNELNLGRREEYDVLDKRRGRDPEMGGKPQRRKNPQEGLYNELQKDKMAEAYSEIGMKGERRRGKGHDGLYQGLSTATKDTYDALHMQALPPRRAKRSGSGATNFSLLKQAGDVEENPGPTSMDWIWRILFLVGAATGAHSFEQLQLQESGPGLVKPSETLSLTCTVSGGSISSSSYFWGWIRQPPGKGLEWIGSIYYSGITYYNPSLKSRVTISVDTSKNQFSLKLSSVTAADTAVYYCARHDGAVAGLFDYWGQGTLVTVSSATRIQNPDPAVYQLRDSKSSDKSVCLFTDFDSQTNVSQSKDSDVYITDKTVLDMRSMDFKSNSAVAWSNKSDFACANAFNNSIIPEDTFFPSPESSCGTITQGLAVSTISSFFPPGYQVSFCLVMVLLFAVDTGLYFSVK

SEQ ID NO: 43443 - protein, 718 aa, synthetic construct
MALPVTALLLPLALLLHAARPSYVLTQPPSVSVAPGQTARITCGGNNIGGKSVHWYQQPPGQAPVVVVYDDSDRPSGIPERFSGSNSGNTATLTISRVEAGDEAVYYCQVWDSSSDHVVFGGGTKLTVLLEDLKNVFPPEVAVFEPSEAEISHTQKATLVCLATGFYPDHVELSWWVNGKEVHSGVSTDPQPLKEQPALNDSRYCLSSRLRVSATFWQNPRNHFRCQVQFYGLSENDEWTQDRAKPVTQIVSAEAWGRADCGSQSFGLLDPKLCYLLDGILFIYGVILTALFLRVKFSRSADAPAYQQGQNQLYNELNLGRREEYDVLDKRRGRDPEMGGKPQRRKNPQEGLYNELQKDKMAEAYSEIGMKGERRRGKGHDGLYQGLSTATKDTYDALHMQALPPRRAKRSGSGATNFSLLKQAGDVEENPGPTSMDWIWRILFLVGAATGAHSFEQLQLQESGPGLVKPSETLSLTCTVSGGSISSSSYFWGWIRQPPGKGLEWIGSIYYSGITYYNPSLKSRVTISVDTSKNQFSLKLSSVTAADTAVYYCARHDGAVAGLFDYWGQGTLVTVSSATRIQNPDPAVYQLRDSKSSDKSVCLFTDFDSQTNVSQSKDSDVYITDKTVLDMRSMDFKSNSAVAWSNKSDFACANAFNNSIIPEDTFFPSPESSCGTITQGLAVSTISSFFPPGYQVSFCLVMVLLFAVDTGLYFSVKT

SEQ ID NO: 43444 - protein, 654 aa, synthetic construct
MALPVTALLLPLALLLHAARPSYVLTQPPSVSVAPGQTARITCGGNNIGGKSVHWYQQPPGQAPVVVVYDDSDRPSGIPERFSGSNSGNTATLTISRVEAGDEAVYYCQVWDSSSDHVVFGGGTKLTVLLEGQPKANPTVTLFPPSSEELQANKATLVCLISDFYPGAVTVAWKADGSPVKAGVETTKPSKQSNNKYAASSYLSLTPEQWKSHRSYSCQVTHEGSTVEKTVAPTECSGSLGEPQLCYILDAILFLYGIVLTLLYCRLKIQVRKAAITSYEKSDGVYTGLSTRNQETYETLKHEKPPQRAKRSGSGATNFSLLKQAGDVEENPGPTSMDWIWRILFLVGAATGAHSFEQLQLQESGPGLVKPSETLSLTCTVSGGSISSSSYFWGWIRQPPGKGLEWIGSIYYSGITYYNPSLKSRVTISVDTSKNQFSLKLSSVTAADTAVYYCARHDGAVAGLFDYWGQGTLVTVSSATRASTKGPSVFPLAPSSKSTSGGTAALGCLVKDYFPEPVTVSWNSGALTSGVHTFPAVLQSSGLYSLSSVVTVPSSSLGTQTYICNVNHKPSNTKVDKRVEPKSCGTLGEPQLCYILDAILFLYGIVLTLLYCRLKIQVRKAAITSYEKSDGVYTGLSTRNQETYETLKHEKPPQ

SEQ ID NO: 43445 - protein, 624 aa, synthetic construct
MALPVTALLLPLALLLHAARPSYVLTQPPSVSVAPGQTARITCGGNNIGGKSVHWYQQPPGQAPVVVVYDDSDRPSGIPERFSGSNSGNTATLTISRVEAGDEAVYYCQVWDSSSDHVVFGGGTKLTVLLEDLKNVFPPEVAVFEPSEAEISHTQKATLVCLATGFYPDHVELSWWVNGKEVHSGVCTDPQPLKEQPALNDSRYCLSSRLRVSATFWQNPRNHFRCQVQFYGLSENDEWTQDRAKPVTQIVSAEAWGRADCGFTSESYQQGVLSAYYMYLLLLLKSVVYFAIITCCLLRRTAFCCNGEKSRAKRSGSGATNFSLLKQAGDVEENPGPTSMDWIWRILFLVGAATGAHSFEQLQLQESGPGLVKPSETLSLTCTVSGGSISSSSYFWGWIRQPPGKGLEWIGSIYYSGITYYNPSLKSRVTISVDTSKNQFSLKLSSVTAADTAVYYCARHDGAVAGLFDYWGQGTLVTVSSATRIQNPDPAVYQLRDSKSSDKSVCLFTDFDSQTNVSQSKDSDVYITDKCVLDMRSMDFKSNSAVAWSNKSDFACANAFNNSIIPEDTFFPSPESSCDVKLVEKSFETDTNLNFQNLSVIGFRILLLKVAGFNLLMTLRLWSS

SEQ ID NO: 43446 - protein, 630 aa, synthetic construct
MALPVTALLLPLALLLHAARPSYVLTQPPSVSVAPGQTARITCGGNNIGGKSVHWYQQPPGQAPVVVVYDDSDRPSGIPERFSGSNSGNTATLTISRVEAGDEAVYYCQVWDSSSDHVVFGGGTKLTVLLEDKQLDADVSPKPTIFLPSIAETKLQKAGTYLCLLEKFFPDVIKIHWQEKKSNTILGSQEGNTMKTNDTYMKFSWLTVPEKSLDKEHRCIVRHENNKNGVDQEIIFPPIKTDVITMDPKDNCSKDANDTLLLQLTNTSAYYMYEILLGKATLYAVLVSALVLMAMVKRKDSRGRAKRSGSGATNFSLLKQAGDVEENPGPTSMDWIWRILFLVGAATGAHSFEQLQLQESGPGLVKPSETLSLTCTVSGGSISSSSYFWGWIRQPPGKGLEWIGSIYYSGITYYNPSLKSRVTISVDTSKNQFSLKLSSVTAADTAVYYCARHDGAVAGLFDYWGQGTLVTVSSATRSQPHTKPSVFVMKNGTNVACLVKEFYPKDIRINLVSSKKITEFDPAIVISPSGKYNAVKLGKYEDSNSVTCSVQHDNKTVHSTDFEVKTDSTDHVKPKETENTKQPSKSCHKPKAIVHTEKVNMMSLTVIGFRILLLKVAGFNLLMTLRLWSS

SEQ ID NO: 43447 - protein, 630 aa, synthetic construct
MALPVTALLLPLALLLHAARPSYVLTQPPSVSVAPGQTARITCGGNNIGGKSVHWYQQPPGQAPVVVVYDDSDRPSGIPERFSGSNSGNTATLTISRVEAGDEAVYYCQVWDSSSDHVVFGGGTKLTVLLEDKQLDADVSPKPTIFLPSIAETKLQKAGTYLCLLEKFFPDVIKIHWQEKKSNTILGSQEGNTMKTNDTYMKFSWLTVPEKSLDKEHRCIVRHENNKNGVDQEIIFPPIKTDVITMDPKDNCSKDANDTLLLQLTNTSATILYEILLGKATLYAVLVSALVLMAMVKRKDSRGRAKRSGSGATNFSLLKQAGDVEENPGPTSMDWIWRILFLVGAATGAHSFEQLQLQESGPGLVKPSETLSLTCTVSGGSISSSSYFWGWIRQPPGKGLEWIGSIYYSGITYYNPSLKSRVTISVDTSKNQFSLKLSSVTAADTAVYYCARHDGAVAGLFDYWGQGTLVTVSSATRSQPHTKPSVFVMKNGTNVACLVKEFYPKDIRINLVSSKKITEFDPAIVISPSGKYNAVKLGKYEDSNSVTCSVQHDNKTVHSTDFEVKTDSTDHVKPKETENTKQPSKSCHKPKAIVHTEKVNMMSLTVIGFRILLLKVAGFNLLMTLRLWSS

SEQ ID NO: 43448 - protein, 630 aa, synthetic construct
MALPVTALLLPLALLLHAARPSYVLTQPPSVSVAPGQTARITCGGNNIGGKSVHWYQQPPGQAPVVVVYDDSDRPSGIPERFSGSNSGNTATLTISRVEAGDEAVYYCQVWDSSSDHVVFGGGTKLTVLLEDKQLDADVSPKPTIFLPSIAETKLQKAGTYLCLLEKFFPDVIKIHWQEKKSNTILGSQEGNTMKTNDTYMKFSWLTVPEKSLDKEHRCIVRHENNKNGVDQEIIFPPIKTDVITMDPKDNCSKDANDTLLLQLTNTSAYYMYEILLGKATLYAVLVSALVLMAMVKRKDSRGRAKRSGSGATNFSLLKQAGDVEENPGPTSMDWIWRILFLVGAATGAHSFEQLQLQESGPGLVKPSETLSLTCTVSGGSISSSSYFWGWIRQPPGKGLEWIGSIYYSGITYYNPSLKSRVTISVDTSKNQFSLKLSSVTAADTAVYYCARHDGAVAGLFDYWGQGTLVTVSSATRSQPHTKPSVFVMKNGTNVACLVKEFYPKDIRINLVSSKKITEFDPAIVISPSGKYNAVKLGKYEDSNSVTCSVQHDNKTVHSTDFEVKTDSTDHVKPKETENTKQPSKSCHKPKAIVHTEKVNMMSLTVLGFRILLLKVAGFNLLMTLRLWSS

SEQ ID NO: 43449 - protein, 630 aa, synthetic construct
MALPVTALLLPLALLLHAARPSYVLTQPPSVSVAPGQTARITCGGNNIGGKSVHWYQQPPGQAPVVVVYDDSDRPSGIPERFSGSNSGNTATLTISRVEAGDEAVYYCQVWDSSSDHVVFGGGTKLTVLLEDKQLDADVSPKPTIFLPSIAETKLQKAGTYLCLLEKFFPDVIKIHWQEKKSNTILGSQEGNTMKTNDTYMKFSWLTVPEKSLDKEHRCIVRHENNKNGVDQEIIFPPIKTDVITMDPKDNCSKDANDTLLLQLTNTSATILYEILLGKATLYAVLVSALVLMAMVKRKDSRGRAKRSGSGATNFSLLKQAGDVEENPGPTSMDWIWRILFLVGAATGAHSFEQLQLQESGPGLVKPSETLSLTCTVSGGSISSSSYFWGWIRQPPGKGLEWIGSIYYSGITYYNPSLKSRVTISVDTSKNQFSLKLSSVTAADTAVYYCARHDGAVAGLFDYWGQGTLVTVSSATRSQPHTKPSVFVMKNGTNVACLVKEFYPKDIRINLVSSKKITEFDPAIVISPSGKYNAVKLGKYEDSNSVTCSVQHDNKTVHSTDFEVKTDSTDHVKPKETENTKQPSKSCHKPKAIVHTEKVNMMSLTVLGFRILLLKVAGFNLLMTLRLWSS

SEQ ID NO: 43450 - protein, 624 aa, synthetic construct
MALPVTALLLPLALLLHAARPSYVLTQPPSVSVAPGQTARITCGGNNIGGKSVHWYQQPPGQAPVVVVYDDSDRPSGIPERFSGSNSGNTATLTISRVEAGDEAVYYCQVWDSSSDHVVFGGGTKLTVLLEDLKNVFPPEVAVFEPSEAEISHTQKATLVCLATGFYPDHVELSWWVNGKEVHSGVCTDPQPLKEQPALNDSRYCLSSRLRVSATFWQNPRNHFRCQVQFYGLSENDEWTQDRAKPVTQIVSAEAWGRADCGFTSESYQQGVLSATILYLLLLLKSVVYFAIITCCLLRRTAFCCNGEKSRAKRSGSGATNFSLLKQAGDVEENPGPTSMDWIWRILFLVGAATGAHSFEQLQLQESGPGLVKPSETLSLTCTVSGGSISSSSYFWGWIRQPPGKGLEWIGSIYYSGITYYNPSLKSRVTISVDTSKNQFSLKLSSVTAADTAVYYCARHDGAVAGLFDYWGQGTLVTVSSATRIQNPDPAVYQLRDSKSSDKSVCLFTDFDSQTNVSQSKDSDVYITDKCVLDMRSMDFKSNSAVAWSNKSDFACANAFNNSIIPEDTFFPSPESSCDVKLVEKSFETDTNLNFQNLSVIGLRMLFAKTVAVNFLLTAKLFFL

SEQ ID NO: 43451 - protein, 653 aa, synthetic construct
MALPVTALLLPLALLLHAARPSYVLTQPPSVSVAPGQTARITCGGNNIGGKSVHWYQQPPGQAPVVVVYDDSDRPSGIPERFSGSNSGNTATLTISRVEAGDEAVYYCQVWDSSSDHVVFGGGTKLTVLLEDLKNVFPPEVAVFEPSEAEISHTQKATLVCLATGFYPDHVELSWWVNGKEVHSGVSTDPQPLKEQPALNDSRYCLSSRLRVSATFWQNPRNHFRCQVQFYGLSENDEWTQDRAKPVTQIVSAEAWGRADCGSSKDANDTLLLQLTNTSAYYMYLLLLLKSVVYFAIITCCLLRRTAFCCNGEKSRAKRSGSGATNFSLLKQAGDVEENPGPTSMDWIWRILFLVGAATGAHSFEQLQLQESGPGLVKPSETLSLTCTVSGGSISSSSYFWGWIRQPPGKGLEWIGSIYYSGITYYNPSLKSRVTISVDTSKNQFSLKLSSVTAADTAVYYCARHDGAVAGLFDYWGQGTLVTVSSATRIQNPDPAVYQLRDSKSSDKSVCLFTDFDSQTNVSQSKDSDVYITDKTVLDMRSMDFKSNSAVAWSNKSDFACANAFNNSIIPEDTFFPSPESSCGTEVKTDSTDHVKPKETENTKQPSKSCHKPKAIVHTEKVNMMSLTVLGLRMLFAKTVAVNFLLTAKLFFL

SEQ ID NO: 43452 - protein, 623 aa, synthetic construct
MALPVTALLLPLALLLHAARPSYVLTQPPSVSVAPGQTARITCGGNNIGGKSVHWYQQPPGQAPVVVVYDDSDRPSGIPERFSGSNSGNTATLTISRVEAGDEAVYYCQVWDSSSDHVVFGGGTKLTVLLEDLKNVFPPEVAVFEPSEAEISHTQKATLVCLATGFYPDHVELSWWVNGKEVHSGVCTDPQPLKEQPALNDSRYCLSSRLRVSATFWQNPRNHFRCQVQFYGLSENDEWTQDRAKPVTQIVSAEAWGRADCDVKLVEKSFETDTNLNFQNLSVIGFRILLLKVAGFNLLMTLRLWSSRAKRSGSGATNFSLLKQAGDVEENPGPTSMDWIWRILFLVGAATGAHSFEQLQLQESGPGLVKPSETLSLTCTVSGGSISSSSYFWGWIRQPPGKGLEWIGSIYYSGITYYNPSLKSRVTISVDTSKNQFSLKLSSVTAADTAVYYCARHDGAVAGLFDYWGQGTLVTVSSATRIQNPDPAVYQLRDSKSSDKSVCLFTDFDSQTNVSQSKDSDVYITDKCVLDMRSMDFKSNSAVAWSNKSDFACANAFNNSIIPEDTFFPSPESSCGFTSESYQQGVLSATILYEILLGKATLYAVLVSALVLMAMVKRKDSRG

SEQ ID NO: 43453 - protein, 623 aa, synthetic construct
MALPVTALLLPLALLLHAARPSYVLTQPPSVSVAPGQTARITCGGNNIGGKSVHWYQQPPGQAPVVVVYDDSDRPSGIPERFSGSNSGNTATLTISRVEAGDEAVYYCQVWDSSSDHVVFGGGTKLTVLLEDLKNVFPPEVAVFEPSEAEISHTQKATLVCLATGFYPDHVELSWWVNGKEVHSGVCTDPQPLKEQPALNDSRYCLSSRLRVSATFWQNPRNHFRCQVQFYGLSENDEWTQDRAKPVTQIVSAEAWGRADCGFTSESYQQGVLSATNLSVIGFRILLLKVAGFNLLMTLRLWSSRAKRSGSGATNFSLLKQAGDVEENPGPTSMDWIWRILFLVGAATGAHSFEQLQLQESGPGLVKPSETLSLTCTVSGGSISSSSYFWGWIRQPPGKGLEWIGSIYYSGITYYNPSLKSRVTISVDTSKNQFSLKLSSVTAADTAVYYCARHDGAVAGLFDYWGQGTLVTVSSATRIQNPDPAVYQLRDSKSSDKSVCLFTDFDSQTNVSQSKDSDVYITDKCVLDMRSMDFKSNSAVAWSNKSDFACANAFNNSIIPEDTFFPSPESSCDVKLVEKSFETDTNLNFQILYEILLGKATLYAVLVSALVLMAMVKRKDSRG

SEQ ID NO: 43454 - protein, 623 aa, synthetic construct; identical to SEQ ID NO: 43452

SEQ ID NO: 43455 - protein, 623 aa, synthetic construct; identical to SEQ ID NO: 43453

SEQ ID NO: 43456 - protein, 623 aa, synthetic construct; identical to SEQ ID NO: 43452

SEQ ID NO: 43457 - protein, 626 aa, synthetic construct
MALPVTALLLPLALLLHAARPSYVLTQPPSVSVAPGQTARITCGGNNIGGKSVHWYQQPPGQAPVVVVYDDSDRPSGIPERFSGSNSGNTATLTISRVEAGDEAVYYCQVWDSSSDHVVFGGGTKLTVLLEADVSPKPTIFLPSIAETKLQKAGTYLCLLEKFFPDVIKIHWQEKKSNTILGSQEGNTMKTNDTYMKFSWLTVPEKSLDKEHRCIVRHENNKNGVDQEIIFPPIKTDVITMDPKDNCSKDANDTLLLQLTNTSAYYMYLLLLLKSVVYFAIITCCLLRRTAFCCNGEKSRAKRSGSGATNFSLLKQAGDVEENPGPTSMDWIWRILFLVGAATGAHSFEQLQLQESGPGLVKPSETLSLTCTVSGGSISSSSYFWGWIRQPPGKGLEWIGSIYYSGITYYNPSLKSRVTISVDTSKNQFSLKLSSVTAADTAVYYCARHDGAVAGLFDYWGQGTLVTVSSATRSQPHTKPSVFVMKNGTNVACLVKEFYPKDIRINLVSSKKITEFDPAIVISPSGKYNAVKLGKYEDSNSVTCSVQHDNKTVHSTDFEVKTDSTDHVKPKETENTKQPSKSCHKPKAIVHTEKVNMMSLTVIGFRILLLKVAGFNLLMTLRLWSS

SEQ ID NO: 43458 - protein, 626 aa, synthetic construct
MALPVTALLLPLALLLHAARPSYVLTQPPSVSVAPGQTARITCGGNNIGGKSVHWYQQPPGQAPVVVVYDDSDRPSGIPERFSGSNSGNTATLTISRVEAGDEAVYYCQVWDSSSDHVVFGGGTKLTVLLEADVSPKPTIFLPSIAETKLQKAGTYLCLLEKFFPDVIKIHWQEKKSNTILGSQEGNTMKTNDTYMKFSWLTVPEKSLDKEHRCIVRHENNKNGVDQEIIFPPIKTDVITMDPKDNCSKDANDTLLLQLTNTSAYYMYLLLLLKSVVYFAIITCCLLRRTAFCCNGEKSRAKRSGSGATNFSLLKQAGDVEENPGPTSMDWIWRILFLVGAATGAHSFEQLQLQESGPGLVKPSETLSLTCTVSGGSISSSSYFWGWIRQPPGKGLEWIGSIYYSGITYYNPSLKSRVTISVDTSKNQFSLKLSSVTAADTAVYYCARHDGAVAGLFDYWGQGTLVTVSSATRSQPHTKPSVFVMKNGTNVACLVKEFYPKDIRINLVSSKKITEFDPAIVISPSGKYNAVKLGKYEDSNSVTCSVQHDNKTVHSTDFEVKTDSTDHVKPKETENTKQPSKSCHKPKAIVHTEKVNMMSLTVLGFRILLLKVAGFNLLMTLRLWSS

SEQ ID NO: 43459 - protein, 623 aa, synthetic construct; identical to SEQ ID NO: 43452

SEQ ID NO: 43460 - protein, 627 aa, synthetic construct
MALPVTALLLPLALLLHAARPSYVLTQPPSVSVAPGQTARITCGGNNIGGKSVHWYQQPPGQAPVVVVYDDSDRPSGIPERFSGSNSGNTATLTISRVEAGDEAVYYCQVWDSSSDHVVFGGGTKLTVLLEIQNPDPAVYQLRDSKSSDKSVCLFTDFDSQTNVSQSKDSDVYITDKCVLDMRSMDFKSNSAVAWSNKSDFACANAFNNSIIPEDTFFPSPESSCGFTSESYQQGVLSATILYEILLGKATLYAVLVSALVLMAMVKRKDSRGRAKRSGSGVKQTLNFDLLKLAGDVESNPGPTSMDWIWRILFLVGAATGAHSFEQLQLQESGPGLVKPSETLSLTCTVSGGSISSSSYFWGWIRQPPGKGLEWIGSIYYSGITYYNPSLKSRVTISVDTSKNQFSLKLSSVTAADTAVYYCARHDGAVAGLFDYWGQGTLVTVSSATREDLKNVFPPEVAVFEPSEAEISHTQKATLVCLATGFYPDHVELSWWVNGKEVHSGVCTDPQPLKEQPALNDSRYCLSSRLRVSATFWQNPRNHFRCQVQFYGLSENDEWTQDRAKPVTQIVSAEAWGRADCDVKLVEKSFETDTNLNFQNLSVIGFRILLLKVAGFNLLMTLRLWSS

SEQ ID NO: 43461 - protein, 758 aa, synthetic construct
MALPVTALLLPLALLLHAARPEVQLVESGGGLVQPGGSLRLSCAASGFSFSDFWMSWVRQAPGKGLEWVATISQAGSEKDYVDSVKGRFTISRDNAKKSLYLQMNSLRAEDTAVYYCASGVYSFDYRGQGTLVTVSSGTGGGGSGGGGSGGGGSEFSYVLTQPPSVSVAPGQTARITCGGNNIGGKSVHWYQQPPGQAPVVVVYDDSDRPSGIPERFSGSNSGNTATLTISRVEAGDEAVYYCQVWDSSSDHVVFGGGTKLTVLLEDLKNVFPPEVAVFEPSEAEISHTQKATLVCLATGFYPDHVELSWWVNGKEVHSGVCTDPQPLKEQPALNDSRYCLSSRLRVSATFWQNPRNHFRCQVQFYGLSENDEWTQDRAKPVTQIVSAEAWGRADCDVKLVEKSFETDTNLNFQNLSVIGFRILLLKVAGFNLLMTLRLWSSRAKRSGSGATNFSLLKQAGDVEENPGPTSMDWIWRILFLVGAATGAHSFEQLQLQESGPGLVKPSETLSLTCTVSGGSISSSSYFWGWIRQPPGKGLEWIGSIYYSGITYYNPSLKSRVTISVDTSKNQFSLKLSSVTAADTAVYYCARHDGAVAGLFDYWGQGTLVTVSSATRIQNPDPAVYQLRDSKSSDKSVCLFTDFDSQTNVSQSKDSDVYITDKCVLDMRSMDFKSNSAVAWSNKSDFACANAFNNSIIPEDTFFPSPESSCGFTSESYQQGVLSATILYEILLGKATLYAVLVSALVLMAMVKRKDSRG

SEQ ID NO: 43462 - protein, 762 aa, synthetic construct
MALPVTALLLPLALLLHAARPEVQLVESGGGLVQPGGSLRLSCAASGFSFSDFWMSWVRQAPGKGLEWVATISQAGSEKDYVDSVKGRFTISRDNAKKSLYLQMNSLRAEDTAVYYCASGVYSFDYRGQGTLVTVSSGTGGGGSGGGGSGGGGSEFSYVLTQPPSVSVAPGQTARITCGGNNIGGKSVHWYQQPPGQAPVVVVYDDSDRPSGIPERFSGSNSGNTATLTISRVEAGDEAVYYCQVWDSSSDHVVFGGGTKLTVLLEIQNPDPAVYQLRDSKSSDKSVCLFTDFDSQTNVSQSKDSDVYITDKCVLDMRSMDFKSNSAVAWSNKSDFACANAFNNSIIPEDTFFPSPESSCGFTSESYQQGVLSATILYEILLGKATLYAVLVSALVLMAMVKRKDSRGRAKRSGSGVKQTLNFDLLKLAGDVESNPGPTSMDWIWRILFLVGAATGAHSFEQLQLQESGPGLVKPSETLSLTCTVSGGSISSSSYFWGWIRQPPGKGLEWIGSIYYSGITYYNPSLKSRVTISVDTSKNQFSLKLSSVTAADTAVYYCARHDGAVAGLFDYWGQGTLVTVSSATREDLKNVFPPEVAVFEPSEAEISHTQKATLVCLATGFYPDHVELSWWVNGKEVHSGVCTDPQPLKEQPALNDSRYCLSSRLRVSATFWQNPRNHFRCQVQFYGLSENDEWTQDRAKPVTQIVSAEAWGRADCDVKLVEKSFETDTNLNFQNLSVIGFRILLLKVAGFNLLMTLRLWSS

SEQ ID NO: 43463 - protein, 895 aa, synthetic construct
MALPVTALLLPLALLLHAARPEVQLVESGGGLVQPGGSLRLSCAASGFSFSDFWMSWVRQAPGKGLEWVATISQAGSEKDYVDSVKGRFTISRDNAKKSLYLQMNSLRAEDTAVYYCASGVYSFDYRGQGTLVTVSSGTGGGGSGGGGSGGGGSEFSYVLTQPPSVSVAPGQTARITCGGNNIGGKSVHWYQQPPGQAPVVVVYDDSDRPSGIPERFSGSNSGNTATLTISRVEAGDEAVYYCQVWDSSSDHVVFGGGTKLTVLLEDLKNVFPPEVAVFEPSEAEISHTQKATLVCLATGFYPDHVELSWWVNGKEVHSGVCTDPQPLKEQPALNDSRYCLSSRLRVSATFWQNPRNHFRCQVQFYGLSENDEWTQDRAKPVTQIVSAEAWGRADCDVKLVEKSFETDTNLNFQNLSVIGFRILLLKVAGFNLLMTLRLWSSRAKRSGSGATNFSLLKQAGDVEENPGPTSMDWIWRILFLVGAATGAHSGPQLQLQESGPGLVKPSETLSLTCTVSGDSISSGDYYWGWIRQPPGKGLEWIGHIYYSGVTYYNPSLKSRVTISVDTSRNQFSLKLSSVTAADTAVYYCTREDSSNWRSRGQGTLVTVSSGSGGGGSGGGGSGGGGSFEQLQLQESGPGLVKPSETLSLTCTVSGGSISSSSYFWGWIRQPPGKGLEWIGSIYYSGITYYNPSLKSRVTISVDTSKNQFSLKLSSVTAADTAVYYCARHDGAVAGLFDYWGQGTLVTVSSATRIQNPDPAVYQLRDSKSSDKSVCLFTDFDSQTNVSQSKDSDVYITDKCVLDMRSMDFKSNSAVAWSNKSDFACANAFNNSIIPEDTFFPSPESSCGFTSESYQQGVLSATILYEILLGKATLYAVLVSALVLMAMVKRKDSRG

SEQ ID NO: 43464 - protein, 899 aa, synthetic construct
MALPVTALLLPLALLLHAARPEVQLVESGGGLVQPGGSLRLSCAASGFSFSDFWMSWVRQAPGKGLEWVATISQAGSEKDYVDSVKGRFTISRDNAKKSLYLQMNSLRAEDTAVYYCASGVYSFDYRGQGTLVTVSSGTGGGGSGGGGSGGGGSEFSYVLTQPPSVSVAPGQTARITCGGNNIGGKSVHWYQQPPGQAPVVVVYDDSDRPSGIPERFSGSNSGNTATLTISRVEAGDEAVYYCQVWDSSSDHVVFGGGTKLTVLLEIQNPDPAVYQLRDSKSSDKSVCLFTDFDSQTNVSQSKDSDVYITDKCVLDMRSMDFKSNSAVAWSNKSDFACANAFNNSIIPEDTFFPSPESSCGFTSESYQQGVLSATILYEILLGKATLYAVLVSALVLMAMVKRKDSRGRAKRSGSGVKQTLNFDLLKLAGDVESNPGPTSMDWIWRILFLVGAATGAHSGPQLQLQESGPGLVKPSETLSLTCTVSGDSISSGDYYWGWIRQPPGKGLEWIGHIYYSGVTYYNPSLKSRVTISVDTSRNQFSLKLSSVTAADTAVYYCTREDSSNWRSRGQGTLVTVSSGSGGGGSGGGGSGGGGSFEQLQLQESGPGLVKPSETLSLTCTVSGGSISSSSYFWGWIRQPPGKGLEWIGSIYYSGITYYNPSLKSRVTISVDTSKNQFSLKLSSVTAADTAVYYCARHDGAVAGLFDYWGQGTLVTVSSATREDLKNVFPPEVAVFEPSEAEISHTQKATLVCLATGFYPDHVELSWWVNGKEVHSGVCTDPQPLKEQPALNDSRYCLSSRLRVSATFWQNPRNHFRCQVQFYGLSENDEWTQDRAKPVTQIVSAEAWGRADCDVKLVEKSFETDTNLNFQNLSVIGFRILLLKVAGFNLLMTLRLWSS

SEQ ID NO: 43465 - protein, 693 aa, synthetic construct
MALPVTALLLPLALLLHAARPSYVLTQPPSVSVAPGQTARITCGGNNIGGKSVHWYQQPPGQAPVVVVYDDSDRPSGIPERFSGSNSGNTATLTISRVEAGDEAVYYCQVWDSSSDHVVFGGGTKLTVLLEDLKNVFPPEVAVFEPSEAEISHTQKATLVCLATGFYPDHVELSWWVNGKEVHSGVCTDPQPLKEQPALNDSRYCLSSRLRVSATFWQNPRNHFRCQVQFYGLSENDEWTQDRAKPVTQIVSAEAWGRADCDVKLVEKSFETDTNLNFQNLSVIGFRILLLKVAGFNLLMTLRLWSSRAKRSGSGATNFSLLKQAGDVEENPGPTSMDWIWRILFLVGAATGAHSGPMDPDLEIRAAFLRQRNTALRTEVAELEQEVQRLENEVSQYETRYGPLGGGKGSGGGGSGGGGSGGGGSFEQLQLQESGPGLVKPSETLSLTCTVSGGSISSSSYFWGWIRQPPGKGLEWIGSIYYSGITYYNPSLKSRVTISVDTSKNQFSLKLSSVTAADTAVYYCARHDGAVAGLFDYWGQGTLVTVSSATRIQNPDPAVYQLRDSKSSDKSVCLFTDFDSQTNVSQSKDSDVYITDKCVLDMRSMDFKSNSAVAWSNKSDFACANAFNNSIIPEDTFFPSPESSCGFTSESYQQGVLSATILYEILLGKATLYAVLVSALVLMAMVKRKDSRG

SEQ ID NO: 43466 - protein, 697 aa, synthetic construct
MALPVTALLLPLALLLHAARPSYVLTQPPSVSVAPGQTARITCGGNNIGGKSVHWYQQPPGQAPVVVVYDDSDRPSGIPERFSGSNSGNTATLTISRVEAGDEAVYYCQVWDSSSDHVVFGGGTKLTVLLEIQNPDPAVYQLRDSKSSDKSVCLFTDFDSQTNVSQSKDSDVYITDKCVLDMRSMDFKSNSAVAWSNKSDFACANAFNNSIIPEDTFFPSPESSCGFTSESYQQGVLSATILYEILLGKATLYAVLVSALVLMAMVKRKDSRGRAKRSGSGVKQTLNFDLLKLAGDVESNPGPTSMDWIWRILFLVGAATGAHSGPMDPDLEIRAAFLRQRNTALRTEVAELEQEVQRLENEVSQYETRYGPLGGGKGSGGGGSGGGGSGGGGSFEQLQLQESGPGLVKPSETLSLTCTVSGGSISSSSYFWGWIRQPPGKGLEWIGSIYYSGITYYNPSLKSRVTISVDTSKNQFSLKLSSVTAADTAVYYCARHDGAVAGLFDYWGQGTLVTVSSATREDLKNVFPPEVAVFEPSEAEISHTQKATLVCLATGFYPDHVELSWWVNGKEVHSGVCTDPQPLKEQPALNDSRYCLSSRLRVSATFWQNPRNHFRCQVQFYGLSENDEWTQDRAKPVTQIVSAEAWGRADCDVKLVEKSFETDTNLNFQNLSVIGFRILLLKVAGFNLLMTLRLWSS

SEQ ID NO: 43467 - protein, 670 aa, synthetic construct
MALPVTALLLPLALLLHAARPSYVLTQPPSVSVAPGQTARITCGGNNIGGKSVHWYQQPPGQAPVVVVYDDSDRPSGIPERFSGSNSGNTATLTISRVEAGDEAVYYCQVWDSSSDHVVFGGGTKLTVLLEDLKNVFPPEVAVFEPSEAEISHTQKATLVCLATGFYPDHVELSWWVNGKEVHSGVCTDPQPLKEQPALNDSRYCLSSRLRVSATFWQNPRNHFRCQVQFYGLSENDEWTQDRAKPVTQIVSAEAWGRADCDVKLVEKSFETDTNLNFQNLSVIGFRILLLKVAGFNLLMTLRLWSSRAKRSGSGATNFSLLKQAGDVEENPGPTSMDWIWRILFLVGAATGAHSGPEVAALEKEVAALEKEVAALEKEVAALEKGSGGGGSGGGGSGGGGSFEQLQLQESGPGLVKPSETLSLTCTVSGGSISSSSYFWGWIRQPPGKGLEWIGSIYYSGITYYNPSLKSRVTISVDTSKNQFSLKLSSVTAADTAVYYCARHDGAVAGLFDYWGQGTLVTVSSATRIQNPDPAVYQLRDSKSSDKSVCLFTDFDSQTNVSQSKDSDVYITDKCVLDMRSMDFKSNSAVAWSNKSDFACANAFNNSIIPEDTFFPSPESSCGFTSESYQQGVLSATILYEILLGKATLYAVLVSALVLMAMVKRKDSRG

SEQ ID NO: 43468 - protein, 674 aa, synthetic construct
MALPVTALLLPLALLLHAARPSYVLTQPPSVSVAPGQTARITCGGNNIGGKSVHWYQQPPGQAPVVVVYDDSDRPSGIPERFSGSNSGNTATLTISRVEAGDEAVYYCQVWDSSSDHVVFGGGTKLTVLLEIQNPDPAVYQLRDSKSSDKSVCLFTDFDSQTNVSQSKDSDVYITDKCVLDMRSMDFKSNSAVAWSNKSDFACANAFNNSIIPEDTFFPSPESSCGFTSESYQQGVLSATILYEILLGKATLYAVLVSALVLMAMVKRKDSRGRAKRSGSGVKQTLNFDLLKLAGDVESNPGPTSMDWIWRILFLVGAATGAHSGPEVAALEKEVAALEKEVAALEKEVAALEKGSGGGGSGGGGSGGGGSFEQLQLQESGPGLVKPSETLSLTCTVSGGSISSSSYFWGWIRQPPGKGLEWIGSIYYSGITYYNPSLKSRVTISVDTSKNQFSLKLSSVTAADTAVYYCARHDGAVAGLFDYWGQGTLVTVSSATREDLKNVFPPEVAVFEPSEAEISHTQKATLVCLATGFYPDHVELSWWVNGKEVHSGVCTDPQPLKEQPALNDSRYCLSSRLRVSATFWQNPRNHFRCQVQFYGLSENDEWTQDRAKPVTQIVSAEAWGRADCDVKLVEKSFETDTNLNFQNLSVIGFRILLLKVAGFNLLMTLRLWSS

SEQ ID NO: 43469 - protein, 760 aa, synthetic construct
MALPVTALLLPLALLLHAARPSYVLTQPPSVSVAPGQTARITCGGNNIGGKSVHWYQQPPGQAPVVVVYDDSDRPSGIPERFSGSNSGNTATLTISRVEAGDEAVYYCQVWDSSSDHVVFGGGTKLTVLLEDLKNVFPPEVAVFEPSEAEISHTQKATLVCLATGFYPDHVELSWWVNGKEVHSGVCTDPQPLKEQPALNDSRYCLSSRLRVSATFWQNPRNHFRCQVQFYGLSENDEWTQDRAKPVTQIVSAEAWGRADCDVKLVEKSFETDTNLNFQNLSVIGFRILLLKVAGFNLLMTLRLWSSRAKRSGSGATNFSLLKQAGDVEENPGPTSMDWIWRILFLVGAATGAHSGPQVQLQESGGGLAQAGGSLRLSCAASGRTFSMGWFRQAPGKEREFVAAITYSGGSPYYASSVRGRFTISRDNAKNTVYLQMNSLKPEDTAVYYCAANPTYGSDWNAENWGQGTQVTVSSGSGGGGSGGGGSGGGGSFEQLQLQESGPGLVKPSETLSLTCTVSGGSISSSSYFWGWIRQPPGKGLEWIGSIYYSGITYYNPSLKSRVTISVDTSKNQFSLKLSSVTAADTAVYYCARHDGAVAGLFDYWGQGTLVTVSSATRIQNPDPAVYQLRDSKSSDKSVCLFTDFDSQTNVSQSKDSDVYITDKCVLDMRSMDFKSNSAVAWSNKSDFACANAFNNSIIPEDTFFPSPESSCGFTSESYQQGVLSATILYEILLGKATLYAVLVSALVLMAMVKRKDSRG

SEQ ID NO: 43470 - protein, 764 aa, synthetic construct
MALPVTALLLPLALLLHAARPSYVLTQPPSVSVAPGQTARITCGGNNIGGKSVHWYQQPPGQAPVVVVYDDSDRPSGIPERFSGSNSGNTATLTISRVEAGDEAVYYCQVWDSSSDHVVFGGGTKLTVLLEIQNPDPAVYQLRDSKSSDKSVCLFTDFDSQTNVSQSKDSDVYITDKCVLDMRSMDFKSNSAVAWSNKSDFACANAFNNSIIPEDTFFPSPESSCGFTSESYQQGVLSATILYEILLGKATLYAVLVSALVLMAMVKRKDSRGRAKRSGSGVKQTLNFDLLKLAGDVESNPGPTSMDWIWRILFLVGAATGAHSGPQVQLQESGGGLAQAGGSLRLSCAASGRTFSMGWFRQAPGKEREFVAAITYSGGSPYYASSVRGRFTISRDNAKNTVYLQMNSLKPEDTAVYYCAANPTYGSDWNAENWGQGTQVTVSSGSGGGGSGGGGSGGGGSFEQLQLQESGPGLVKPSETLSLTCTVSGGSISSSSYFWGWIRQPPGKGLEWIGSIYYSGITYYNPSLKSRVTISVDTSKNQFSLKLSSVTAADTAVYYCARHDGAVAGLFDYWGQGTLVTVSSATREDLKNVFPPEVAVFEPSEAEISHTQKATLVCLATGFYPDHVELSWWVNGKEVHSGVCTDPQPLKEQPALNDSRYCLSSRLRVSATFWQNPRNHFRCQVQFYGLSENDEWTQDRAKPVTQIVSAEAWGRADCDVKLVEKSFETDTNLNFQNLSVIGFRILLLKVAGFNLLMTLRLWSS

SEQ ID NO: 43471 - protein, 766 aa, synthetic construct
MALPVTALLLPLALLLHAARPEVQLVESGGSLVQPGGSLRLSCAASGFTFDDYAMSWVRQVPGKGLEWVSSINWSGTHTDYADSVKGRFTISRNNANNTLYLQMNSLKSEDTAVYYCAKNWRDAGTTWFEKSGSAGQGTQVTVSSGTGGGGSGGGGSGGGGSEFSYVLTQPPSVSVAPGQTARITCGGNNIGGKSVHWYQQPPGQAPVVVVYDDSDRPSGIPERFSGSNSGNTATLTISRVEAGDEAVYYCQVWDSSSDHVVFGGGTKLTVLLEDLKNVFPPEVAVFEPSEAEISHTQKATLVCLATGFYPDHVELSWWVNGKEVHSGVCTDPQPLKEQPALNDSRYCLSSRLRVSATFWQNPRNHFRCQVQFYGLSENDEWTQDRAKPVTQIVSAEAWGRADCDVKLVEKSFETDTNLNFQNLSVIGFRILLLKVAGFNLLMTLRLWSSRAKRSGSGATNFSLLKQAGDVEENPGPTSMDWIWRILFLVGAATGAHSFEQLQLQESGPGLVKPSETLSLTCTVSGGSISSSSYFWGWIRQPPGKGLEWIGSIYYSGITYYNPSLKSRVTISVDTSKNQFSLKLSSVTAADTAVYYCARHDGAVAGLFDYWGQGTLVTVSSATRIQNPDPAVYQLRDSKSSDKSVCLFTDFDSQTNVSQSKDSDVYITDKCVLDMRSMDFKSNSAVAWSNKSDFACANAFNNSIIPEDTFFPSPESSCGFTSESYQQGVLSATILYEILLGKATLYAVLVSALVLMAMVKRKDSRG

SEQ ID NO: 43472 - protein, 770 aa, synthetic construct
MALPVTALLLPLALLLHAARPEVQLVESGGSLVQPGGSLRLSCAASGFTFDDYAMSWVRQVPGKGLEWVSSINWSGTHTDYADSVKGRFTISRNNANNTLYLQMNSLKSEDTAVYYCAKNWRDAGTTWFEKSGSAGQGTQVTVSSGTGGGGSGGGGSGGGGSEFSYVLTQPPSVSVAPGQTARITCGGNNIGGKSVHWYQQPPGQAPVVVVYDDSDRPSGIPERFSGSNSGNTATLTISRVEAGDEAVYYCQVWDSSSDHVVFGGGTKLTVLLEIQNPDPAVYQLRDSKSSDKSVCLFTDFDSQTNVSQSKDSDVYITDKCVLDMRSMDFKSNSAVAWSNKSDFACANAFNNSIIPEDTFFPSPESSCGFTSESYQQGVLSATILYEILLGKATLYAVLVSALVLMAMVKRKDSRGRAKRSGSGVKQTLNFDLLKLAGDVESNPGPTSMDWIWRILFLVGAATGAHSFEQLQLQESGPGLVKPSETLSLTCTVSGGSISSSSYFWGWIRQPPGKGLEWIGSIYYSGITYYNPSLKSRVTISVDTSKNQFSLKLSSVTAADTAVYYCARHDGAVAGLFDYWGQGTLVTVSSATREDLKNVFPPEVAVFEPSEAEISHTQKATLVCLATGFYPDHVELSWWVNGKEVHSGVCTDPQPLKEQPALNDSRYCLSSRLRVSATFWQNPRNHFRCQVQFYGLSENDEWTQDRAKPVTQIVSAEAWGRADCDVKLVEKSFETDTNLNFQNLSVIGFRILLLKVAGFNLLMTLRLWSS

SEQ ID NO: 43473 - protein, 764 aa, synthetic construct
MALPVTALLLPLALLLHAARPEVQLLESGGGLVQPGGSLRLSCAASGFIFSSYAMSWVRQAPGKGQEWVSGVSGTGVNTYYADSVKGRFTISRDNSKNTLYLQMNSLRAEDTAVYYCASGKGWDSGSWYEDYRGQGTLVTVSSGTGGGGSGGGGSGGGGSEFSYVLTQPPSVSVAPGQTARITCGGNNIGGKSVHWYQQPPGQAPVVVVYDDSDRPSGIPERFSGSNSGNTATLTISRVEAGDEAVYYCQVWDSSSDHVVFGGGTKLTVLLEDLKNVFPPEVAVFEPSEAEISHTQKATLVCLATGFYPDHVELSWWVNGKEVHSGVCTDPQPLKEQPALNDSRYCLSSRLRVSATFWQNPRNHFRCQVQFYGLSENDEWTQDRAKPVTQIVSAEAWGRADCDVKLVEKSFETDTNLNFQNLSVIGFRILLLKVAGFNLLMTLRLWSSRAKRSGSGATNFSLLKQAGDVEENPGPTSMDWIWRILFLVGAATGAHSFEQLQLQESGPGLVKPSETLSLTCTVSGGSISSSSYFWGWIRQPPGKGLEWIGSIYYSGITYYNPSLKSRVTISVDTSKNQFSLKLSSVTAADTAVYYCARHDGAVAGLFDYWGQGTLVTVSSATRIQNPDPAVYQLRDSKSSDKSVCLFTDFDSQTNVSQSKDSDVYITDKCVLDMRSMDFKSNSAVAWSNKSDFACANAFNNSIIPEDTFFPSPESSCGFTSESYQQGVLSATILYEILLGKATLYAVLVSALVLMAMVKRKDSRG

SEQ ID NO: 43474 - protein, 768 aa, synthetic construct
MALPVTALLLPLALLLHAARPEVQLLESGGGLVQPGGSLRLSCAASGFIFSSYAMSWVRQAPGKGQEWVSGVSGTGVNTYYADSVKGRFTISRDNSKNTLYLQMNSLRAEDTAVYYCASGKGWDSGSWYEDYRGQGTLVTVSSGTGGGGSGGGGSGGGGSEFSYVLTQPPSVSVAPGQTARITCGGNNIGGKSVHWYQQPPGQAPVVVVYDDSDRPSGIPERFSGSNSGNTATLTISRVEAGDEAVYYCQVWDSSSDHVVFGGGTKLTVLLEIQNPDPAVYQLRDSKSSDKSVCLFTDFDSQTNVSQSKDSDVYITDKCVLDMRSMDFKSNSAVAWSNKSDFACANAFNNSIIPEDTFFPSPESSCGFTSESYQQGVLSATILYEILLGKATLYAVLVSALVLMAMVKRKDSRGRAKRSGSGVKQTLNFDLLKLAGDVESNPGPTSMDWIWRILFLVGAATGAHSFEQLQLQESGPGLVKPSETLSLTCTVSGGSISSSSYFWGWIRQPPGKGLEWIGSIYYSGITYYNPSLKSRVTISVDTSKNQFSLKLSSVTAADTAVYYCARHDGAVAGLFDYWGQGTLVTVSSATREDLKNVFPPEVAVFEPSEAEISHTQKATLVCLATGFYPDHVELSWWVNGKEVHSGVCTDPQPLKEQPALNDSRYCLSSRLRVSATFWQNPRNHFRCQVQFYGLSENDEWTQDRAKPVTQIVSAEAWGRADCDVKLVEKSFETDTNLNFQNLSVIGFRILLLKVAGFNLLMTLRLWSS

SEQ ID NO: 43475 - protein, 732 aa, synthetic construct
MALPVTALLLPLALLLHAARPMLPAPKNLVVSRITEDSARLSWTAPDAAFDSFPIRYIETLIWGEAIWLDVPGSERSYDLTGLKPGTEYAVVITGVKGGRFSSPLVASFTTGTGGGGSGGGGSGGGGSEFSYVLTQPPSVSVAPGQTARITCGGNNIGGKSVHWYQQPPGQAPVVVVYDDSDRPSGIPERFSGSNSGNTATLTISRVEAGDEAVYYCQVWDSSSDHVVFGGGTKLTVLLEDLKNVFPPEVAVFEPSEAEISHTQKATLVCLATGFYPDHVELSWWVNGKEVHSGVCTDPQPLKEQPALNDSRYCLSSRLRVSATFWQNPRNHFRCQVQFYGLSENDEWTQDRAKPVTQIVSAEAWGRADCDVKLVEKSFETDTNLNFQNLSVIGFRILLLKVAGFNLLMTLRLWSSRAKRSGSGATNFSLLKQAGDVEENPGPTSMDWIWRILFLVGAATGAHSFEQLQLQESGPGLVKPSETLSLTCTVSGGSISSSSYFWGWIRQPPGKGLEWIGSIYYSGITYYNPSLKSRVTISVDTSKNQFSLKLSSVTAADTAVYYCARHDGAVAGLFDYWGQGTLVTVSSATRIQNPDPAVYQLRDSKSSDKSVCLFTDFDSQTNVSQSKDSDVYITDKCVLDMRSMDFKSNSAVAWSNKSDFACANAFNNSIIPEDTFFPSPESSCGFTSESYQQGVLSATILYEILLGKATLYAVLVSALVLMAMVKRKDSRG

SEQ ID NO: 43476 - protein, 736 aa, synthetic construct
MALPVTALLLPLALLLHAARPMLPAPKNLVVSRITEDSARLSWTAPDAAFDSFPIRYIETLIWGEAIWLDVPGSERSYDLTGLKPGTEYAVVITGVKGGRFSSPLVASFTTGTGGGGSGGGGSGGGGSEFSYVLTQPPSVSVAPGQTARITCGGNNIGGKSVHWYQQPPGQAPVVVVYDDSDRPSGIPERFSGSNSGNTATLTISRVEAGDEAVYYCQVWDSSSDHVVFGGGTKLTVLLEIQNPDPAVYQLRDSKSSDKSVCLFTDFDSQTNVSQSKDSDVYITDKCVLDMRSMDFKSNSAVAWSNKSDFACANAFNNSIIPEDTFFPSPESSCGFTSESYQQGVLSATILYEILLGKATLYAVLVSALVLMAMVKRKDSRGRAKRSGSGVKQTLNFDLLKLAGDVESNPGPTSMDWIWRILFLVGAATGAHSFEQLQLQESGPGLVKPSETLSLTCTVSGGSISSSSYFWGWIRQPPGKGLEWIGSIYYSGITYYNPSLKSRVTISVDTSKNQFSLKLSSVTAADTAVYYCARHDGAVAGLFDYWGQGTLVTVSSATREDLKNVFPPEVAVFEPSEAEISHTQKATLVCLATGFYPDHVELSWWVNGKEVHSGVCTDPQPLKEQPALNDSRYCLSSRLRVSATFWQNPRNHFRCQVQFYGLSENDEWTQDRAKPVTQIVSAEAWGRADCDVKLVEKSFETDTNLNFQNLSVIGFRILLLKVAGFNLLMTLRLWSS

SEQ ID NO: 43477 - protein, 761 aa, synthetic construct
MALPVTALLLPLALLLHAARPEVQLVESGGGLVQPGGSLRLSCAASGFNIKDTCIGWVRRAPGKEEELVAKICKYSGHTRYADSVKGRFTISADTSKNTAYLQMNSLRAEDTAVYYCAAVSVRDGHYNYWGQGTTVTVSSGTGGGGSGGGGSGGGGSEFSYVLTQPPSVSVAPGQTARITCGGNNIGGKSVHWYQQPPGQAPVVVVYDDSDRPSGIPERFSGSNSGNTATLTISRVEAGDEAVYYCQVWDSSSDHVVFGGGTKLTVLLEDLKNVFPPEVAVFEPSEAEISHTQKATLVCLATGFYPDHVELSWWVNGKEVHSGVCTDPQPLKEQPALNDSRYCLSSRLRVSATFWQNPRNHFRCQVQFYGLSENDEWTQDRAKPVTQIVSAEAWGRADCDVKLVEKSFETDTNLNFQNLSVIGFRILLLKVAGFNLLMTLRLWSSRAKRSGSGATNFSLLKQAGDVEENPGPTSMDWIWRILFLVGAATGAHSFEQLQLQESGPGLVKPSETLSLTCTVSGGSISSSSYFWGWIRQPPGKGLEWIGSIYYSGITYYNPSLKSRVTISVDTSKNQFSLKLSSVTAADTAVYYCARHDGAVAGLFDYWGQGTLVTVSSATRIQNPDPAVYQLRDSKSSDKSVCLFTDFDSQTNVSQSKDSDVYITDKCVLDMRSMDFKSNSAVAWSNKSDFACANAFNNSIIPEDTFFPSPESSCGFTSESYQQGVLSATILYEILLGKATLYAVLVSALVLMAMVKRKDSRG

SEQ ID NO: 43478 - protein, 765 aa, synthetic construct
MALPVTALLLPLALLLHAARPEVQLVESGGGLVQPGGSLRLSCAASGFNIKDTCIGWVRRAPGKEEELVAKICKYSGHTRYADSVKGRFTISADTSKNTAYLQMNSLRAEDTAVYYCAAVSVRDGHYNYWGQGTTVTVSSGTGGGGSGGGGSGGGGSEFSYVLTQPPSVSVAPGQTARITCGGNNIGGKSVHWYQQPPGQAPVVVVYDDSDRPSGIPERFSGSNSGNTATLTISRVEAGDEAVYYCQVWDSSSDHVVFGGGTKLTVLLEIQNPDPAVYQLRDSKSSDKSVCLFTDFDSQTNVSQSKDSDVYITDKCVLDMRSMDFKSNSAVAWSNKSDFACANAFNNSIIPEDTFFPSPESSCGFTSESYQQGVLSATILYEILLGKATLYAVLVSALVLMAMVKRKDSRGRAKRSGSGVKQTLNFDLLKLAGDVESNPGPTSMDWIWRILFLVGAATGAHSFEQLQLQESGPGLVKPSETLSLTCTVSGGSISSSSYFWGWIRQPPGKGLEWIGSIYYSGITYYNPSLKSRVTISVDTSKNQFSLKLSSVTAADTAVYYCARHDGAVAGLFDYWGQGTLVTVSSATREDLKNVFPPEVAVFEPSEAEISHTQKATLVCLATGFYPDHVELSWWVNGKEVHSGVCTDPQPLKEQPALNDSRYCLSSRLRVSATFWQNPRNHFRCQVQFYGLSENDEWTQDRAKPVTQIVSAEAWGRADCDVKLVEKSFETDTNLNFQNLSVIGFRILLLKVAGFNLLMTLRLWSS

SEQ ID NO: 43479 - protein, 1132 aa, synthetic construct
MALPVTALLLPLALLLHAARPEVQLVESGGGLVQAGGSLRLSCAASGRTFSMGWFRQAPGKEREFVAAITYSGGSPYYADSVKGRFTISRDNAKNTVYLQMNSLKPEDTAVYYCAANPTYGSDWNAENWGQGTQVTVSSGTGGGGSGGGGSGGGGSEFSYVLTQPPSVSVAPGQTARITCGGNNIGGKSVHWYQQPPGQAPVVVVYDDSDRPSGIPERFSGSNSGNTATLTISRVEAGDEAVYYCQVWDSSSDHVVFGGGTKLTVLLEDLKNVFPPEVAVFEPSEAEISHTQKATLVCLATGFYPDHVELSWWVNGKEVHSGVCTDPQPLKEQPALNDSRYCLSSRLRVSATFWQNPRNHFRCQVQFYGLSENDEWTQDRAKPVTQIVSAEAWGRADCDVKLVEKSFETDTNLNFQNLSVIGFRILLLKVAGFNLLMTLRLWSSRAKRSGSGATNFSLLKQAGDVEENPGPTSATMDWIWRILFLVGAATGAHSGPEVQLVESGGGLVQAGGSLRLSCAASGRTFTMGWFRQAPGKEREFVAAISLSPTLAYYADSVKGRFTISRDNAKNTVVLQMNSLKPEDTALYYCAADRKSVMSIRPDYWGQGTQVTVSSGSGGGGSGGGGSGGGGSFEQLQLQESGPGLVKPSETLSLTCTVSGGSISSSSYFWGWIRQPPGKGLEWIGSIYYSGITYYNPSLKSRVTISVDTSKNQFSLKLSSVTAADTAVYYCARHDGAVAGLFDYWGQGTLVTVSSATRIQNPDPAVYQLRDSKSSDKSVCLFTDFDSQTNVSQSKDSDVYITDKCVLDMRSMDFKSNSAVAWSNKSDFACANAFNNSIIPEDTFFPSPESSCGFTSESYQQGVLSATILYEILLGKATLYAVLVSALVLMAMVKRKDSRGRAKRSGSGVKQTLNFDLLKLAGDVESNPGPSRGHMTEYKPTVRLATRDDVPRAVRTLAAAFADYPATRHTVDPDRHIERVTELQELFLTRVGLDIGKVWVADDGAAVAVWTTPESVEAGAVFAEIGPRMAELSGSRLAAQQQMEGLLAPHRPKEPAWFLATVGVSPDHQGKGLGSAVVLPGVEAAERAGVPAFLETSAPRNLPFYERLGFTVTADVEVPEGPRTWCMTRKPGA

SEQ ID NO: 43480 - protein, 770 aa, synthetic construct
MALPVTALLLPLALLLHAARPEVQLVESGGGLVQPGGSLRLSCAASGFASDYYIIGWFRQAPGKEREGVSCISSRYANTNYADSVKGRFTISRDNAKNTVYLQMNSLKPEDTAVYYCAADTRRYTCPDIATMHRNFDSWGQGTLVTVSSGTGGGGSGGGGSGGGGSEFSYVLTQPPSVSVAPGQTARITCGGNNIGGKSVHWYQQPPGQAPVVVVYDDSDRPSGIPERFSGSNSGNTATLTISRVEAGDEAVYYCQVWDSSSDHVVFGGGTKLTVLLEDLKNVFPPEVAVFEPSEAEISHTQKATLVCLATGFYPDHVELSWWVNGKEVHSGVCTDPQPLKEQPALNDSRYCLSSRLRVSATFWQNPRNHFRCQVQFYGLSENDEWTQDRAKPVTQIVSAEAWGRADCDVKLVEKSFETDTNLNFQNLSVIGFRILLLKVAGFNLLMTLRLWSSRAKRSGSGATNFSLLKQAGDVEENPGPTSMDWIWRILFLVGAATGAHSFEQLQLQESGPGLVKPSETLSLTCTVSGGSISSSSYFWGWIRQPPGKGLEWIGSIYYSGITYYNPSLKSRVTISVDTSKNQFSLKLSSVTAADTAVYYCARHDGAVAGLFDYWGQGTLVTVSSATRIQNPDPAVYQLRDSKSSDKSVCLFTDFDSQTNVSQSKDSDVYITDKCVLDMRSMDFKSNSAVAWSNKSDFACANAFNNSIIPEDTFFPSPESSCGFTSESYQQGVLSATILYEILLGKATLYAVLVSALVLMAMVKRKDSRG

SEQ ID NO: 43481 - protein, 770 aa, synthetic construct
MALPVTALLLPLALLLHAARPEVQLVESGGGLVQPGGSLRLSCEASGFASDDYIIGWFRQAPGKEREGVSCISSKYANTVYTDSVKGRFRLSRGTAKNTVYLQMSALKPEDTAVYYCAMDSRRVTCPEISTMHRNFDSWGQGTLVTVSSGTGGGGSGGGGSGGGGSEFSYVLTQPPSVSVAPGQTARITCGGNNIGGKSVHWYQQPPGQAPVVVVYDDSDRPSGIPERFSGSNSGNTATLTISRVEAGDEAVYYCQVWDSSSDHVVFGGGTKLTVLLEDLKNVFPPEVAVFEPSEAEISHTQKATLVCLATGFYPDHVELSWWVNGKEVHSGVCTDPQPLKEQPALNDSRYCLSSRLRVSATFWQNPRNHFRCQVQFYGLSENDEWTQDRAKPVTQIVSAEAWGRADCDVKLVEKSFETDTNLNFQNLSVIGFRILLLKVAGFNLLMTLRLWSSRAKRSGSGATNFSLLKQAGDVEENPGPTSMDWIWRILFLVGAATGAHSFEQLQLQESGPGLVKPSETLSLTCTVSGGSISSSSYFWGWIRQPPGKGLEWIGSIYYSGITYYNPSLKSRVTISVDTSKNQFSLKLSSVTAADTAVYYCARHDGAVAGLFDYWGQGTLVTVSSATRIQNPDPAVYQLRDSKSSDKSVCLFTDFDSQTNVSQSKDSDVYITDKCVLDMRSMDFKSNSAVAWSNKSDFACANAFNNSIIPEDTFFPSPESSCGFTSESYQQGVLSATILYEILLGKATLYAVLVSALVLMAMVKRKDSRG

SEQ ID NO: 43482 - protein, 770 aa, synthetic construct
MALPVTALLLPLALLLHAARPEVQLVESGGGLVQPGGSLRLSCAASGFASDYYIIGWFRQAPGKEREGVSCISSRYANTNYADSVKGRFTISRDNAKNTVYLQMNSLKPEDTAVYYCAADTRRYTCPDIATMHRNFDSWGQGTLVTVSSGTGGGGSGGGGSGGGGSEFSYVLTQPPSVSVAPGQTARITCGGNNIGGKSVHWYQQPPGQAPVVVVYDDSDRPSGIPERFSGSNSGNTATLTISRVEAGDEAVYYCQVWDSSSDHVVFGGGTKLTVLLEIQNPDPAVYQLRDSKSSDKSVCLFTDFDSQTNVSQSKDSDVYITDKCVLDMRSMDFKSNSAVAWSNKSDFACANAFNNSIIPEDTFFPSPESSCGFTSESYQQGVLSATILYEILLGKATLYAVLVSALVLMAMVKRKDSRGRAKRSGSGATNFSLLKQAGDVEENPGPTSMDWIWRILFLVGAATGAHSFEQLQLQESGPGLVKPSETLSLTCTVSGGSISSSSYFWGWIRQPPGKGLEWIGSIYYSGITYYNPSLKSRVTISVDTSKNQFSLKLSSVTAADTAVYYCARHDGAVAGLFDYWGQGTLVTVSSATRDLKNVFPPEVAVFEPSEAEISHTQKATLVCLATGFYPDHVELSWWVNGKEVHSGVCTDPQPLKEQPALNDSRYCLSSRLRVSATFWQNPRNHFRCQVQFYGLSENDEWTQDRAKPVTQIVSAEAWGRADCDVKLVEKSFETDTNLNFQNLSVIGFRILLLKVAGFNLLMTLRLWSS

SEQ ID NO: 43483 - protein, 770 aa, synthetic construct
MALPVTALLLPLALLLHAARPEVQLVESGGGLVQPGGSLRLSCEASGFASDDYIIGWFRQAPGKEREGVSCISSKYANTVYTDSVKGRFRLSRGTAKNTVYLQMSALKPEDTAVYYCAMDSRRVTCPEISTMHRNFDSWGQGTLVTVSSGTGGGGSGGGGSGGGGSEFSYVLTQPPSVSVAPGQTARITCGGNNIGGKSVHWYQQPPGQAPVVVVYDDSDRPSGIPERFSGSNSGNTATLTISRVEAGDEAVYYCQVWDSSSDHVVFGGGTKLTVLLEIQNPDPAVYQLRDSKSSDKSVCLFTDFDSQTNVSQSKDSDVYITDKCVLDMRSMDFKSNSAVAWSNKSDFACANAFNNSIIPEDTFFPSPESSCGFTSESYQQGVLSATILYEILLGKATLYAVLVSALVLMAMVKRKDSRGRAKRSGSGATNFSLLKQAGDVEENPGPTSMDWIWRILFLVGAATGAHSFEQLQLQESGPGLVKPSETLSLTCTVSGGSISSSSYFWGWIRQPPGKGLEWIGSIYYSGITYYNPSLKSRVTISVDTSKNQFSLKLSSVTAADTAVYYCARHDGAVAGLFDYWGQGTLVTVSSATRDLKNVFPPEVAVFEPSEAEISHTQKATLVCLATGFYPDHVELSWWVNGKEVHSGVCTDPQPLKEQPALNDSRYCLSSRLRVSATFWQNPRNHFRCQVQFYGLSENDEWTQDRAKPVTQIVSAEAWGRADCDVKLVEKSFETDTNLNFQNLSVIGFRILLLKVAGFNLLMTLRLWSS

SEQ ID NO: 43484 - protein, 761 aa, synthetic construct
MALPVTALLLPLALLLHAARPQVKLEESGGGLVQPGESLRLSCSASGSIFKVFRVFAMSWYRQGPGKQRELVASISSGETTTYAESVKGRFTISRDNAKNTAYLQMDSLKPEDTAVYYCNADHTFTGDFWGQGTQVTVSSGTGGGGSGGGGSGGGGSEFSYVLTQPPSVSVAPGQTARITCGGNNIGGKSVHWYQQPPGQAPVVVVYDDSDRPSGIPERFSGSNSGNTATLTISRVEAGDEAVYYCQVWDSSSDHVVFGGGTKLTVLLEIQNPDPAVYQLRDSKSSDKSVCLFTDFDSQTNVSQSKDSDVYITDKCVLDMRSMDFKSNSAVAWSNKSDFACANAFNNSIIPEDTFFPSPESSCGFTSESYQQGVLSATILYEILLGKATLYAVLVSALVLMAMVKRKDSRGRAKRSGSGATNFSLLKQAGDVEENPGPTSMDWIWRILFLVGAATGAHSFEQLQLQESGPGLVKPSETLSLTCTVSGGSISSSSYFWGWIRQPPGKGLEWIGSIYYSGITYYNPSLKSRVTISVDTSKNQFSLKLSSVTAADTAVYYCARHDGAVAGLFDYWGQGTLVTVSSATRDLKNVFPPEVAVFEPSEAEISHTQKATLVCLATGFYPDHVELSWWVNGKEVHSGVCTDPQPLKEQPALNDSRYCLSSRLRVSATFWQNPRNHFRCQVQFYGLSENDEWTQDRAKPVTQIVSAEAWGRADCDVKLVEKSFETDTNLNFQNLSVIGFRILLLKVAGFNLLMTLRLWSS

SEQ ID NO: 43485 - protein, 762 aa, synthetic construct
MALPVTALLLPLALLLHAARPSYVLTQPPSVSVAPGQTARITCGGNNIGGKSVHWYQQPPGQAPVVVVYDDSDRPSGIPERFSGSNSGNTATLTISRVEAGDEAVYYCQVWDSSSDHVVFGGGTKLTVLLEDLKNVFPPEVAVFEPSEAEISHTQKATLVCLATGFYPDHVELSWWVNGKEVHSGVCTDPQPLKEQPALNDSRYCLSSRLRVSATFWQNPRNHFRCQVQFYGLSENDEWTQDRAKPVTQIVSAEAWGRADCDVKLVEKSFETDTNLNFQNLSVIGFRILLLKVAGFNLLMTLRLWSSRAKRSGSGATNFSLLKQAGDVEENPGPTSATMDWIWRILFLVGAATGAHSGPEVQLVESGGGLVQAGGSLRLSCAASGRTFSMGWFRQAPGKEREFVAAITYSGGSPYYADSVKGRFTISRDNAKNTVYLQMNSLKPEDTAVYYCAANPTYGSDWNAENWGQGTQVTVSSGSGGGGSGGGGSGGGGSFEQLQLQESGPGLVKPSETLSLTCTVSGGSISSSSYFWGWIRQPPGKGLEWIGSIYYSGITYYNPSLKSRVTISVDTSKNQFSLKLSSVTAADTAVYYCARHDGAVAGLFDYWGQGTLVTVSSATRIQNPDPAVYQLRDSKSSDKSVCLFTDFDSQTNVSQSKDSDVYITDKCVLDMRSMDFKSNSAVAWSNKSDFACANAFNNSIIPEDTFFPSPESSCGFTSESYQQGVLSATILYEILLGKATLYAVLVSALVLMAMVKRKDSRG

SEQ ID NO: 43486 - protein, 763 aa, synthetic construct
MALPVTALLLPLALLLHAARPSYVLTQPPSVSVAPGQTARITCGGNNIGGKSVHWYQQPPGQAPVVVVYDDSDRPSGIPERFSGSNSGNTATLTISRVEAGDEAVYYCQVWDSSSDHVVFGGGTKLTVLLEDLKNVFPPEVAVFEPSEAEISHTQKATLVCLATGFYPDHVELSWWVNGKEVHSGVCTDPQPLKEQPALNDSRYCLSSRLRVSATFWQNPRNHFRCQVQFYGLSENDEWTQDRAKPVTQIVSAEAWGRADCDVKLVEKSFETDTNLNFQNLSVIGFRILLLKVAGFNLLMTLRLWSSRAKRSGSGATNFSLLKQAGDVEENPGPTSATMDWIWRILFLVGAATGAHSGPEVQLVESGGGLVQPGGSLRLSCAASGSIFGFNDMAWYRQAPGKQRELVALISRVGVTSSADSVKGRFTISRVNAKDTVYLQMNSLKPEDTAVYYCYMDQRLDGSTLAYWGQGTQVTVSSGSGGGGSGGGGSGGGGSFEQLQLQESGPGLVKPSETLSLTCTVSGGSISSSSYFWGWIRQPPGKGLEWIGSIYYSGITYYNPSLKSRVTISVDTSKNQFSLKLSSVTAADTAVYYCARHDGAVAGLFDYWGQGTLVTVSSATRIQNPDPAVYQLRDSKSSDKSVCLFTDFDSQTNVSQSKDSDVYITDKCVLDMRSMDFKSNSAVAWSNKSDFACANAFNNSIIPEDTFFPSPESSCGFTSESYQQGVLSATILYEILLGKATLYAVLVSALVLMAMVKRKDSRG

SEQ ID NO: 43487 - protein, 759 aa, synthetic construct
MALPVTALLLPLALLLHAARPSYVLTQPPSVSVAPGQTARITCGGNNIGGKSVHWYQQPPGQAPVVVVYDDSDRPSGIPERFSGSNSGNTATLTISRVEAGDEAVYYCQVWDSSSDHVVFGGGTKLTVLLEDLKNVFPPEVAVFEPSEAEISHTQKATLVCLATGFYPDHVELSWWVNGKEVHSGVCTDPQPLKEQPALNDSRYCLSSRLRVSATFWQNPRNHFRCQVQFYGLSENDEWTQDRAKPVTQIVSAEAWGRADCDVKLVEKSFETDTNLNFQNLSVIGFRILLLKVAGFNLLMTLRLWSSRAKRSGSGATNFSLLKQAGDVEENPGPTSATMDWIWRILFLVGAATGAHSGPEVQLVESGGGLVQAGGSLRLSCAASGSVFSGNVMGWYRQAPGKEREWVAAIASGGSIYYRDSVKGRFTISRDNAKNTVYLQMNSLKPEDTAVYYCNSHPPTLPYWGLGTQVTVSSGSGGGGSGGGGSGGGGSFEQLQLQESGPGLVKPSETLSLTCTVSGGSISSSSYFWGWIRQPPGKGLEWIGSIYYSGITYYNPSLKSRVTISVDTSKNQFSLKLSSVTAADTAVYYCARHDGAVAGLFDYWGQGTLVTVSSATRIQNPDPAVYQLRDSKSSDKSVCLFTDFDSQTNVSQSKDSDVYITDKCVLDMRSMDFKSNSAVAWSNKSDFACANAFNNSIIPEDTFFPSPESSCGFTSESYQQGVLSATILYEILLGKATLYAVLVSALVLMAMVKRKDSRG

SEQ ID NO: 43488 - protein, 757 aa, synthetic construct
MALPVTALLLPLALLLHAARPSYVLTQPPSVSVAPGQTARITCGGNNIGGKSVHWYQQPPGQAPVVVVYDDSDRPSGIPERFSGSNSGNTATLTISRVEAGDEAVYYCQVWDSSSDHVVFGGGTKLTVLLEDLKNVFPPEVAVFEPSEAEISHTQKATLVCLATGFYPDHVELSWWVNGKEVHSGVCTDPQPLKEQPALNDSRYCLSSRLRVSATFWQNPRNHFRCQVQFYGLSENDEWTQDRAKPVTQIVSAEAWGRADCDVKLVEKSFETDTNLNFQNLSVIGFRILLLKVAGFNLLMTLRLWSSRAKRSGSGATNFSLLKQAGDVEENPGPTSATMDWIWRILFLVGAATGAHSGPEVQLLESGGGLVQPGGSLRLSCAASGFSFSSYALSWVRQAPGKGLEWVSSIGENDGTTDYADAVKGRFTISRDNSKNTLYLQMNSLRVEDTAVYYCVKDGIHWGQGTLVTVSSGSGGGGSGGGGSGGGGSFEQLQLQESGPGLVKPSETLSLTCTVSGGSISSSSYFWGWIRQPPGKGLEWIGSIYYSGITYYNPSLKSRVTISVDTSKNQFSLKLSSVTAADTAVYYCARHDGAVAGLFDYWGQGTLVTVSSATRIQNPDPAVYQLRDSKSSDKSVCLFTDFDSQTNVSQSKDSDVYITDKCVLDMRSMDFKSNSAVAWSNKSDFACANAFNNSIIPEDTFFPSPESSCGFTSESYQQGVLSATILYEILLGKATLYAVLVSALVLMAMVKRKDSRG

SEQ ID NO: 43489 - protein, 1126 aa, synthetic construct
MGPRLLFWALLCLLGTGPVEAGVTQSPTHLIKTRGQQATLRCSPISGHTSVYWYQQALGLGLQFLLWYDEGEERNRGNFPPRFSGRQFPNYSSELNVNALELEDSALYLCASSLGGPRGLAGLRGDEQFFGPGTRLTVLEGTGGGGSGGGEFSYVLTQPPSVSVAPGQTARITCGGNNIGGKSVHWYQQPPGQAPVVVVYDDSDRPSGIPERFSGSNSGNTATLTISRVEAGDEAVYYCQVWDSSSDHVVFGGGTKLTVLLEDLKNVFPPEVAVFEPSEAEISHTQKATLVCLATGFYPDHVELSWWVNGKEVHSGVCTDPQPLKEQPALNDSRYCLSSRLRVSATFWQNPRNHFRCQVQFYGLSENDEWTQDRAKPVTQIVSAEAWGRADCDVKLVEKSFETDTNLNFQNLSVIGFRILLLKVAGFNLLMTLRLWSSRAKRSGSGATNFSLLKQAGDVEENPGPTSATMDWIWRILFLVGAATGAHSGPEVQLVESGGGLVQAGGSLRLSCAASGRTFSMGWFRQAPGKEREFVAAITYSGGSPYYADSVKGRFTISRDNAKNTVYLQMNSLKPEDTAVYYCAANPTYGSDWNAENWGQGTQVTVSSGSGGGGSGGGGSGGGGSFEQLQLQESGPGLVKPSETLSLTCTVSGGSISSSSYFWGWIRQPPGKGLEWIGSIYYSGITYYNPSLKSRVTISVDTSKNQFSLKLSSVTAADTAVYYCARHDGAVAGLFDYWGQGTLVTVSSATRIQNPDPAVYQLRDSKSSDKSVCLFTDFDSQTNVSQSKDSDVYITDKCVLDMRSMDFKSNSAVAWSNKSDFACANAFNNSIIPEDTFFPSPESSCGFTSESYQQGVLSATILYEILLGKATLYAVLVSALVLMAMVKRKDSRGRAKRSGSGVKQTLNFDLLKLAGDVESNPGPSRGHMTEYKPTVRLATRDDVPRAVRTLAAAFADYPATRHTVDPDRHIERVTELQELFLTRVGLDIGKVWVADDGAAVAVWTTPESVEAGAVFAEIGPRMAELSGSRLAAQQQMEGLLAPHRPKEPAWFLATVGVSPDHQGKGLGSAVVLPGVEAAERAGVPAFLETSAPRNLPFYERLGFTVTADVEVPEGPRTWCMTRKPGA

SEQ ID NO: 43490 - protein, 1125 aa, synthetic construct
MGPRLLFWALLCLLGTGPVEAGVTQSPTHLIKTRGQQATLRCSPISGHTSVYWYQQALGLGLQFLLWYDEGEERNRGNFPPRFSGRQFPNYSSELNVNALELEDSALYLCASSLGGDELGADGNEQFFGPGTRLTVLEGTGGGGSGGGSEFSYVLTQPPSVSVAPGQTARITCGGNNIGGKSVHWYQQPPGQAPVVVVYDDSDRPSGIPERFSGSNSGNTATLTISRVEAGDEAVYYCQVWDSSSDHVVFGGGTKLTVLLEDLKNVFPPEVAVFEPSEAEISHTQKATLVCLATGFYPDHVELSWWVNGKEVHSGVCTDPQPLKEQPALNDSRYCLSSRLRVSATFWQNPRNHFRCQVQFYGLSENDEWTQDRAKPVTQIVSAEAWGRADCDVKLVEKSFETDTNLNFQNLSVIGFRILLLKVAGFNLLMTLRLWSSRAKRSGSGATNFSLLKQAGDVEENPGPTSATMDWIWRILFLVGAATGAHSGPEVQLVESGGGLVQAGGSLRLSCAASGRTFSMGWFRQAPGKEREFVAAITYSGGSPYYADSVKGRFTISRDNAKNTVYLQMNSLKPEDTAVYYCAANPTYGSDWNAENWGQGTQVTVSSGSGGGGSGGGGSGGGGSFEQLQLQESGPGLVKPSETLSLTCTVSGGSISSSSYFWGWIRQPPGKGLEWIGSIYYSGITYYNPSLKSRVTISVDTSKNQFSLKLSSVTAADTAVYYCARHDGAVAGLFDYWGQGTLVTVSSATRIQNPDPAVYQLRDSKSSDKSVCLFTDFDSQTNVSQSKDSDVYITDKCVLDMRSMDFKSNSAVAWSNKSDFACANAFNNSIIPEDTFFPSPESSCGFTSESYQQGVLSATILYEILLGKATLYAVLVSALVLMAMVKRKDSRGRAKRSGSGVKQTLNFDLLKLAGDVESNPGPSRGHMTEYKPTVRLATRDDVPRAVRTLAAAFADYPATRHTVDPDRHIERVTELQELFLTRVGLDIGKVWVADDGAAVAVWTTPESVEAGAVFAEIGPRMAELSGSRLAAQQQMEGLLAPHRPKEPAWFLATVGVSPDHQGKGLGSAVVLPGVEAAERAGVPAFLETSAPRNLPFYERLGFTVTADVEVPEGPRTWCMTRKPGA

SEQ ID NO: 43491 - protein, 950 aa, synthetic construct
MALPVTALLLPLALLLHAARPSYVLTQPPSVSVAPGQTARITCGGNNIGGKSVHWYQQPPGQAPVVVVYDDSDRPSGIPERFSGSNSGNTATLTISRVEAGDEAVYYCQVWDSSSDHVVFGGGTKLTVLLEDLKNVFPPEVAVFEPSEAEISHTQKATLVCLATGFYPDHVELSWWVNGKEVHSGVCTDPQPLKEQPALNDSRYCLSSRLRVSATFWQNPRNHFRCQVQFYGLSENDEWTQDRAKPVTQIVSAEAWGRADCDVKLVEKSFETDTNLNFQNLSVIGFRILLLKVAGFNLLMTLRLWSSRAKRSGSGATNFSLLKQAGDVEENPGPTSATMDWIWRILFLVGAATGAHSGPMGSWLEFYHRLNAIDSRLWALGGSEAELAAFEKEIAAFESELQAYKGKGNPEVESLRDHAAHIREWLQAYRHNGSGGGGSGGGGSGGGGSFEQLQLQESGPGLVKPSETLSLTCTVSGGSISSSSYFWGWIRQPPGKGLEWIGSIYYSGITYYNPSLKSRVTISVDTSKNQFSLKLSSVTAADTAVYYCARHDGAVAGLFDYWGQGTLVTVSSATRIQNPDPAVYQLRDSKSSDKSVCLFTDFDSQTNVSQSKDSDVYITDKCVLDMRSMDFKSNSAVAWSNKSDFACANAFNNSIIPEDTFFPSPESSCGFTSESYQQGVLSATILYEILLGKATLYAVLVSALVLMAMVKRKDSRGRAKRSGSGVKQTLNFDLLKLAGDVESNPGPSRGHMTEYKPTVRLATRDDVPRAVRTLAAAFADYPATRHTVDPDRHIERVTELQELFLTRVGLDIGKVWVADDGAAVAVWTTPESVEAGAVFAEIGPRMAELSGSRLAAQQQMEGLLAPHRPKEPAWFLATVGVSPDHQGKGLGSAVVLPGVEAAERAGVPAFLETSAPRNLPFYERLGFTVTADVEVPEGPRTWCMTRKPGA

SEQ ID NO: 43492 - protein, 950 aa, synthetic construct
MALPVTALLLPLALLLHAARPACMGSWFEFYDRLNAIDARLWALGGSEAELAAFEKEIAAFESELQAYKGKGNPEVENLRVHAAAIREWLQAYRHNGTGGGGSGGGGSGGGGSEFSYVLTQPPSVSVAPGQTARITCGGNNIGGKSVHWYQQPPGQAPVVVVYDDSDRPSGIPERFSGSNSGNTATLTISRVEAGDEAVYYCQVWDSSSDHVVFGGGTKLTVLLEDLKNVFPPEVAVFEPSEAEISHTQKATLVCLATGFYPDHVELSWWVNGKEVHSGVCTDPQPLKEQPALNDSRYCLSSRLRVSATFWQNPRNHFRCQVQFYGLSENDEWTQDRAKPVTQIVSAEAWGRADCDVKLVEKSFETDTNLNFQNLSVIGFRILLLKVAGFNLLMTLRLWSSRAKRSGSGATNFSLLKQAGDVEENPGPTSMDWIWRILFLVGAATGAHSFEQLQLQESGPGLVKPSETLSLTCTVSGGSISSSSYFWGWIRQPPGKGLEWIGSIYYSGITYYNPSLKSRVTISVDTSKNQFSLKLSSVTAADTAVYYCARHDGAVAGLFDYWGQGTLVTVSSATRIQNPDPAVYQLRDSKSSDKSVCLFTDFDSQTNVSQSKDSDVYITDKCVLDMRSMDFKSNSAVAWSNKSDFACANAFNNSIIPEDTFFPSPESSCGFTSESYQQGVLSATILYEILLGKATLYAVLVSALVLMAMVKRKDSRGRAKRSGSGVKQTLNFDLLKLAGDVESNPGPSRGHMTEYKPTVRLATRDDVPRAVRTLAAAFADYPATRHTVDPDRHIERVTELQELFLTRVGLDIGKVWVADDGAAVAVWTTPESVEAGAVFAEIGPRMAELSGSRLAAQQQMEGLLAPHRPKEPAWFLATVGVSPDHQGKGLGSAVVLPGVEAAERAGVPAFLETSAPRNLPFYERLGFTVTADVEVPEGPRTWCMTRKPGA

SEQ ID NO: 43493 - protein, 1067 aa, synthetic construct
MALPVTALLLPLALLLHAARPACMDPDLEIRAAFLRQRNTALRTEVAELEQEVQRLENEVSQYETRYGPLGGGKGTGGGGSGGGGSGGGGSEFSYVLTQPPSVSVAPGQTARITCGGNNIGGKSVHWYQQPPGQAPVVVVYDDSDRPSGIPERFSGSNSGNTATLTISRVEAGDEAVYYCQVWDSSSDHVVFGGGTKLTVLLEDLKNVFPPEVAVFEPSEAEISHTQKATLVCLATGFYPDHVELSWWVNGKEVHSGVCTDPQPLKEQPALNDSRYCLSSRLRVSATFWQNPRNHFRCQVQFYGLSENDEWTQDRAKPVTQIVSAEAWGRADCDVKLVEKSFETDTNLNFQNLSVIGFRILLLKVAGFNLLMTLRLWSSRAKRSGSGATNFSLLKQAGDVEENPGPTSATMDWIWRILFLVGAATGAHSGPEVQLVESGGGLVQAGGSLRLSCAASGRTFSMGWFRQAPGKEREFVAAITYSGGSPYYADSVKGRFTISRDNAKNTVYLQMNSLKPEDTAVYYCAANPTYGSDWNAENWGQGTQVTVSSGSGGGGSGGGGSGGGGSFEQLQLQESGPGLVKPSETLSLTCTVSGGSISSSSYFWGWIRQPPGKGLEWIGSIYYSGITYYNPSLKSRVTISVDTSKNQFSLKLSSVTAADTAVYYCARHDGAVAGLFDYWGQGTLVTVSSATRIQNPDPAVYQLRDSKSSDKSVCLFTDFDSQTNVSQSKDSDVYITDKCVLDMRSMDFKSNSAVAWSNKSDFACANAFNNSIIPEDTFFPSPESSCGFTSESYQQGVLSATILYEILLGKATLYAVLVSALVLMAMVKRKDSRGRAKRSGSGVKQTLNFDLLKLAGDVESNPGPSRGHMTEYKPTVRLATRDDVPRAVRTLAAAFADYPATRHTVDPDRHIERVTELQELFLTRVGLDIGKVWVADDGAAVAVWTTPESVEAGAVFAEIGPRMAELSGSRLAAQQQMEGLLAPHRPKEPAWFLATVGVSPDHQGKGLGSAVVLPGVEAAERAGVPAFLETSAPRNLPFYERLGFTVTADVEVPEGPRTWCMTRKPGA

SEQ ID NO: 43494 - protein, 950 aa, synthetic construct
MALPVTALLLPLALLLHAARPSYVLTQPPSVSVAPGQTARITCGGNNIGGKSVHWYQQPPGQAPVVVVYDDSDRPSGIPERFSGSNSGNTATLTISRVEAGDEAVYYCQVWDSSSDHVVFGGGTKLTVLLEDLKNVFPPEVAVFEPSEAEISHTQKATLVCLATGFYPDHVELSWWVNGKEVHSGVCTDPQPLKEQPALNDSRYCLSSRLRVSATFWQNPRNHFRCQVQFYGLSENDEWTQDRAKPVTQIVSAEAWGRADCDVKLVEKSFETDTNLNFQNLSVIGFRILLLKVAGFNLLMTLRLWSSRAKRSGSGATNFSLLKQAGDVEENPGPTSATMDWIWRILFLVGAATGAHSGPMGSWSEFYDRLHAIHHRLYALGGSEAELAAFEKEIAAFESELQAYKGKGNPEVEALRDTAAFIRTRLQAYRHNGSGGGGSGGGGSGGGGSFEQLQLQESGPGLVKPSETLSLTCTVSGGSISSSSYFWGWIRQPPGKGLEWIGSIYYSGITYYNPSLKSRVTISVDTSKNQFSLKLSSVTAADTAVYYCARHDGAVAGLFDYWGQGTLVTVSSATRIQNPDPAVYQLRDSKSSDKSVCLFTDFDSQTNVSQSKDSDVYITDKCVLDMRSMDFKSNSAVAWSNKSDFACANAFNNSIIPEDTFFPSPESSCGFTSESYQQGVLSATILYEILLGKATLYAVLVSALVLMAMVKRKDSRGRAKRSGSGVKQTLNFDLLKLAGDVESNPGPSRGHMTEYKPTVRLATRDDVPRAVRTLAAAFADYPATRHTVDPDRHIERVTELQELFLTRVGLDIGKVWVADDGAAVAVWTTPESVEAGAVFAEIGPRMAELSGSRLAAQQQMEGLLAPHRPKEPAWFLATVGVSPDHQGKGLGSAVVLPGVEAAERAGVPAFLETSAPRNLPFYERLGFTVTADVEVPEGPRTWCMTRKPGA

SEQ ID NO: 43495 - protein, 1160 aa, synthetic construct
MALPVTALLLPLALLLHAARPSYVLTQPPSVSVAPGQTARITCGGNNIGGKSVHWYQQPPGQAPVVVVYDDSDRPSGIPERFSGSNSGNTATLTISRVEAGDEAVYYCQVWDSSSDHVVFGGGTKLTVLLEDLKNVFPPEVAVFEPSEAEISHTQKATLVCLATGFYPDHVELSWWVNGKEVHSGVCTDPQPLKEQPALNDSRYCLSSRLRVSATFWQNPRNHFRCQVQFYGLSENDEWTQDRAKPVTQIVSAEAWGRADCDVKLVEKSFETDTNLNFQNLSVIGFRILLLKVAGFNLLMTLRLWSSRAKRSGSGATNFSLLKQAGDVEENPGPTSTMDWIWRILFLVGAATGAHSLFNQEVQIPLTESYCGPCPKNWICYKNNCYQFFDESKNWYESQASCMSQNASLLKVYSKEDQDLLKLVKSAHWMGLVHIPTNGSWQWEDGSILSPNLLTIIEMQKGDCALYASSFKGYIENCSTPNTYICMQRTVSGGGGSGGGGSGGGGDLFNQEVQIPLTESYCGPCPKNWICYKNNCYQFFDESKNWYESQASCMSQNASLLKVYSKEDQDLLKLVKSAHWMGLVHIPTNGSWQWEDGSILSPNLLTIIEMQKGDCALYASSFKGYIENCSTPNTYICMQRTVGSGGGGSGGGGSGGGGSFEQLQLQESGPGLVKPSETLSLTCTVSGGSISSSSYFWGWIRQPPGKGLEWIGSIYYSGITYYNPSLKSRVTISVDTSKNQFSLKLSSVTAADTAVYYCARHDGAVAGLFDYWGQGTLVTVSSATRIQNPDPAVYQLRDSKSSDKSVCLFTDFDSQTNVSQSKDSDVYITDKCVLDMRSMDFKSNSAVAWSNKSDFACANAFNNSIIPEDTFFPSPESSCGFTSESYQQGVLSATILYEILLGKATLYAVLVSALVLMAMVKRKDSRGRAKRSGSGVKQTLNFDLLKLAGDVESNPGPSRGHMTEYKPTVRLATRDDVPRAVRTLAAAFADYPATRHTVDPDRHIERVTELQELFLTRVGLDIGKVWVADDGAAVAVWTTPESVEAGAVFAEIGPRMAELSGSRLAAQQQMEGLLAPHRPKEPAWFLATVGVSPDHQGKGLGSAVVLPGVEAAERAGVPAFLETSAPRNLPFYERLGFTVTADVEVPEGPRTWCMTRKPGA

SEQ ID NO: 43496 - protein, 623 aa, synthetic construct; identical to SEQ ID NO: 43453

SEQ ID NO: 43497 - protein, 627 aa, synthetic construct
MALPVTALLLPLALLLHAARPSYVLTQPPSVSVAPGQTARITCGGNNIGGKSVHWYQQPPGQAPVVVVYDDSDRPSGIPERFSGSNSGNTATLTISRVEAGDEAVYYCQVWDSSSDHVVFGGGTKLTVLLEIQNPDPAVYQLRDSKSSDKSVCLFTDFDSQTNVSQSKDSDVYITDKCVLDMRSMDFKSNSAVAWSNKSDFACANAFNNSIIPEDTFFPSPESSCDVKLVEKSFETDTNLNFQILYEILLGKATLYAVLVSALVLMAMVKRKDSRGRAKRSGSGVKQTLNFDLLKLAGDVESNPGPTSMDWIWRILFLVGAATGAHSFEQLQLQESGPGLVKPSETLSLTCTVSGGSISSSSYFWGWIRQPPGKGLEWIGSIYYSGITYYNPSLKSRVTISVDTSKNQFSLKLSSVTAADTAVYYCARHDGAVAGLFDYWGQGTLVTVSSATREDLKNVFPPEVAVFEPSEAEISHTQKATLVCLATGFYPDHVELSWWVNGKEVHSGVCTDPQPLKEQPALNDSRYCLSSRLRVSATFWQNPRNHFRCQVQFYGLSENDEWTQDRAKPVTQIVSAEAWGRADCGFTSESYQQGVLSATNLSVIGFRILLLKVAGFNLLMTLRLWSS

SEQ ID NO: 43498 - protein, 758 aa, synthetic construct
MALPVTALLLPLALLLHAARPEVQLVESGGGLVQPGGSLRLSCAASGFSFSDFWMSWVRQAPGKGLEWVATISQAGSEKDYVDSVKGRFTISRDNAKKSLYLQMNSLRAEDTAVYYCASGVYSFDYRGQGTLVTVSSGTGGGGSGGGGSGGGGSEFSYVLTQPPSVSVAPGQTARITCGGNNIGGKSVHWYQQPPGQAPVVVVYDDSDRPSGIPERFSGSNSGNTATLTISRVEAGDEAVYYCQVWDSSSDHVVFGGGTKLTVLLEDLKNVFPPEVAVFEPSEAEISHTQKATLVCLATGFYPDHVELSWWVNGKEVHSGVCTDPQPLKEQPALNDSRYCLSSRLRVSATFWQNPRNHFRCQVQFYGLSENDEWTQDRAKPVTQIVSAEAWGRADCGFTSESYQQGVLSATNLSVIGFRILLLKVAGFNLLMTLRLWSSRAKRSGSGATNFSLLKQAGDVEENPGPTSMDWIWRILFLVGAATGAHSFEQLQLQESGPGLVKPSETLSLTCTVSGGSISSSSYFWGWIRQPPGKGLEWIGSIYYSGITYYNPSLKSRVTISVDTSKNQFSLKLSSVTAADTAVYYCARHDGAVAGLFDYWGQGTLVTVSSATRIQNPDPAVYQLRDSKSSDKSVCLFTDFDSQTNVSQSKDSDVYITDKCVLDMRSMDFKSNSAVAWSNKSDFACANAFNNSIIPEDTFFPSPESSCDVKLVEKSFETDTNLNFQILYEILLGKATLYAVLVSALVLMAMVKRKDSRG

SEQ ID NO: 43499 - protein, 762 aa, synthetic construct
MALPVTALLLPLALLLHAARPEVQLVESGGGLVQPGGSLRLSCAASGFSFSDFWMSWVRQAPGKGLEWVATISQAGSEKDYVDSVKGRFTISRDNAKKSLYLQMNSLRAEDTAVYYCASGVYSFDYRGQGTLVTVSSGTGGGGSGGGGSGGGGSEFSYVLTQPPSVSVAPGQTARITCGGNNIGGKSVHWYQQPPGQAPVVVVYDDSDRPSGIPERFSGSNSGNTATLTISRVEAGDEAVYYCQVWDSSSDHVVFGGGTKLTVLLEIQNPDPAVYQLRDSKSSDKSVCLFTDFDSQTNVSQSKDSDVYITDKCVLDMRSMDFKSNSAVAWSNKSDFACANAFNNSIIPEDTFFPSPESSCDVKLVEKSFETDTNLNFQILYEILLGKATLYAVLVSALVLMAMVKRKDSRGRAKRSGSGVKQTLNFDLLKLAGDVESNPGPTSMDWIWRILFLVGAATGAHSFEQLQLQESGPGLVKPSETLSLTCTVSGGSISSSSYFWGWIRQPPGKGLEWIGSIYYSGITYYNPSLKSRVTISVDTSKNQFSLKLSSVTAADTAVYYCARHDGAVAGLFDYWGQGTLVTVSSATREDLKNVFPPEVAVFEPSEAEISHTQKATLVCLATGFYPDHVELSWWVNGKEVHSGVCTDPQPLKEQPALNDSRYCLSSRLRVSATFWQNPRNHFRCQVQFYGLSENDEWTQDRAKPVTQIVSAEAWGRADCGFTSESYQQGVLSATNLSVIGFRILLLKVAGFNLLMTLRLWSS

SEQ ID NO: 43500 - protein, 895 aa, synthetic construct
MALPVTALLLPLALLLHAARPEVQLVESGGGLVQPGGSLRLSCAASGFSFSDFWMSWVRQAPGKGLEWVATISQAGSEKDYVDSVKGRFTISRDNAKKSLYLQMNSLRAEDTAVYYCASGVYSFDYRGQGTLVTVSSGTGGGGSGGGGSGGGGSEFSYVLTQPPSVSVAPGQTARITCGGNNIGGKSVHWYQQPPGQAPVVVVYDDSDRPSGIPERFSGSNSGNTATLTISRVEAGDEAVYYCQVWDSSSDHVVFGGGTKLTVLLEDLKNVFPPEVAVFEPSEAEISHTQKATLVCLATGFYPDHVELSWWVNGKEVHSGVCTDPQPLKEQPALNDSRYCLSSRLRVSATFWQNPRNHFRCQVQFYGLSENDEWTQDRAKPVTQIVSAEAWGRADCGFTSESYQQGVLSATNLSVIGFRILLLKVAGFNLLMTLRLWSSRAKRSGSGATNFSLLKQAGDVEENPGPTSMDWIWRILFLVGAATGAHSGPQLQLQESGPGLVKPSETLSLTCTVSGDSISSGDYYWGWIRQPPGKGLEWIGHIYYSGVTYYNPSLKSRVTISVDTSRNQFSLKLSSVTAADTAVYYCTREDSSNWRSRGQGTLVTVSSGSGGGGSGGGGSGGGGSFEQLQLQESGPGLVKPSETLSLTCTVSGGSISSSSYFWGWIRQPPGKGLEWIGSIYYSGITYYNPSLKSRVTISVDTSKNQFSLKLSSVTAADTAVYYCARHDGAVAGLFDYWGQGTLVTVSSATRIQNPDPAVYQLRDSKSSDKSVCLFTDFDSQTNVSQSKDSDVYITDKCVLDMRSMDFKSNSAVAWSNKSDFACANAFNNSIIPEDTFFPSPESSCDVKLVEKSFETDTNLNFQILYEILLGKATLYAVLVSALVLMAMVKRKDSRG

SEQ ID NO: 43501 - protein, 899 aa, synthetic construct
MALPVTALLLPLALLLHAARPEVQLVESGGGLVQPGGSLRLSCAASGFSFSDFWMSWVRQAPGKGLEWVATISQAGSEKDYVDSVKGRFTISRDNAKKSLYLQMNSLRAEDTAVYYCASGVYSFDYRGQGTLVTVSSGTGGGGSGGGGSGGGGSEFSYVLTQPPSVSVAPGQTARITCGGNNIGGKSVHWYQQPPGQAPVVVVYDDSDRPSGIPERFSGSNSGNTATLTISRVEAGDEAVYYCQVWDSSSDHVVFGGGTKLTVLLEIQNPDPAVYQLRDSKSSDKSVCLFTDFDSQTNVSQSKDSDVYITDKCVLDMRSMDFKSNSAVAWSNKSDFACANAFNNSIIPEDTFFPSPESSCDVKLVEKSFETDTNLNFQILYEILLGKATLYAVLVSALVLMAMVKRKDSRGRAKRSGSGVKQTLNFDLLKLAGDVESNPGPTSMDWIWRILFLVGAATGAHSGPQLQLQESGPGLVKPSETLSLTCTVSGDSISSGDYYWGWIRQPPGKGLEWIGHIYYSGVTYYNPSLKSRVTISVDTSRNQFSLKLSSVTAADTAVYYCTREDSSNWRSRGQGTLVTVSSGSGGGGSGGGGSGGGGSFEQLQLQESGPGLVKPSETLSLTCTVSGGSISSSSYFWGWIRQPPGKGLEWIGSIYYSGITYYNPSLKSRVTISVDTSKNQFSLKLSSVTAADTAVYYCARHDGAVAGLFDYWGQGTLVTVSSATREDLKNVFPPEVAVFEPSEAEISHTQKATLVCLATGFYPDHVELSWWVNGKEVHSGVCTDPQPLKEQPALNDSRYCLSSRLRVSATFWQNPRNHFRCQVQFYGLSENDEWTQDRAKPVTQIVSAEAWGRADCGFTSESYQQGVLSATNLSVIGFRILLLKVAGFNLLMTLRLWSS

SEQ ID NO: 43502 - protein, 727 aa, synthetic construct
MALPVTALLLPLALLLHAARPSYVLTQPPSVSVAPGQTARITCGGNNIGGKSVHWYQQPPGQAPVVVVYDDSDRPSGIPERFSGSNSGNTATLTISRVEAGDEAVYYCQVWDSSSDHVVFGGGTKLTVLLEDLKNVFPPEVAVFEPSEAEISHTQKATLVCLATGFYPDHVELSWWVNGKEVHSGVCTDPQPLKEQPALNDSRYCLSSRLRVSATFWQNPRNHFRCQVQFYGLSENDEWTQDRAKPVTQIVSAEAWGRADDVIKIHWQEKKSNTILGSQEGNTMKTNDTYMKFSWLTVPEKSLDKEHRCIVRHENNKNGVDQEIIFPPIKTDVITMDPKDNCSKDANDTLLLQLTNTSAYYMYLLLLLKSVVYFAIITCCLLMAMVKRKDSRGRAKRSGSGATNFSLLKQAGDVEENPGPTSMDWIWRILFLVGAATGAHSFEQLQLQESGPGLVKPSETLSLTCTVSGGSISSSSYFWGWIRQPPGKGLEWIGSIYYSGITYYNPSLKSRVTISVDTSKNQFSLKLSSVTAADTAVYYCARHDGAVAGLFDYWGQGTLVTVSSATRIQNPDPAVYQLRDSKSSDKSVCLFTDFDSQTNVSQSKDSDVYITDKCVLDMRSMDFKSNSAVAWSNKSDFACANAFNNSIIPEDTFFPSPESSDSTDHVKPKETENTKQPSKSCHKPKAIVHTEKVNMMSLTVLGLRMLFAKTVAVNFLLTAKLFFLLTA

SEQ ID NO: 43503 - protein, 731 aa, synthetic construct
MALPVTALLLPLALLLHAARPSYVLTQPPSVSVAPGQTARITCGGNNIGGKSVHWYQQPPGQAPVVVVYDDSDRPSGIPERFSGSNSGNTATLTISRVEAGDEAVYYCQVWDSSSDHVVFGGGTKLTVLLEIQNPDPAVYQLRDSKSSDKSVCLFTDFDSQTNVSQSKDSDVYITDKCVLDMRSMDFKSNSAVAWSNKSDFACANAFNNSIIPEDTFFPSPESSDSTDHVKPKETENTKQPSKSCHKPKAIVHTEKVNMMSLTVLGLRMLFAKTVAVNFLLTAKLFFLLTARAKRSGSGVKQTLNFDLLKLAGDVESNPGPTSMDWIWRILFLVGAATGAHSFEQLQLQESGPGLVKPSETLSLTCTVSGGSISSSSYFWGWIRQPPGKGLEWIGSIYYSGITYYNPSLKSRVTISVDTSKNQFSLKLSSVTAADTAVYYCARHDGAVAGLFDYWGQGTLVTVSSATREDLKNVFPPEVAVFEPSEAEISHTQKATLVCLATGFYPDHVELSWWVNGKEVHSGVCTDPQPLKEQPALNDSRYCLSSRLRVSATFWQNPRNHFRCQVQFYGLSENDEWTQDRAKPVTQIVSAEAWGRADDVIKIHWQEKKSNTILGSQEGNTMKTNDTYMKFSWLTVPEKSLDKEHRCIVRHENNKNGVDQEIIFPPIKTDVITMDPKDNCSKDANDTLLLQLTNTSAYYMYLLLLLKSVVYFAIITCCLLMAMVKRKDSRG

SEQ ID NO: 43504 - protein, 862 aa, synthetic construct
MALPVTALLLPLALLLHAARPEVQLVESGGGLVQPGGSLRLSCAASGFSFSDFWMSWVRQAPGKGLEWVATISQAGSEKDYVDSVKGRFTISRDNAKKSLYLQMNSLRAEDTAVYYCASGVYSFDYRGQGTLVTVSSGTGGGGSGGGGSGGGGSEFSYVLTQPPSVSVAPGQTARITCGGNNIGGKSVHWYQQPPGQAPVVVVYDDSDRPSGIPERFSGSNSGNTATLTISRVEAGDEAVYYCQVWDSSSDHVVFGGGTKLTVLLEDLKNVFPPEVAVFEPSEAEISHTQKATLVCLATGFYPDHVELSWWVNGKEVHSGVCTDPQPLKEQPALNDSRYCLSSRLRVSATFWQNPRNHFRCQVQFYGLSENDEWTQDRAKPVTQIVSAEAWGRADDVIKIHWQEKKSNTILGSQEGNTMKTNDTYMKFSWLTVPEKSLDKEHRCIVRHENNKNGVDQEIIFPPIKTDVITMDPKDNCSKDANDTLLLQLTNTSAYYMYLLLLLKSVVYFAIITCCLLMAMVKRKDSRGRAKRSGSGATNFSLLKQAGDVEENPGPTSMDWIWRILFLVGAATGAHSFEQLQLQESGPGLVKPSETLSLTCTVSGGSISSSSYFWGWIRQPPGKGLEWIGSIYYSGITYYNPSLKSRVTISVDTSKNQFSLKLSSVTAADTAVYYCARHDGAVAGLFDYWGQGTLVTVSSATRIQNPDPAVYQLRDSKSSDKSVCLFTDFDSQTNVSQSKDSDVYITDKCVLDMRSMDFKSNSAVAWSNKSDFACANAFNNSIIPEDTFFPSPESSDSTDHVKPKETENTKQPSKSCHKPKAIVHTEKVNMMSLTVLGLRMLFAKTVAVNFLLTAKLFFLLTA

SEQ ID NO: 43505 - protein, 866 aa, synthetic construct
MALPVTALLLPLALLLHAARPEVQLVESGGGLVQPGGSLRLSCAASGFSFSDFWMSWVRQAPGKGLEWVATISQAGSEKDYVDSVKGRFTISRDNAKKSLYLQMNSLRAEDTAVYYCASGVYSFDYRGQGTLVTVSSGTGGGGSGGGGSGGGGSEFSYVLTQPPSVSVAPGQTARITCGGNNIGGKSVHWYQQPPGQAPVVVVYDDSDRPSGIPERFSGSNSGNTATLTISRVEAGDEAVYYCQVWDSSSDHVVFGGGTKLTVLLEIQNPDPAVYQLRDSKSSDKSVCLFTDFDSQTNVSQSKDSDVYITDKCVLDMRSMDFKSNSAVAWSNKSDFACANAFNNSIIPEDTFFPSPESSDSTDHVKPKETENTKQPSKSCHKPKAIVHTEKVNMMSLTVLGLRMLFAKTVAVNFLLTAKLFFLLTARAKRSGSGVKQTLNFDLLKLAGDVESNPGPTSMDWIWRILFLVGAATGAHSFEQLQLQESGPGLVKPSETLSLTCTVSGGSISSSSYFWGWIRQPPGKGLEWIGSIYYSGITYYNPSLKSRVTISVDTSKNQFSLKLSSVTAADTAVYYCARHDGAVAGLFDYWGQGTLVTVSSATREDLKNVFPPEVAVFEPSEAEISHTQKATLVCLATGFYPDHVELSWWVNGKEVHSGVCTDPQPLKEQPALNDSRYCLSSRLRVSATFWQNPRNHFRCQVQFYGLSENDEWTQDRAKPVTQIVSAEAWGRADDVIKIHWQEKKSNTILGSQEGNTMKTNDTYMKFSWLTVPEKSLDKEHRCIVRHENNKNGVDQEIIFPPIKTDVITMDPKDNCSKDANDTLLLQLTNTSAYYMYLLLLLKSVVYFAIITCCLLMAMVKRKDSRG

SEQ ID NO: 43506 - protein, 999 aa, synthetic construct
MALPVTALLLPLALLLHAARPEVQLVESGGGLVQPGGSLRLSCAASGFSFSDFWMSWVRQAPGKGLEWVATISQAGSEKDYVDSVKGRFTISRDNAKKSLYLQMNSLRAEDTAVYYCASGVYSFDYRGQGTLVTVSSGTGGGGSGGGGSGGGGSEFSYVLTQPPSVSVAPGQTARITCGGNNIGGKSVHWYQQPPGQAPVVVVYDDSDRPSGIPERFSGSNSGNTATLTISRVEAGDEAVYYCQVWDSSSDHVVFGGGTKLTVLLEDLKNVFPPEVAVFEPSEAEISHTQKATLVCLATGFYPDHVELSWWVNGKEVHSGVCTDPQPLKEQPALNDSRYCLSSRLRVSATFWQNPRNHFRCQVQFYGLSENDEWTQDRAKPVTQIVSAEAWGRADDVIKIHWQEKKSNTILGSQEGNTMKTNDTYMKFSWLTVPEKSLDKEHRCIVRHENNKNGVDQEIIFPPIKTDVITMDPKDNCSKDANDTLLLQLTNTSAYYMYLLLLLKSVVYFAIITCCLLMAMVKRKDSRGRAKRSGSGATNFSLLKQAGDVEENPGPTSMDWIWRILFLVGAATGAHSGPQLQLQESGPGLVKPSETLSLTCTVSGDSISSGDYYWGWIRQPPGKGLEWIGHIYYSGVTYYNPSLKSRVTISVDTSRNQFSLKLSSVTAADTAVYYCTREDSSNWRSRGQGTLVTVSSGSGGGGSGGGGSGGGGSFEQLQLQESGPGLVKPSETLSLTCTVSGGSISSSSYFWGWIRQPPGKGLEWIGSIYYSGITYYNPSLKSRVTISVDTSKNQFSLKLSSVTAADTAVYYCARHDGAVAGLFDYWGQGTLVTVSSATRIQNPDPAVYQLRDSKSSDKSVCLFTDFDSQTNVSQSKDSDVYITDKCVLDMRSMDFKSNSAVAWSNKSDFACANAFNNSIIPEDTFFPSPESSDSTDHVKPKETENTKQPSKSCHKPKAIVHTEKVNMMSLTVLGLRMLFAKTVAVNFLLTAKLFFLLTA

SEQ ID NO: 43507 - protein, 1003 aa, synthetic construct
MALPVTALLLPLALLLHAARPEVQLVESGGGLVQPGGSLRLSCAASGFSFSDFWMSWVRQAPGKGLEWVATISQAGSEKDYVDSVKGRFTISRDNAKKSLYLQMNSLRAEDTAVYYCASGVYSFDYRGQGTLVTVSSGTGGGGSGGGGSGGGGSEFSYVLTQPPSVSVAPGQTARITCGGNNIGGKSVHWYQQPPGQAPVVVVYDDSDRPSGIPERFSGSNSGNTATLTISRVEAGDEAVYYCQVWDSSSDHVVFGGGTKLTVLLEIQNPDPAVYQLRDSKSSDKSVCLFTDFDSQTNVSQSKDSDVYITDKCVLDMRSMDFKSNSAVAWSNKSDFACANAFNNSIIPEDTFFPSPESSDSTDHVKPKETENTKQPSKSCHKPKAIVHTEKVNMMSLTVLGLRMLFAKTVAVNFLLTAKLFFLLTARAKRSGSGVKQTLNFDLLKLAGDVESNPGPTSMDWIWRILFLVGAATGAHSGPQLQLQESGPGLVKPSETLSLTCTVSGDSISSGDYYWGWIRQPPGKGLEWIGHIYYSGVTYYNPSLKSRVTISVDTSRNQFSLKLSSVTAADTAVYYCTREDSSNWRSRGQGTLVTVSSGSGGGGSGGGGSGGGGSFEQLQLQESGPGLVKPSETLSLTCTVSGGSISSSSYFWGWIRQPPGKGLEWIGSIYYSGITYYNPSLKSRVTISVDTSKNQFSLKLSSVTAADTAVYYCARHDGAVAGLFDYWGQGTLVTVSSATREDLKNVFPPEVAVFEPSEAEISHTQKATLVCLATGFYPDHVELSWWVNGKEVHSGVCTDPQPLKEQPALNDSRYCLSSRLRVSATFWQNPRNHFRCQVQFYGLSENDEWTQDRAKPVTQIVSAEAWGRADDVIKIHWQEKKSNTILGSQEGNTMKTNDTYMKFSWLTVPEKSLDKEHRCIVRHENNKNGVDQEIIFPPIKTDVITMDPKDNCSKDANDTLLLQLTNTSAYYMYLLLLLKSVVYFAIITCCLLMAMVKRKDSRG

SEQ ID NO: 43508 - protein, 725 aa, synthetic construct
MALPVTALLLPLALLLHAARPSYVLTQPPSVSVAPGQTARITCGGNNIGGKSVHWYQQPPGQAPVVVVYDDSDRPSGIPERFSGSNSGNTATLTISRVEAGDEAVYYCQVWDSSSDHVVFGGGTKLTVLLEDLKNVFPPEVAVFEPSEAEISHTQKATLVCLATGFYPDHVELSWWVNGKEVHSGVCTDPQPLKEQPALNDSRYCLSSRLRVSATFWQNPRNHFRCQVQFYGLSENDEWTQDRAKPVTQIVSAEAWGRADDVIKIHWQEKKSNTILGSQEGNTMKTNDTYMKFSWLTVPEKSLDKEHRCIVRHENNKNGVDQEIIFPPIKTDVITMDPKDNCSKDANDTLLLQLTNTSAYYMYLLLLLKSVVYFAIITCCLLRRTAFCCNGEKSRAKRSGSGATNFSLLKQAGDVEENPGPTSMDWIWRILFLVGAATGAHSFEQLQLQESGPGLVKPSETLSLTCTVSGGSISSSSYFWGWIRQPPGKGLEWIGSIYYSGITYYNPSLKSRVTISVDTSKNQFSLKLSSVTAADTAVYYCARHDGAVAGLFDYWGQGTLVTVSSATRIQNPDPAVYQLRDSKSSDKSVCLFTDFDSQTNVSQSKDSDVYITDKCVLDMRSMDFKSNSAVAWSNKSDFACANAFNNSIIPEDTFFPSPESSDSTDHVKPKETENTKQPSKSCHKPKAIVHTEKVNMMSLTVLGLRMLFAKTVAVNFLLTAKLFFL

SEQ ID NO: 43509 - protein, 729 aa, synthetic construct
MALPVTALLLPLALLLHAARPSYVLTQPPSVSVAPGQTARITCGGNNIGGKSVHWYQQPPGQAPVVVVYDDSDRPSGIPERFSGSNSGNTATLTISRVEAGDEAVYYCQVWDSSSDHVVFGGGTKLTVLLEIQNPDPAVYQLRDSKSSDKSVCLFTDFDSQTNVSQSKDSDVYITDKCVLDMRSMDFKSNSAVAWSNKSDFACANAFNNSIIPEDTFFPSPESSDSTDHVKPKETENTKQPSKSCHKPKAIVHTEKVNMMSLTVLGLRMLFAKTVAVNFLLTAKLFFLRAKRSGSGVKQTLNFDLLKLAGDVESNPGPTSMDWIWRILFLVGAATGAHSFEQLQLQESGPGLVKPSETLSLTCTVSGGSISSSSYFWGWIRQPPGKGLEWIGSIYYSGITYYNPSLKSRVTISVDTSKNQFSLKLSSVTAADTAVYYCARHDGAVAGLFDYWGQGTLVTVSSATREDLKNVFPPEVAVFEPSEAEISHTQKATLVCLATGFYPDHVELSWWVNGKEVHSGVCTDPQPLKEQPALNDSRYCLSSRLRVSATFWQNPRNHFRCQVQFYGLSENDEWTQDRAKPVTQIVSAEAWGRADDVIKIHWQEKKSNTILGSQEGNTMKTNDTYMKFSWLTVPEKSLDKEHRCIVRHENNKNGVDQEIIFPPIKTDVITMDPKDNCSKDANDTLLLQLTNTSAYYMYLLLLLKSVVYFAIITCCLLRRTAFCCNGEKS

SEQ ID NO: 43510 - protein, 860 aa, synthetic construct
MALPVTALLLPLALLLHAARPEVQLVESGGGLVQPGGSLRLSCAASGFSFSDFWMSWVRQAPGKGLEWVATISQAGSEKDYVDSVKGRFTISRDNAKKSLYLQMNSLRAEDTAVYYCASGVYSFDYRGQGTLVTVSSGTGGGGSGGGGSGGGGSEFSYVLTQPPSVSVAPGQTARITCGGNNIGGKSVHWYQQPPGQAPVVVVYDDSDRPSGIPERFSGSNSGNTATLTISRVEAGDEAVYYCQVWDSSSDHVVFGGGTKLTVLLEDLKNVFPPEVAVFEPSEAEISHTQKATLVCLATGFYPDHVELSWWVNGKEVHSGVCTDPQPLKEQPALNDSRYCLSSRLRVSATFWQNPRNHFRCQVQFYGLSENDEWTQDRAKPVTQIVSAEAWGRADDVIKIHWQEKKSNTILGSQEGNTMKTNDTYMKFSWLTVPEKSLDKEHRCIVRHENNKNGVDQEIIFPPIKTDVITMDPKDNCSKDANDTLLLQLTNTSAYYMYLLLLLKSVVYFAIITCCLLRRTAFCCNGEKSRAKRSGSGATNFSLLKQAGDVEENPGPTSMDWIWRILFLVGAATGAHSFEQLQLQESGPGLVKPSETLSLTCTVSGGSISSSSYFWGWIRQPPGKGLEWIGSIYYSGITYYNPSLKSRVTISVDTSKNQFSLKLSSVTAADTAVYYCARHDGAVAGLFDYWGQGTLVTVSSATRIQNPDPAVYQLRDSKSSDKSVCLFTDFDSQTNVSQSKDSDVYITDKCVLDMRSMDFKSNSAVAWSNKSDFACANAFNNSIIPEDTFFPSPESSDSTDHVKPKETENTKQPSKSCHKPKAIVHTEKVNMMSLTVLGLRMLFAKTVAVNFLLTAKLFFL

SEQ ID NO: 43511 - protein, 997 aa, synthetic construct
MALPVTALLLPLALLLHAARPEVQLVESGGGLVQPGGSLRLSCAASGFSFSDFWMSWVRQAPGKGLEWVATISQAGSEKDYVDSVKGRFTISRDNAKKSLYLQMNSLRAEDTAVYYCASGVYSFDYRGQGTLVTVSSGTGGGGSGGGGSGGGGSEFSYVLTQPPSVSVAPGQTARITCGGNNIGGKSVHWYQQPPGQAPVVVVYDDSDRPSGIPERFSGSNSGNTATLTISRVEAGDEAVYYCQVWDSSSDHVVFGGGTKLTVLLEDLKNVFPPEVAVFEPSEAEISHTQKATLVCLATGFYPDHVELSWWVNGKEVHSGVCTDPQPLKEQPALNDSRYCLSSRLRVSATFWQNPRNHFRCQVQFYGLSENDEWTQDRAKPVTQIVSAEAWGRADDVIKIHWQEKKSNTILGSQEGNTMKTNDTYMKFSWLTVPEKSLDKEHRCIVRHENNKNGVDQEIIFPPIKTDVITMDPKDNCSKDANDTLLLQLTNTSAYYMYLLLLLKSVVYFAIITCCLLRRTAFCCNGEKSRAKRSGSGATNFSLLKQAGDVEENPGPTSMDWIWRILFLVGAATGAHSGPQLQLQESGPGLVKPSETLSLTCTVSGDSISSGDYYWGWIRQPPGKGLEWIGHIYYSGVTYYNPSLKSRVTISVDTSRNQFSLKLSSVTAADTAVYYCTREDSSNWRSRGQGTLVTVSSGSGGGGSGGGGSGGGGSFEQLQLQESGPGLVKPSETLSLTCTVSGGSISSSSYFWGWIRQPPGKGLEWIGSIYYSGITYYNPSLKSRVTISVDTSKNQFSLKLSSVTAADTAVYYCARHDGAVAGLFDYWGQGTLVTVSSATRIQNPDPAVYQLRDSKSSDKSVCLFTDFDSQTNVSQSKDSDVYITDKCVLDMRSMDFKSNSAVAWSNKSDFACANAFNNSIIPEDTFFPSPESSDSTDHVKPKETENTKQPSKSCHKPKAIVHTEKVNMMSLTVLGLRMLFAKTVAVNFLLTAKLFFL

SEQ ID NO: 43512 - protein, 623 aa, synthetic construct
MALPVTALLLPLALLLHAARPSYVLTQPPSVSVAPGQTARITCGGNNIGGKSVHWYQQPPGQAPVVVVYDDSDRPSGIPERFSGSNSGNTATLTISRVEAGDEAVYYCQVWDSSSDHVVFGGGTKLTVLLEDLKNVFPPEVAVFEPSEAEISHTQKATLVCLATGFYPDHVELSWWVNGKEVHSGVSTDPQPLKEQPALNDSRYCLSSRLRVSATFWQNPRNHFRCQVQFYGLSENDEWTQDRAKPVTQIVSAEAWGRADCDVKLVEKSFETDTNLNFQNLSVIGFRILLLKVAGFNLLMTLRLWSSRAKRSGSGATNFSLLKQAGDVEENPGPTSMDWIWRILFLVGAATGAHSFEQLQLQESGPGLVKPSETLSLTCTVSGGSISSSSYFWGWIRQPPGKGLEWIGSIYYSGITYYNPSLKSRVTISVDTSKNQFSLKLSSVTAADTAVYYCARHDGAVAGLFDYWGQGTLVTVSSATRIQNPDPAVYQLRDSKSSDKSVCLFTDFDSQTNVSQSKDSDVYITDKTVLDMRSMDFKSNSAVAWSNKSDFACANAFNNSIIPEDTFFPSPESSCGFTSESYQQGVLSATILYEILLGKATLYAVLVSALVLMAMVKRKDSRG

SEQ ID NO: 43513 - protein, 623 aa, synthetic construct
MALPVTALLLPLALLLHAARPSYVLTQPPSVSVAPGQTARITCGGNNIGGKSVHWYQQPPGQAPVVVVYDDSDRPSGIPERFSGSNSGNTATLTISRVEAGDEAVYYCQVWDSSSDHVVFGGGTKLTVLLEDLKNVFPPEVAVFEPSEAEISHTQKATLVCLATGFYPDHVELSWWVNGKEVHSGVSTDPQPLKEQPALNDSRYCLSSRLRVSATFWQNPRNHFRCQVQFYGLSENDEWTQDRAKPVTQIVSAEAWGRADCGFTSESYQQGVLSATNLSVIGFRILLLKVAGFNLLMTLRLWSSRAKRSGSGATNFSLLKQAGDVEENPGPTSMDWIWRILFLVGAATGAHSFEQLQLQESGPGLVKPSETLSLTCTVSGGSISSSSYFWGWIRQPPGKGLEWIGSIYYSGITYYNPSLKSRVTISVDTSKNQFSLKLSSVTAADTAVYYCARHDGAVAGLFDYWGQGTLVTVSSATRIQNPDPAVYQLRDSKSSDKSVCLFTDFDSQTNVSQSKDSDVYITDKTVLDMRSMDFKSNSAVAWSNKSDFACANAFNNSIIPEDTFFPSPESSCDVKLVEKSFETDTNLNFQILYEILLGKATLYAVLVSALVLMAMVKRKDSRG

SEQ ID NO: 43514 - protein, 727 aa, synthetic construct
MALPVTALLLPLALLLHAARPSYVLTQPPSVSVAPGQTARITCGGNNIGGKSVHWYQQPPGQAPVVVVYDDSDRPSGIPERFSGSNSGNTATLTISRVEAGDEAVYYCQVWDSSSDHVVFGGGTKLTVLLEDLKNVFPPEVAVFEPSEAEISHTQKATLVCLATGFYPDHVELSWWVNGKEVHSGVSTDPQPLKEQPALNDSRYCLSSRLRVSATFWQNPRNHFRCQVQFYGLSENDEWTQDRAKPVTQIVSAEAWGRADDVIKIHWQEKKSNTILGSQEGNTMKTNDTYMKFSWLTVPEKSLDKEHRCIVRHENNKNGVDQEIIFPPIKTDVITMDPKDNCSKDANDTLLLQLTNTSAYYMYLLLLLKSVVYFAIITCCLLMAMVKRKDSRGRAKRSGSGATNFSLLKQAGDVEENPGPTSMDWIWRILFLVGAATGAHSFEQLQLQESGPGLVKPSETLSLTCTVSGGSISSSSYFWGWIRQPPGKGLEWIGSIYYSGITYYNPSLKSRVTISVDTSKNQFSLKLSSVTAADTAVYYCARHDGAVAGLFDYWGQGTLVTVSSATRIQNPDPAVYQLRDSKSSDKSVCLFTDFDSQTNVSQSKDSDVYITDKTVLDMRSMDFKSNSAVAWSNKSDFACANAFNNSIIPEDTFFPSPESSDSTDHVKPKETENTKQPSKSCHKPKAIVHTEKVNMMSLTVLGLRMLFAKTVAVNFLLTAKLFFLLTA

SEQ ID NO: 43515 - protein, 725 aa, synthetic construct
MALPVTALLLPLALLLHAARPSYVLTQPPSVSVAPGQTARITCGGNNIGGKSVHWYQQPPGQAPVVVVYDDSDRPSGIPERFSGSNSGNTATLTISRVEAGDEAVYYCQVWDSSSDHVVFGGGTKLTVLLEDLKNVFPPEVAVFEPSEAEISHTQKATLVCLATGFYPDHVELSWWVNGKEVHSGVSTDPQPLKEQPALNDSRYCLSSRLRVSATFWQNPRNHFRCQVQFYGLSENDEWTQDRAKPVTQIVSAEAWGRADDVIKIHWQEKKSNTILGSQEGNTMKTNDTYMKFSWLTVPEKSLDKEHRCIVRHENNKNGVDQEIIFPPIKTDVITMDPKDNCSKDANDTLLLQLTNTSAYYMYLLLLLKSVVYFAIITCCLLRRTAFCCNGEKSRAKRSGSGATNFSLLKQAGDVEENPGPTSMDWIWRILFLVGAATGAHSFEQLQLQESGPGLVKPSETLSLTCTVSGGSISSSSYFWGWIRQPPGKGLEWIGSIYYSGITYYNPSLKSRVTISVDTSKNQFSLKLSSVTAADTAVYYCARHDGAVAGLFDYWGQGTLVTVSSATRIQNPDPAVYQLRDSKSSDKSVCLFTDFDSQTNVSQSKDSDVYITDKTVLDMRSMDFKSNSAVAWSNKSDFACANAFNNSIIPEDTFFPSPESSDSTDHVKPKETENTKQPSKSCHKPKAIVHTEKVNMMSLTVLGLRMLFAKTVAVNFLLTAKLFFL

SEQ ID NO: 43516 - protein, 868 aa, synthetic construct
MALPVTALLLPLALLLHAARPLEEDLKNVFPPEVAVFEPSEAEISHTQKATLVCLATGFYPDHVELSWWVNGKEVHSGVCTDPQPLKEQPALNDSRYCLSSRLRVSATFWQNPRNHFRCQVQFYGLSENDEWTQDRAKPVTQIVSAEAWGRADCGFTSESYQQGVLSATNLSVIGFRILLLKVAGFNLLMTLRLWSSRAKRSGSGATNFSLLKQAGDVEENPGPTSMALPVTALLLPLALLLHAARPSYVLTQPPSVSVAPGQTARITCGGNNIGGKSVHWYQQPPGQAPVVVVYDDSDRPSGIPERFSGSNSGNTATLTISRVEAGDEAVYYCQVWDSSSDHVVFGGGTKLTVLGGGGSGGGGSGGGGSQLQLQESGPGLVKPSETLSLTCTVSGGSISSSSYFWGWIRQPPGKGLEWIGSIYYSGITYYNPSLKSRVTISVDTSKNQFSLKLSSVTAADTAVYYCARHDGAVAGLFDYWGQGTLVTVSSATRIQNPDPAVYQLRDSKSSDKSVCLFTDFDSQTNVSQSKDSDVYITDKCVLDMRSMDFKSNSAVAWSNKSDFACANAFNNSIIPEDTFFPSPESSCDVKLVEKSFETDTNLNFQILYEVIGFRILLLKVAGFNLLMTLRLWSSRAKRSGSGVKQTLNFDLLKLAGDVESNPGPSRGHMTEYKPTVRLATRDDVPRAVRTLAAAFADYPATRHTVDPDRHIERVTELQELFLTRVGLDIGKVWVADDGAAVAVWTTPESVEAGAVFAEIGPRMAELSGSRLAAQQQMEGLLAPHRPKEPAWFLATVGVSPDHQGKGLGSAVVLPGVEAAERAGVPAFLETSAPRNLPFYERLGFTVTADVEVPEGPRTWCMTRKPGA

SEQ ID NO: 43517 - protein, 868 aa, synthetic construct
MALPVTALLLPLALLLHAARPLEIQNPDPAVYQLRDSKSSDKSVCLFTDFDSQTNVSQSKDSDVYITDKCVLDMRSMDFKSNSAVAWSNKSDFACANAFNNSIIPEDTFFPSPESSCDVKLVEKSFETDTNLNFQILYEVIGFRILLLKVAGFNLLMTLRLWSSRAKRSGSGATNFSLLKQAGDVEENPGPTSMALPVTALLLPLALLLHAARPSYVLTQPPSVSVAPGQTARITCGGNNIGGKSVHWYQQPPGQAPVVVVYDDSDRPSGIPERFSGSNSGNTATLTISRVEAGDEAVYYCQVWDSSSDHVVFGGGTKLTVLGGGGSGGGGSGGGGSQLQLQESGPGLVKPSETLSLTCTVSGGSISSSSYFWGWIRQPPGKGLEWIGSIYYSGITYYNPSLKSRVTISVDTSKNQFSLKLSSVTAADTAVYYCARHDGAVAGLFDYWGQGTLVTVSSATREDLKNVFPPEVAVFEPSEAEISHTQKATLVCLATGFYPDHVELSWWVNGKEVHSGVCTDPQPLKEQPALNDSRYCLSSRLRVSATFWQNPRNHFRCQVQFYGLSENDEWTQDRAKPVTQIVSAEAWGRADCGFTSESYQQGVLSATNLSVIGFRILLLKVAGFNLLMTLRLWSSRAKRSGSGVKQTLNFDLLKLAGDVESNPGPSRGHMTEYKPTVRLATRDDVPRAVRTLAAAFADYPATRHTVDPDRHIERVTELQELFLTRVGLDIGKVWVADDGAAVAVWTTPESVEAGAVFAEIGPRMAELSGSRLAAQQQMEGLLAPHRPKEPAWFLATVGVSPDHQGKGLGSAVVLPGVEAAERAGVPAFLETSAPRNLPFYERLGFTVTADVEVPEGPRTWCMTRKPGA

SEQ ID NO: 43518 - protein, 868 aa, synthetic construct; identical to SEQ ID NO: 43516

SEQ ID NO: 43519 - protein, 976 aa, synthetic construct
MALPVTALLLPLALLLHAARPLEEDLKNVFPPEVAVFEPSEAEISHTQKATLVCLATGFYPDHVELSWWVNGKEVHSGVSTDPQPLKEQPALNDSRYCLSSRLRVSATFWQNPRNHFRCQVQFYGLSENDEWTQDRAKPVTQIVSAEAWGRADDVIKIHWQEKKSNTILGSQEGNTMKTNDTYMKFSWLTVPEKSLDKEHRCIVRHENNKNGVDQEIIFPPIKTDVITMDPKDNCSKDANDTLLLQLTNTSAYYMYLLLLLKSVVYFAIITCCLLMAMVKRKDSRGRAKRSGSGATNFSLLKQAGDVEENPGPTSMALPVTALLLPLALLLHAARPSYVLTQPPSVSVAPGQTARITCGGNNIGGKSVHWYQQPPGQAPVVVVYDDSDRPSGIPERFSGSNSGNTATLTISRVEAGDEAVYYCQVWDSSSDHVVFGGGTKLTVLGGGGSGGGGSGGGGSQLQLQESGPGLVKPSETLSLTCTVSGGSISSSSYFWGWIRQPPGKGLEWIGSIYYSGITYYNPSLKSRVTISVDTSKNQFSLKLSSVTAADTAVYYCARHDGAVAGLFDYWGQGTLVTVSSATRIQNPDPAVYQLRDSKSSDKSVCLFTDFDSQTNVSQSKDSDVYITDKTVLDMRSMDFKSNSAVAWSNKSDFACANAFNNSIIPEDTFFPSPESSDSTDHVKPKETENTKQPSKSCHKPKAIVHTEKVNMMSLTVLGLRMLFAKTVAVNFLLTAKLFFLLTARAKRSGSGVKQTLNFDLLKLAGDVESNPGPSRGHMTEYKPTVRLATRDDVPRAVRTLAAAFADYPATRHTVDPDRHIERVTELQELFLTRVGLDIGKVWVADDGAAVAVWTTPESVEAGAVFAEIGPRMAELSGSRLAAQQQMEGLLAPHRPKEPAWFLATVGVSPDHQGKGLGSAVVLPGVEAAERAGVPAFLETSAPRNLPFYERLGFTVTADVEVPEGPRTWCMTRKPGA

SEQ ID NO: 43520 - protein, 976 aa, synthetic construct
MALPVTALLLPLALLLHAARPLEIQNPDPAVYQLRDSKSSDKSVCLFTDFDSQTNVSQSKDSDVYITDKTVLDMRSMDFKSNSAVAWSNKSDFACANAFNNSIIPEDTFFPSPESSDSTDHVKPKETENTKQPSKSCHKPKAIVHTEKVNMMSLTVLGLRMLFAKTVAVNFLLTAKLFFLLTARAKRSGSGATNFSLLKQAGDVEENPGPTSMALPVTALLLPLALLLHAARPSYVLTQPPSVSVAPGQTARITCGGNNIGGKSVHWYQQPPGQAPVVVVYDDSDRPSGIPERFSGSNSGNTATLTISRVEAGDEAVYYCQVWDSSSDHVVFGGGTKLTVLGGGGSGGGGSGGGGSQLQLQESGPGLVKPSETLSLTCTVSGGSISSSSYFWGWIRQPPGKGLEWIGSIYYSGITYYNPSLKSRVTISVDTSKNQFSLKLSSVTAADTAVYYCARHDGAVAGLFDYWGQGTLVTVSSATREDLKNVFPPEVAVFEPSEAEISHTQKATLVCLATGFYPDHVELSWWVNGKEVHSGVSTDPQPLKEQPALNDSRYCLSSRLRVSATFWQNPRNHFRCQVQFYGLSENDEWTQDRAKPVTQIVSAEAWGRADDVIKIHWQEKKSNTILGSQEGNTMKTNDTYMKFSWLTVPEKSLDKEHRCIVRHENNKNGVDQEIIFPPIKTDVITMDPKDNCSKDANDTLLLQLTNTSAYYMYLLLLLKSVVYFAIITCCLLMAMVKRKDSRGRAKRSGSGVKQTLNFDLLKLAGDVESNPGPSRGHMTEYKPTVRLATRDDVPRAVRTLAAAFADYPATRHTVDPDRHIERVTELQELFLTRVGLDIGKVWVADDGAAVAVWTTPESVEAGAVFAEIGPRMAELSGSRLAAQQQMEGLLAPHRPKEPAWFLATVGVSPDHQGKGLGSAVVLPGVEAAERAGVPAFLETSAPRNLPFYERLGFTVTADVEVPEGPRTWCMTRKPGA

SEQ ID NO: 43521 - protein, 974 aa, synthetic construct
MALPVTALLLPLALLLHAARPLEEDLKNVFPPEVAVFEPSEAEISHTQKATLVCLATGFYPDHVELSWWVNGKEVHSGVCTDPQPLKEQPALNDSRYCLSSRLRVSATFWQNPRNHFRCQVQFYGLSENDEWTQDRAKPVTQIVSAEAWGRADDVIKIHWQEKKSNTILGSQEGNTMKTNDTYMKFSWLTVPEKSLDKEHRCIVRHENNKNGVDQEIIFPPIKTDVITMDPKDNCSKDANDTLLLQLTNTSAYYMYLLLLLKSVVYFAIITCCLLRRTAFCCNGEKSRAKRSGSGATNFSLLKQAGDVEENPGPTSMALPVTALLLPLALLLHAARPSYVLTQPPSVSVAPGQTARITCGGNNIGGKSVHWYQQPPGQAPVVVVYDDSDRPSGIPERFSGSNSGNTATLTISRVEAGDEAVYYCQVWDSSSDHVVFGGGTKLTVLGGGGSGGGGSGGGGSQLQLQESGPGLVKPSETLSLTCTVSGGSISSSSYFWGWIRQPPGKGLEWIGSIYYSGITYYNPSLKSRVTISVDTSKNQFSLKLSSVTAADTAVYYCARHDGAVAGLFDYWGQGTLVTVSSATRIQNPDPAVYQLRDSKSSDKSVCLFTDFDSQTNVSQSKDSDVYITDKCVLDMRSMDFKSNSAVAWSNKSDFACANAFNNSIIPEDTFFPSPESSDSTDHVKPKETENTKQPSKSCHKPKAIVHTEKVNMMSLTVLGLRMLFAKTVAVNFLLTAKLFFLRAKRSGSGVKQTLNFDLLKLAGDVESNPGPSRGHMTEYKPTVRLATRDDVPRAVRTLAAAFADYPATRHTVDPDRHIERVTELQELFLTRVGLDIGKVWVADDGAAVAVWTTPESVEAGAVFAEIGPRMAELSGSRLAAQQQMEGLLAPHRPKEPAWFLATVGVSPDHQGKGLGSAVVLPGVEAAERAGVPAFLETSAPRNLPFYERLGFTVTADVEVPEGPRTWCMTRKPGA

SEQ ID NO: 43522 - protein, 974 aa, synthetic construct
MALPVTALLLPLALLLHAARPLEIQNPDPAVYQLRDSKSSDKSVCLFTDFDSQTNVSQSKDSDVYITDKCVLDMRSMDFKSNSAVAWSNKSDFACANAFNNSIIPEDTFFPSPESSDSTDHVKPKETENTKQPSKSCHKPKAIVHTEKVNMMSLTVLGLRMLFAKTVAVNFLLTAKLFFLRAKRSGSGATNFSLLKQAGDVEENPGPTSMALPVTALLLPLALLLHAARPSYVLTQPPSVSVAPGQTARITCGGNNIGGKSVHWYQQPPGQAPVVVVYDDSDRPSGIPERFSGSNSGNTATLTISRVEAGDEAVYYCQVWDSSSDHVVFGGGTKLTVLGGGGSGGGGSGGGGSQLQLQESGPGLVKPSETLSLTCTVSGGSISSSSYFWGWIRQPPGKGLEWIGSIYYSGITYYNPSLKSRVTISVDTSKNQFSLKLSSVTAADTAVYYCARHDGAVAGLFDYWGQGTLVTVSSATREDLKNVFPPEVAVFEPSEAEISHTQKATLVCLATGFYPDHVELSWWVNGKEVHSGVCTDPQPLKEQPALNDSRYCLSSRLRVSATFWQNPRNHFRCQVQFYGLSENDEWTQDRAKPVTQIVSAEAWGRADDVIKIHWQEKKSNTILGSQEGNTMKTNDTYMKFSWLTVPEKSLDKEHRCIVRHENNKNGVDQEIIFPPIKTDVITMDPKDNCSKDANDTLLLQLTNTSAYYMYLLLLLKSVVYFAIITCCLLRRTAFCCNGEKSRAKRSGSGVKQTLNFDLLKLAGDVESNPGPSRGHMTEYKPTVRLATRDDVPRAVRTLAAAFADYPATRHTVDPDRHIERVTELQELFLTRVGLDIGKVWVADDGAAVAVWTTPESVEAGAVFAEIGPRMAELSGSRLAAQQQMEGLLAPHRPKEPAWFLATVGVSPDHQGKGLGSAVVLPGVEAAERAGVPAFLETSAPRNLPFYERLGFTVTADVEVPEGPRTWCMTRKPGA

SEQ ID NO: 43523 - protein, 974 aa, synthetic construct
MALPVTALLLPLALLLHAARPLEEDLKNVFPPEVAVFEPSEAEISHTQKATLVCLATGFYPDHVELSWWVNGKEVHSGVSTDPQPLKEQPALNDSRYCLSSRLRVSATFWQNPRNHFRCQVQFYGLSENDEWTQDRAKPVTQIVSAEAWGRADDVIKIHWQEKKSNTILGSQEGNTMKTNDTYMKFSWLTVPEKSLDKEHRCIVRHENNKNGVDQEIIFPPIKTDVITMDPKDNCSKDANDTLLLQLTNTSAYYMYLLLLLKSVVYFAIITCCLLRRTAFCCNGEKSRAKRSGSGATNFSLLKQAGDVEENPGPTSMALPVTALLLPLALLLHAARPSYVLTQPPSVSVAPGQTARITCGGNNIGGKSVHWYQQPPGQAPVVVVYDDSDRPSGIPERFSGSNSGNTATLTISRVEAGDEAVYYCQVWDSSSDHVVFGGGTKLTVLGGGGSGGGGSGGGGSQLQLQESGPGLVKPSETLSLTCTVSGGSISSSSYFWGWIRQPPGKGLEWIGSIYYSGITYYNPSLKSRVTISVDTSKNQFSLKLSSVTAADTAVYYCARHDGAVAGLFDYWGQGTLVTVSSATRIQNPDPAVYQLRDSKSSDKSVCLFTDFDSQTNVSQSKDSDVYITDKTVLDMRSMDFKSNSAVAWSNKSDFACANAFNNSIIPEDTFFPSPESSDSTDHVKPKETENTKQPSKSCHKPKAIVHTEKVNMMSLTVLGLRMLFAKTVAVNFLLTAKLFFLRAKRSGSGVKQTLNFDLLKLAGDVESNPGPSRGHMTEYKPTVRLATRDDVPRAVRTLAAAFADYPATRHTVDPDRHIERVTELQELFLTRVGLDIGKVWVADDGAAVAVWTTPESVEAGAVFAEIGPRMAELSGSRLAAQQQMEGLLAPHRPKEPAWFLATVGVSPDHQGKGLGSAVVLPGVEAAERAGVPAFLETSAPRNLPFYERLGFTVTADVEVPEGPRTWCMTRKPGA

SEQ ID NO: 43524 - protein, 974 aa, synthetic construct
MALPVTALLLPLALLLHAARPLEIQNPDPAVYQLRDSKSSDKSVCLFTDFDSQTNVSQSKDSDVYITDKTVLDMRSMDFKSNSAVAWSNKSDFACANAFNNSIIPEDTFFPSPESSDSTDHVKPKETENTKQPSKSCHKPKAIVHTEKVNMMSLTVLGLRMLFAKTVAVNFLLTAKLFFLRAKRSGSGATNFSLLKQAGDVEENPGPTSMALPVTALLLPLALLLHAARPSYVLTQPPSVSVAPGQTARITCGGNNIGGKSVHWYQQPPGQAPVVVVYDDSDRPSGIPERFSGSNSGNTATLTISRVEAGDEAVYYCQVWDSSSDHVVFGGGTKLTVLGGGGSGGGGSGGGGSQLQLQESGPGLVKPSETLSLTCTVSGGSISSSSYFWGWIRQPPGKGLEWIGSIYYSGITYYNPSLKSRVTISVDTSKNQFSLKLSSVTAADTAVYYCARHDGAVAGLFDYWGQGTLVTVSSATREDLKNVFPPEVAVFEPSEAEISHTQKATLVCLATGFYPDHVELSWWVNGKEVHSGVSTDPQPLKEQPALNDSRYCLSSRLRVSATFWQNPRNHFRCQVQFYGLSENDEWTQDRAKPVTQIVSAEAWGRADDVIKIHWQEKKSNTILGSQEGNTMKTNDTYMKFSWLTVPEKSLDKEHRCIVRHENNKNGVDQEIIFPPIKTDVITMDPKDNCSKDANDTLLLQLTNTSAYYMYLLLLLKSVVYFAIITCCLLRRTAFCCNGEKSRAKRSGSGVKQTLNFDLLKLAGDVESNPGPSRGHMTEYKPTVRLATRDDVPRAVRTLAAAFADYPATRHTVDPDRHIERVTELQELFLTRVGLDIGKVWVADDGAAVAVWTTPESVEAGAVFAEIGPRMAELSGSRLAAQQQMEGLLAPHRPKEPAWFLATVGVSPDHQGKGLGSAVVLPGVEAAERAGVPAFLETSAPRNLPFYERLGFTVTADVEVPEGPRTWCMTRKPGA

SEQ ID NO: 43525 - protein, 872 aa, synthetic construct
MALPVTALLLPLALLLHAARPLEEDLKNVFPPEVAVFEPSKAEIAHTQKATLVCLATGFYPDHVELSWWVNGKEVHSGVCTDPQPLKEQPALNDSRYCLSSRLRVSATFWQNPRNHFRCQVQFYGLSENDEWTQDRAKPVTQIVSAEAWGRADCGITSASYHQGVLSATILYEILLGKATLYAVLVSALVLMAMVKRKDSRGRAKRSGSGATNFSLLKQAGDVEENPGPTSMALPVTALLLPLALLLHAARPSYVLTQPPSVSVAPGQTARITCGGNNIGGKSVHWYQQPPGQAPVVVVYDDSDRPSGIPERFSGSNSGNTATLTISRVEAGDEAVYYCQVWDSSSDHVVFGGGTKLTVLGGGGSGGGGSGGGGSQLQLQESGPGLVKPSETLSLTCTVSGGSISSSSYFWGWIRQPPGKGLEWIGSIYYSGITYYNPSLKSRVTISVDTSKNQFSLKLSSVTAADTAVYYCARHDGAVAGLFDYWGQGTLVTVSSATRIQNPDPAVYQLRDSKSSDKSVCLFTDFDSQTNVSQSKDSDVYITDKCVLDMRSMDFKSNSAVAWSNKSDFACANAFNNSIIPEDTFFPSSDVPCDVKLVEKSFETDTNLNFQNLSVIGFRILLLKVAGFNLLMTLRLWSSRAKRSGSGVKQTLNFDLLKLAGDVESNPGPSRGHMTEYKPTVRLATRDDVPRAVRTLAAAFADYPATRHTVDPDRHIERVTELQELFLTRVGLDIGKVWVADDGAAVAVWTTPESVEAGAVFAEIGPRMAELSGSRLAAQQQMEGLLAPHRPKEPAWFLATVGVSPDHQGKGLGSAVVLPGVEAAERAGVPAFLETSAPRNLPFYERLGFTVTADVEVPEGPRTWCMTRKPGA

SEQ ID NO: 43526 - protein, 872 aa, synthetic construct
MALPVTALLLPLALLLHAARPLEIQNPDPAVYQLRDSKSSDKSVCLFTDFDSQTNVSQSKDSDVYITDKCVLDMRSMDFKSNSAVAWSNKSDFACANAFNNSIIPEDTFFPSSDVPCDVKLVEKSFETDTNLNFQNLSVIGFRILLLKVAGFNLLMTLRLWSSRAKRSGSGATNFSLLKQAGDVEENPGPTSMALPVTALLLPLALLLHAARPSYVLTQPPSVSVAPGQTARITCGGNNIGGKSVHWYQQPPGQAPVVVVYDDSDRPSGIPERFSGSNSGNTATLTISRVEAGDEAVYYCQVWDSSSDHVVFGGGTKLTVLGGGGSGGGGSGGGGSQLQLQESGPGLVKPSETLSLTCTVSGGSISSSSYFWGWIRQPPGKGLEWIGSIYYSGITYYNPSLKSRVTISVDTSKNQFSLKLSSVTAADTAVYYCARHDGAVAGLFDYWGQGTLVTVSSATREDLKNVFPPEVAVFEPSKAEIAHTQKATLVCLATGFYPDHVELSWWVNGKEVHSGVCTDPQPLKEQPALNDSRYCLSSRLRVSATFWQNPRNHFRCQVQFYGLSENDEWTQDRAKPVTQIVSAEAWGRADCGITSASYHQGVLSATILYEILLGKATLYAVLVSALVLMAMVKRKDSRGRAKRSGSGVKQTLNFDLLKLAGDVESNPGPSRGHMTEYKPTVRLATRDDVPRAVRTLAAAFADYPATRHTVDPDRHIERVTELQELFLTRVGLDIGKVWVADDGAAVAVWTTPESVEAGAVFAEIGPRMAELSGSRLAAQQQMEGLLAPHRPKEPAWFLATVGVSPDHQGKGLGSAVVLPGVEAAERAGVPAFLETSAPRNLPFYERLGFTVTADVEVPEGPRTWCMTRKPGA

SEQ ID NO: 43527 - protein, 765 aa, synthetic construct
MALPVTALLLPLALLLHAARPLEQSFGLLDPKLCYLLDGILFIYGVILTALFLRVKFSRSADAPAYQQGQNQLYNELNLGRREEYDVLDKRRGRDPEMGGKPQRRKNPQEGLYNELQKDKMAEAYSEIGMKGERRRGKGHDGLYQGLSTATKDTYDALHMQALPPRRAKRSGSGATNFSLLKQAGDVEENPGPTSMALPVTALLLPLALLLHAARPSYVLTQPPSVSVAPGQTARITCGGNNIGGKSVHWYQQPPGQAPVVVVYDDSDRPSGIPERFSGSNSGNTATLTISRVEAGDEAVYYCQVWDSSSDHVVFGGGTKLTVLGGGGSGGGGSGGGGSQLQLQESGPGLVKPSETLSLTCTVSGGSISSSSYFWGWIRQPPGKGLEWIGSIYYSGITYYNPSLKSRVTISVDTSKNQFSLKLSSVTAADTAVYYCARHDGAVAGLFDYWGQGTLVTVSSATRELGEPQLCYILDAILFLYGIVLTLLYCRLKIQVRKAAITSYEKSDGVYTGLSTRNQETYETLKHEKPPQRAKRSGSGVKQTLNFDLLKLAGDVESNPGPSRGHMTEYKPTVRLATRDDVPRAVRTLAAAFADYPATRHTVDPDRHIERVTELQELFLTRVGLDIGKVWVADDGAAVAVWTTPESVEAGAVFAEIGPRMAELSGSRLAAQQQMEGLLAPHRPKEPAWFLATVGVSPDHQGKGLGSAVVLPGVEAAERAGVPAFLETSAPRNLPFYERLGFTVTADVEVPEGPRTWCMTRKPGA

SEQ ID NO: 43528 - protein, 976 aa, synthetic construct; identical to SEQ ID NO: 43519

SEQ ID NO: 43529 - protein, 976 aa, synthetic construct; identical to SEQ ID NO: 43520

SEQ ID NO: 43530 - protein, 975 aa, synthetic construct
MALPVTALLLPLALLLHAARPLEEEDLKNVFPPEVAVFEPSEAEISHTQKATLVCLATGFYPDHVELSWWVNGKEVHSGVCTDPQPLKEQPALNDSRYCLSSRLRVSATFWQNPRNHFRCQVQFYGLSENDEWTQDRAKPVTQIVSAEAWGRADDVIKIHWQEKKSNTILGSQEGNTMKTNDTYMKFSWLTVPEKSLDKEHRCIVRHENNKNGVDQEIIFPPIKTDVITMDPKDNCSKDANDTLLLQLTNTSAYYMYLLLLLKSVVYFAIITCCLLRRTAFCCNGEKSRAKRSGSGATNFSLLKQAGDVEENPGPTSMALPVTALLLPLALLLHAARPSYVLTQPPSVSVAPGQTARITCGGNNIGGKSVHWYQQPPGQAPVVVVYDDSDRPSGIPERFSGSNSGNTATLTISRVEAGDEAVYYCQVWDSSSDHVVFGGGTKLTVLGGGGSGGGGSGGGGSQLQLQESGPGLVKPSETLSLTCTVSGGSISSSSYFWGWIRQPPGKGLEWIGSIYYSGITYYNPSLKSRVTISVDTSKNQFSLKLSSVTAADTAVYYCARHDGAVAGLFDYWGQGTLVTVSSATRIQNPDPAVYQLRDSKSSDKSVCLFTDFDSQTNVSQSKDSDVYITDKCVLDMRSMDFKSNSAVAWSNKSDFACANAFNNSIIPEDTFFPSPESSDSTDHVKPKETENTKQPSKSCHKPKAIVHTEKVNMMSLTVLGLRMLFAKTVAVNFLLTAKLFFLRAKRSGSGVKQTLNFDLLKLAGDVESNPGPSRGHMTEYKPTVRLATRDDVPRAVRTLAAAFADYPATRHTVDPDRHIERVTELQELFLTRVGLDIGKVWVADDGAAVAVWTTPESVEAGAVFAEIGPRMAELSGSRLAAQQQMEGLLAPHRPKEPAWFLATVGVSPDHQGKGLGSAVVLPGVEAAERAGVPAFLETSAPRNLPFYERLGFTVTADVEVPEGPRTWCMTRKPGA

SEQ ID NO: 43531 - protein, 975 aa, synthetic construct
MALPVTALLLPLALLLHAARPLEIQNPDPAVYQLRDSKSSDKSVCLFTDFDSQTNVSQSKDSDVYITDKCVLDMRSMDFKSNSAVAWSNKSDFACANAFNNSIIPEDTFFPSPESSDSTDHVKPKETENTKQPSKSCHKPKAIVHTEKVNMMSLTVLGLRMLFAKTVAVNFLLTAKLFFLRAKRSGSGATNFSLLKQAGDVEENPGPTSMALPVTALLLPLALLLHAARPSYVLTQPPSVSVAPGQTARITCGGNNIGGKSVHWYQQPPGQAPVVVVYDDSDRPSGIPERFSGSNSGNTATLTISRVEAGDEAVYYCQVWDSSSDHVVFGGGTKLTVLGGGGSGGGGSGGGGSQLQLQESGPGLVKPSETLSLTCTVSGGSISSSSYFWGWIRQPPGKGLEWIGSIYYSGITYYNPSLKSRVTISVDTSKNQFSLKLSSVTAADTAVYYCARHDGAVAGLFDYWGQGTLVTVSSATREEDLKNVFPPEVAVFEPSEAEISHTQKATLVCLATGFYPDHVELSWWVNGKEVHSGVCTDPQPLKEQPALNDSRYCLSSRLRVSATFWQNPRNHFRCQVQFYGLSENDEWTQDRAKPVTQIVSAEAWGRADDVIKIHWQEKKSNTILGSQEGNTMKTNDTYMKFSWLTVPEKSLDKEHRCIVRHENNKNGVDQEIIFPPIKTDVITMDPKDNCSKDANDTLLLQLTNTSAYYMYLLLLLKSVVYFAIITCCLLRRTAFCCNGEKSRAKRSGSGVKQTLNFDLLKLAGDVESNPGPSRGHMTEYKPTVRLATRDDVPRAVRTLAAAFADYPATRHTVDPDRHIERVTELQELFLTRVGLDIGKVWVADDGAAVAVWTTPESVEAGAVFAEIGPRMAELSGSRLAAQQQMEGLLAPHRPKEPAWFLATVGVSPDHQGKGLGSAVVLPGVEAAERAGVPAFLETSAPRNLPFYERLGFTVTADVEVPEGPRTWCMTRKPGA
